United States Patent Application Publication US 2005/0228172 A9 - sequence listing, part 149

SEQ ID NO: 689230 - DNA, 1215 bp, Homo sapiens
  misc_feature 857, 858, 859, 860, 861, 862, 863, 864, 865, 866, 867, 868,869, 870, 871, 872, 873, 874, 875, 876, 877, 878, 879, 880,881, 882, 883, 884, 885, 886, 887, 888, 889, 890, 891, 892,893, 894, 895, 896, 897, 898, 899, 900, 901, 902, 903: n = A,T,C or G
  misc_feature 904, 905, 906, 907, 908, 909, 910, 911, 912, 913, 914, 915,916, 917, 918, 919, 920, 921, 922, 923, 924, 925, 926, 927,928, 929, 930, 931, 932, 933, 934, 935, 936, 937, 938, 939,940, 941, 942, 943, 944, 945, 946, 947, 948, 949, 950: n = A,T,C or G
  misc_feature 951, 952, 953, 954, 955, 956: n = A,T,C or G
tgcatgtggaacccattggtgagaatccccgtgtggggtccattccaggcttcccctactccttgggcttccactggccccgcacacccaaagccctctgagggcagctcagccctgccgtttggagagtgctgtcagtttcaaacccaaacacctaggtgcatctctgcatagaccaccccttagccatcaaatacatcctcctcttcttctgcagaaacagaacagtgggtgagcacacagctgcccgtgctggagaacacatcaccctccatcctttgcaggtcagggaccatgtgcctaaacctcaatgtgagtgtaggtgatctgagatgcttctcagcctgggccttctgtgcaggtgcccctccattattgtcgcctccccaggaggtggagcacggaggtggatgccagcttccaccttgtagatgagcccgaccctatgggagatggcagagcaatgggatggaggggacctgggtcccaaagagctgcatgacacatccaggcccctgggccactgtctttaggaccacaacacgggagataaatcatacgctctgttcttaaagccccgtattctggagtgtttctggttaaagctgcttggagtttaccctcaccaacacagcgtgagaggatataaactagacggcgtgtgagcgtgttctgctgctataaatatcacctcgatgtttaaaaagcccctggagaaacacccagtacaatgaatgtcaatctctctaatgcttgtcacagtctgcatattagggagctttgggtggaatcaggaggtcctgggacctaaagggttggtaactgagtacaaacagaaccagtatccatggaagagnnnnnnnnnnnnnnnnnnnnnnnnnnnnnnnnnnnnnnnnnnnnnnnnnnnnnnnnnnnnnnnnnnnnnnnnnnnnnnnnnnnnnnnnnnnnnnnnnnnngatgcacatgggtattcaaatcgacatacacaaagagtagatggtggaaggagttctctcccactcccagtctctgtgtctccacctggagcccagcagtagttgtcagtttgttgtgtgaccttataaacagcccacaagggtgcaaacaagcttatccccctctgcttacccatggatgcatggaaatatactatgtcatctcctgtttatctggcttcttaattaaaaaaawgtatatatatattgatgattgctc

SEQ ID NO: 689231 - DNA, 1215 bp, Homo sapiens
  misc_feature 857, 858, 859, 860, 861, 862, 863, 864, 865, 866, 867, 868,869, 870, 871, 872, 873, 874, 875, 876, 877, 878, 879, 880,881, 882, 883, 884, 885, 886, 887, 888, 889, 890, 891, 892,893, 894, 895, 896, 897, 898, 899, 900, 901, 902, 903: n = A,T,C or G
  misc_feature 904, 905, 906, 907, 908, 909, 910, 911, 912, 913, 914, 915,916, 917, 918, 919, 920, 921, 922, 923, 924, 925, 926, 927,928, 929, 930, 931, 932, 933, 934, 935, 936, 937, 938, 939,940, 941, 942, 943, 944, 945, 946, 947, 948, 949, 950: n = A,T,C or G
  misc_feature 951, 952, 953, 954, 955, 956: n = A,T,C or G
tgcatgtggaacccattggtgagaatccccgtgtggggtccattccaggcttcccctactccttgggcttccactggccccgcacacccaaagccctctgagggcagctcagccctgccgtttggagagtgctgtcagtttcaaacccaaacacctaggtgcatctctgcatagaccaccccttagccatcaaatacatcctcctcttcttctgcagaaacagaacagtgggtgagcacacagctgcccgtgctggagaacacatcaccctccatcctttgcaggtcagggaccatgtgcctaaacctcaatgtgagtgtaggtgatctgagatgcttctcagcctgggccttctgtgcaggtgcccctccattattgtcgcctccccaggaggtggagcacggaggtggatgccagcttccaccttgtagatgagcccgaccctatgggagatggcagagcaatgggatggaggggacctgggtcccaaagagctgcatgacacatccaggcccctgggccactgtctttaggaccacaacacgggagataaatcatacgctctgttcttaaagccccgtattctggagtgtttctggttaaagctgcttggagtttaccctcaccaacacagcgtgagaggatataaactagacggcgtgtgagcgtgttctgctgctataaatatcacctcgatgtttaaaaagcccctggagaaacacccagtacaatgaatgtcaatctctctaatgcttgtcacagtctgcatattagggagctttgggtggaatcaggaggtcctgggacctaaagggttggtaactgagtacaaacagaaccagtatccatggaagagnnnnnnnnnnnnnnnnnnnnnnnnnnnnnnnnnnnnnnnnnnnnnnnnnnnnnnnnnnnnnnnnnnnnnnnnnnnnnnnnnnnnnnnnnnnnnnnnnnnngatgcacatgggtattcaaatcgacatacacaaagagtagatggtggaaggagttctctcccactcccagtctctgtgtctccacctggagcccagcagtagttgtcagtttgttgtgtgaccttataaacagcccacaagggtgcaaacaagcttatccccctctgcttacccatggatgcatggaaatatactatgtcatctcctgtttatctggcttcttaattaaaaaaatrtatatatatattgatgattgctc

SEQ ID NO: 689232 - DNA, 1857 bp, Homo sapiens
ttattgttctgttaaccaaggctttgctcaacagaaaatcaaaggtacaccagggaatgagccaagctcagaatctcacaggagaaacttctggccaattgattcacaatcaattttatctccacagacatgcaggaagctcagacaggctgtagaaatcaactggcctcgaaagtaacccaatatcccacggtctgtgtccctccatcctccctcctccctttgtcctggttaatataacttgatacttcataatcctggaacttacacgtgcctctgcaaaggtgaaaatccccacagtagagacacttcgtccagcagatatatgatcccatttgcctattaaatgcaaatatccaagtgggctgttggttcaaccaactactcaaacaaattgagcctagatcccaacaaaggtgaattgtgcaaaaatcaaaatgagccctgggtgggatcagcttcaacaccacgagagggaaatggagatgggaaaggagccggggtcagttcccccaaaaggagccatgtggtcttggtttggttttaattaactttaggaacacatttttttctttggctggcctgtgcgaaggtagaattgcgtggcaactggcatttcatgtaattggcactgatggtcactgaacccacagggctgagatcgacaccccgagtgctgctgatttcggtgaaattgaacaacgtgcatgtgaccgcaaacccagctgaaatgtgaatgccccgggatgggctggtttgcagcctgagaagaatagacttcactgtgctccaaatcaggacgcagtccaaacccgatctggatgtcccactgcccgtgtaggggtctgggatacagatcctgaggctgaggacactcaatagcctcccctcccccatctccagccaccatccagctgatgggggcccctggcagccacccaggtcactgtgtgtcccagggttaagggctctggggttgggcagagggggacccagctgaaggacaatgcatttactgacaccatctaggtaactgattaaacagtccttgtgagtagacctgggcctggccaatgccccctgcaaggtgcccacctgggcccccaagtgagtcagtgtgcaccaggcctgtctcctagtagacacgaggcatgtttattatcagtgataataaccctaatgacacattcgaaggacctgggactgcagatgtgatgaatttgaccgggtttcatttctctctggcatttagaaaagaggaacctccctttatgcccctactgtgaatgtccacgtccaaaccaacacacaagccaatacacggccactacactgcacaaacttcatttatgtgagatcatcggccatgagaccctgtgggcgctcagaggaagggggctgatgcagatgaagaggtcaagagacacttctggaggaggtgataccggggcagaatcctcaaggaagcataggaacccttcaagaccagggatgggggtccagccagaaggatcatgtgtgcaaaggtgggaaaccgccaggagtctcatgggaattccatttcccagggtgatgtccacacagttggcaggaggctgaaagggccagtcgggagttgaggggagccccggagggcttttgaaggttggtgcctgatatggtttggctgygtccccacccaaatctcatcttaaattgtagctcccgtaattcccaagtgttacacgagggacctggtgggagataattgaatcaggagggcggtttccccccccatactgttctcatggtagtaaataaatctcacgagatctgatgactttacaaggggtttccccttccgcttggctctcattc

SEQ ID NO: 689233 - DNA, 1857 bp, Homo sapiens
ttattgttctgttaaccaaggctttgctcaacagaaaatcaaaggtacaccagggaatgagccaagctcagaatctcacaggagaaacttctggccaattgattcacaatcaattttatctccacagacatgcaggaagctcagacaggctgtagaaatcaactggcctcgaaagtaacccaatatcccacggtctgtgtccctccatcctccctcctccctttgtcctggttaatataacttgatacttcataatcctggaacttacacgtgcctctgcaaaggtgaaaatccccacagtagagacacttcgtccagcagatatatgatcccatttgcctattaaatgcaaatatccaagtgggctgttggttcaaccaactactcaaacaaattgagcctagatcccaacaaaggtgaattgtgcaaaaatcaaaatgagccctgggtgggatcagcttcaacaccacgagagggaaatggagatgggaaaggagccggggtcagttcccccaaaaggagccatgtggtcttggtttggttttaattaactttaggaacacatttttttctttggctggcctgtgcgaaggtagaattgcgtggcaactggcatttcatgtaattggcactgatggtcactgaacccacagggctgagatcgacaccccgagtgctgctgatttcggtgaaattgaacaacgtgcatgtgaccgcaaacccagctgaaatgtgaatgccccgggatgggctggtttgcagcctgagaagaatagacttcactgtgctccaaatcaggacgcagtccaaacccgatctggatgtcccactgcccgtgtaggggtctgggatacagatcctgaggctgaggacactcaatagcctcccctcccccatctccagccaccatccagctgatgggggcccctggcagccacccaggtcactgtgtgtcccagggttaagggctctggggttgggcagagggggacccagctgaaggacaatgcatttactgacaccatctaggtaactgattaaacagtccttgtgagtagacctgggcctggccaatgccccctgcaaggtgcccacctgggcccccaagtgagtcagtgtgcaccaggcctgtctcctagtagacacgaggcatgtttattatcagtgataataaccctaatgacacattcgaaggacctgggactgcagatgtgatgaatttgaccgggtttcatttctctctggcatttagaaaagaggaacctccctttatgcccctactgtgaatgtccacgtccaaaccaacacacaagccaatacacggccactacactgcacaaacttcatttatgtgagatcatcggccatgagaccctgtgggcgctcagaggaagggggctgatgcagatgaagaggtcaagagacacttctggaggaggtgataccggggcagaatcctcaaggaagcataggaacccttcaagaccagggatgggggtccagccagaaggatcatgtgtgcaaaggtgggaaaccgccaggagtctcatgggaattccatttcccagggtgatgtccacacagttggcaggaggctgaaagggccagtcgggagttgaggggagccccggagggcttttgaaggttggtgcctgatatggtttggctgcgtccccacccaaatctcatcttaaattgtagctcccgtaattcccaagtgttacasgagggacctggtgggagataattgaatcaggagggcggtttccccccccatactgttctcatggtagtaaataaatctcacgagatctgatgactttacaaggggtttccccttccgcttggctctcattc

SEQ ID NO: 689234 - DNA, 643 bp, Homo sapiens
accccaaggccttgcacacagtaggtgctccactggttctagttcataacttgacaataacaccatgatcatttctcttcaagagctttgaacttttcccctcttagttggattttttttctaaaaccctttactttttaaaggatagtgtggtaatacaagccaaccctgaactatctgtttaatcttctttcccctaaatattagctcagtgggaaaaggagtctaacctctctgtatatttttctctgtgtatacttttggccagaaggctggaaaaaccaggactaaagcacggtgcttagagattctgagaaaagatggggagcaaaggccggccagaggcaggaagaggggtgtcaggagggcaagaacagatgggacccatctcccctggaagggctgtgtctgagggtttgctcgtcttatgtgtgagcaattctccatgacaagccacttgcacctctgtgacccgacccgaggggaggacagtttccagctgtcgccagtgctcagacccacctgagcccgctgggagtgcccttcacagagctcagaaaamgcacagcgggcacctttgtggtgcgcccctgctcacagtgccatgtgggcgccaagtgaggctgggtggtagtgatggttg

SEQ ID NO: 689235 - DNA, 1998 bp, Homo sapiens
caccatctctggttccaggtcactgagcacaccaccctctagaccactgccataccgtcactttcccaggatgctattgacrtatgacgctaaattatcacgtaatgaagaaccaaattctcagccttttctaattttcacagaaaatgaactttaattcaaaactaccactggctagttaaactttcctgtgatcaatttgctctaattatttccttaaattgagatgtaacaagggttatataaaattatcctaacagaagatcggattttactctgagttttaagctacaatgggagtttctaaattgttgcagcctgttgctggatgtggacaccagtctacaaaaatcagaattgggcaaaataagctttttcttcctctttgaaatcttaaagttttactctctgaaaatactaaaaactgaggttatactgaacaaacaattttgatatagatccagtggaaaactcatctaaattcaatacattgatcataaaatactaactataagccaaattagctcttcttgaagactgtaaaatccaattatgtgctgtattagaaagtattcagattctctgtcgaattgtattttcatatctctgtggcactaggatggtaactttttaaaaaatgtcccatgtttcttttttgtaggagggaaggaaaggagagagcaacaacctctggaagaaatggaagtggttatcactaatgcaaacatattacattgaatgaaagaatcttctttcacagctttgcagcaaacacacagaagacatgaagaaaataagtccacagcccaaattatcacaatgagtttggaacttaggatatccttcattttggctaatcagatcccttcctagttatgatggggcaaacttcgtaataacacacagcctggactccaccaatgggaataattatcatctgtagaagtattatgaaactgccttataaaagtttttttattaaataaatatataaaattaaactcatctatatttttaatgtacctcattgtagttcattatgtaacagcccccatatgttctgtatcattagtgaaacattctcagtggtgtaatgatgtagtacctacacatggggtaaagtaatgcattttttcatttcttctgcacatttcattacaaagtagagatgctgcaatttttcactcaagattccattttggtgtgggaaagaagaaacagacctagagccaaagctgcatccaatttctctaattttatgattcagcaattgataatttgctgaggataacttttcttaacagtcttcttccttatcagtgctcaggaaaggagagaaggacactgtagatcctagtacttctttctaagccaaccaggcatgtatgatttctgaggaatatgaatgataattgtaccaatgataaattgtggctcatgccccagttccttaaagggaaactgcagtttgtggcagataagaaatgtaggatcccatgttttccaaatttagttctctttagtatttgctgtagagatggatccattttctttggcttgattggtataactagagctttctaacgacttcatcaaaaagaaagctgttccagagtagcctctgtctttgggtgataggaaaggctgcttcacagctcataagatacctgtgcactgttctcatggaattttttaatgaaaagttacaaaccaccacacagaaatacaaaagacattttaagtatttccatgagatgtttcagggcccccactgtttatacagttgttgcttctccactttgcctagctttttattctctcctttgttgtttactgacagtaataaagggcagctggcttcttatagtttgactaccacactggctgtgaaatgtccttcccccgtctcccaggctcttctcagcttggctcagttaggatatacatttgcaacaggagtcccgagctctgccctccttacacccctgtctctaacct

SEQ ID NO: 689236 - DNA, 1998 bp, Homo sapiens
caccatctctggttccaggtcactgagcacaccaccctctagaccactgccataccgtcactttcccaggatgctattgacgtatgacgctaaattatcacgtaatgaagaaccaaattctcagccttttctaattttcacagaaaatgaactttaattcaaaactaccactggctagttaaactttcctgtgatcaatttgctctaattatttccttaaattgagatgtaacaagggttatataaaattatsctaacagaagatcggattttactctgagttttaagctacaatgggagtttctaaattgttgcagcctgttgctggatgtggacaccagtctacaaaaatcagaattgggcaaaataagctttttcttcctctttgaaatcttaaagttttactctctgaaaatactaaaaactgaggttatactgaacaaacaattttgatatagatccagtggaaaactcatctaaattcaatacattgatcataaaatactaactataagccaaattagctcttcttgaagactgtaaaatccaattatgtgctgtattagaaagtattcagattctctgtcgaattgtattttcatatctctgtggcactaggatggtaactttttaaaaaatgtcccatgtttcttttttgtaggagggaaggaaaggagagagcaacaacctctggaagaaatggaagtggttatcactaatgcaaacatattacattgaatgaaagaatcttctttcacagctttgcagcaaacacacagaagacatgaagaaaataagtccacagcccaaattatcacaatgagtttggaacttaggatatccttcattttggctaatcagatcccttcctagttatgatggggcaaacttcgtaataacacacagcctggactccaccaatgggaataattatcatctgtagaagtattatgaaactgccttataaaagtttttttattaaataaatatataaaattaaactcatctatatttttaatgtacctcattgtagttcattatgtaacagcccccatatgttctgtatcattagtgaaacattctcagtggtgtaatgatgtagtacctacacatggggtaaagtaatgcattttttcatttcttctgcacatttcattacaaagtagagatgctgcaatttttcactcaagattccattttggtgtgggaaagaagaaacagacctagagccaaagctgcatccaatttctctaattttatgattcagcaattgataatttgctgaggataacttttcttaacagtcttcttccttatcagtgctcaggaaaggagagaaggacactgtagatcctagtacttctttctaagccaaccaggcatgtatgatttctgaggaatatgaatgataattgtaccaatgataaattgtggctcatgccccagttccttaaagggaaactgcagtttgtggcagataagaaatgtaggatcccatgttttccaaatttagttctctttagtatttgctgtagagatggatccattttctttggcttgattggtataactagagctttctaacgacttcatcaaaaagaaagctgttccagagtagcctctgtctttgggtgataggaaaggctgcttcacagctcataagatacctgtgcactgttctcatggaattttttaatgaaaagttacaaaccaccacacagaaatacaaaagacattttaagtatttccatgagatgtttcagggcccccactgtttatacagttgttgcttctccactttgcctagctttttattctctcctttgttgtttactgacagtaataaagggcagctggcttcttatagtttgactaccacactggctgtgaaatgtccttcccccgtctcccaggctcttctcagcttggctcagttaggatatacatttgcaacaggagtcccgagctctgccctccttacacccctgtctctaacct

SEQ ID NO: 689237 - DNA, 1998 bp, Homo sapiens
caccatctctggttccaggtcactgagcacaccaccctctagaccactgccataccgtcactttcccaggatgctattgacgtatgacgctaaattatcacgtaatgaagaaccaaattctcagccttttctaattttcacagaaaatgaactttaattcaaaactaccactggctagttaaactttcctgtgatcaatttgctctaattatttccttaaattgagatgtaacaagggttatataaaattatcctaacagaagatcggattttactctgagttttaagctacaatgggagtttctaaattgttgcagcctgttgctggatgtggacaccagtctacaaaaatcagaattgggcaaaataagctttttcttcctctttgaaatcttaaagttttactctctgaaaatactaaaaactgaggttatactgaacaaacaattttgatatagatccagtggaaaactcatctaaattcaatacattgatcataaaatactaactataagccaaattagctcttcttgaagactgtaaaatccaattatgtgctgtattagaaagtattcagattctctgtcgaattgtattttcatatctctgtggcactaggatggtaactttttaaaaaatgtcccatgtttcttttttgtaggagggaaggaaaggagagagcaacaacctctggaagaaatggaagtggttatcactaatgcaaacatattacattgaatgaaagaatcttctttcacagctttgcagcaaacacacagaagacatgaagaaaataagtccacagcccaaattatcacaatgagtttggaacttaggatatccttcattttggctaatcagatcccttcctagttatgatggggcaaacttcgtaataacacacagcctggactccaccaatgggaataattatcatctgtagaagtattatgaaactgccttataaaagtttttttattaaataaatatataaaattaaactcatctatatttttaatgtacctcattgtagttcattatgtaacagcccccatatgttctgtatcattagtgaaacattctcagtggtgtaatgatgtagtacctacacatggggtaaagtaatgcattttttcatttcttctgcacatttcattacaaagtagagatgctgcaatttttcactcaagattccattttggtgtgggaaagaagaaacagacctagagccaaagctgcatccaatttctctaattttatgattcagcaattgataatttgctgaggataacttttcttaacagtcttcttccttatcagtgctcaggaaaggagagaaggacactgtagatcctagtacttctttctaagccaaccaggcatgtatgatttctgaggaatatgaatgataattgtaccaatgataaattgtggctcatgccccagttccttaaagggaaactgcagtttgtggcagataagaaatgtaggatcccatgttttccaaatttagttctctttagtatttgctgtagagatggatccattttctttggcttgattggtataactagagctttctaacgacttcatcaaaaagaaagctgttccagagtagcctctgtctttgggtgataggaaaggctgcttcacagctcataagatacctgtgcactgttctcatggaattttttaatgaaaagttacaaaccaccacacagaaatacaaaagacattttaagtatttccatgagatgtttcagggcccccactgtttatacagttgttgcttctccactttgcctagctttttattctctcctttgttgtttactgacagtaataaagggcagctggcttcttatagtttgactaccacactggctgtgaaatgtccttcccccgtctcccaggctcttctcagcttggctcagttaggatatacatttgcaacaggagtcccgagctctgccctccttacacccctgtcyctaacct

SEQ ID NO: 689238 - DNA, 661 bp, Homo sapiens
tgacctcctgttaagctggtgcaaaagtaattgagggctttaccattacttttaatgtagtaatttgccattacttttaatgcaagaaccgcaattacttttgcaccaatctaatacaagccaagaagagaagcctcagaagaaaccaatgctgccaataccttgatctcagacatgtagcctctaaaattctcaacaaaaatatttctgtttgccgagcgaggtggctcatgcctgtaatcccagaaytttgggaggccaaggcgggtggatcacctgaggtcaggagtttgagaccagcctgacccaacatggagaaaccccatctctactaaaaatacaaaaaattagccaggcattgtggtgcatgactgcaatcccagctacttgggaggctgaggcaggagaatcacttgaacccaggagacggaggttgcagtgagccaagattgcgccgttgcactccagcttgggcaacaagagcaaaactccatctcaaaaaaaaaaaaaaatttattgcttaagacttccagtctgtgagactgggttaggatagccctagcaatctaatacagtacctgacaccagtaggcgctaaataaacattaagccttgtagtgacaacattgagagttacagtggagagaaagcccggcagatg

SEQ ID NO: 689239 - DNA, 661 bp, Homo sapiens
tgacctcctgttaagctggtgcaaaagtaattgagggctttaccattacttttaatgtagtaatttgccattacttttaatgcaagaaccgcaattacttttgcaccaatctaatacaagccaagaagagaagcctcagaagaaaccaatgctgccaataccttgatctcagacatgtagcctctaaaattctcaacaaaaatatttctgtttgccgagcgaggtggctcatgcctgtaatcccagaattttgggaggccaaggcgggtggatcacctgaggtcaggagtttgagaccagcctgacccaacatggagaaaccccatctctactaaaaatacaaaaaattagccaggcattgtggtgcatgactgcaatcccagctacttgggaggctgaggcaggagaatcacttgaacccaggagacggaggttgcagtgagccaagattgcgccgttgcactccagcttgggcaacaagagcaaaactccatctcaaaaaaaaaaaaaaawttattgcttaagacttccagtctgtgagactgggttaggatagccctagcaatctaatacagtacctgacaccagtaggcgctaaataaacattaagccttgtagtgacaacattgagagttacagtggagagaaagcccggcagatg

SEQ ID NO: 689240 - DNA, 661 bp, Homo sapiens
agagagtaatgcccaataatatttaaaatttcaaagtgaaatgaacagaaatgtgcatgtttcagtaaatgtctccttgcttattctttgttttctgatgtattaactcacagttatggaatttctgccatgtttttctccatgggcaatgcaaagaatatgagaccaggactcagtttctttgtaagtagaagagaagagcattaaaatttatagggtacctacttagtgctcaataatggcctaacaattaattgtaacacaactattattatcctcattttacaaaatataggccttgagaacttcgatactatgacgaaggtcaggcaactagggcaaggtggtgtcatgatttgaacacaaccttgtctaaccagtttttcttcaawtgttacttatcattttgccaccctagaaaacaatgtttactttgggaatttatgagtatcagaatgcctaagttcttatgttcaaaggctagaccctcacatgaacacgcccttaagcctttctgagccatatttttcttgtgtaaataggccatagacagctatacagacagcataatgggggacatgcagagggtcaggttatacgtgtgagttatttggtaaatctgaggggagcaagtacaaaatctttgtgaaatctgaagtca

SEQ ID NO: 689241 - DNA, 669 bp, Homo sapiens
tgcactccagcctgggtgacaaagcgagactctgtctcaaaaaacaacaacaaaaacaaaaaagaaaaaaaaaattgtatgttcccatgcagttacatccataacacaaactcgtagaaacaggatttctgggtctctctatatttggaattattcatgtccatctctaacagatcacaaactcaaaagccagaaatgcattacagcctcttagctttgaagagttctggattgggtgccttttagccaatgatgcaaggggatggggacacagcatggggaggaggtgccttgagtcctagcaaagggagttgtttgggaaaaactctcaaaccacttttcctctgctctcacactgccatgatcaacacagaagatttctgtgacagcaaaatacatggggaaattttccccgtcagcaagcaagcaatcagttctgcagcagacaccagctgggtgtcccccaattcagttccaacactctccaccccagaggtagcatcagacaccrcagagtgagggctcagtgccataagaccacccccttctgcccgctaatcacaagtctgggcctttggaacttctgaccaaatggtttcaaactggggttcccacaaccccctctttgggctcaattactctgctagagcagctcacagaactcaggga

SEQ ID NO: 689242 - DNA, 647 bp, Homo sapiens
tgtatatacatatatrtgtgtatatatgtatatacatatatatgtgtgtgtatatatatgtatatacatatatatgtgtgtatatatatatgtgtgtgtatatatatatatatggaatctgaggcccagagagattagggaatttgtctcaaatctgacttagctaatctatgataaaaaaacaaatgtttggacacaggattatctgacccttaagttgggggaggggttcttattttggtcagaggcaattgaaaattggcagtaggtggatcagtctggatgtgtaatttggaaaatattcccggtgtttttctggagtctcacctaatctgctctgatgcctaatagcccgtccgttaccagtgctttctaacacagggttagccattgctattctcatcagctccatgtttagaagcttaacgcatcgactcagcaagccacaaacaccgtatcatggatgcgctggctagcacgagcattctgtgggcctgctaaggggacggggcagtggagagcgcagtgtggagcctggaatactgatgctccagaaacgtggagagagatgccgctcttcatggcaggtacgcaggccttgcttcctgcagcaagttaaaatcatccaccatcattagcaaagggct

SEQ ID NO: 689243 - DNA, 462 bp, Homo sapiens
  misc_feature 2, 3, 4, 5, 6, 7, 8, 9, 10, 11, 12, 13, 14, 15, 16, 17, 18,19, 20, 21, 22, 23, 24, 25, 26, 27, 28, 29, 30, 31, 32,33, 34, 35, 36, 37, 38, 39, 40, 41, 42, 43, 44, 45, 46,47, 48, 49, 50, 51, 52, 53, 54, 55, 56, 57, 58, 59, 60,61: n = A,T,C or G
  misc_feature 62, 63, 64, 65, 66, 67, 68, 69, 70, 71, 72, 73, 74, 75, 76,77, 78, 79, 80, 81, 82, 83, 84, 85, 86, 87, 88, 89, 90,91, 92, 93, 94, 95, 96, 97, 98, 99, 100, 101: n = A,T,C or G
cnnnnnnnnnnnnnnnnnnnnnnnnnnnnnnnnnnnnnnnnnnnnnnnnnnnnnnnnnnnnnnnnnnnnnnnnnnnnnnnnnnnnnnnnnnnnnnnnnnnnactggaaagaaacaataacaaaaatatgtgtctagaaacatctaaacatttttgaaaataattcaagaggtcaagtaaggaaatgttaatccaaagtgaagaaaaaataactagagaaatgagtacttaagctagtttattttgagagcatttgcagaacctggtaatgttatttttaatcttgatagccttaccaagtgataaggacagaaataaaagcagaagacaccttccacctgcccacacacacggaagaaccaaaggaccatggyaaggtaagggttaactgaatattcccatgaatcatttaaaatccttttgggggccaggtacaatggctcatgcttgtaatcctagcact

SEQ ID NO: 689244 - DNA, 659 bp, Homo sapiens
tatgtttatatatatatgcgtgtatatatatgtttatatatatatgtttgaaatgctaatttgtatacttcattggtacataaatattaacaaattcaacacaaagcgtacatttatggcatctgggtattgtatgaataaatatattgatttaattggtggttcaattctttcctccttaaaacacattgttctctaggcttctatgctaccccatctttccgaaccccattcactgcacatttcttctttttatttatagcctcctgatcctctactattaactctagatgtttaatgcccagaactgtgccctatgccctatactcttctctacgttaatctctgccaacatgatcttgttactccatgaatttaactttgcaaggtatcctgctgactctcatgccaataccttcagtcctgaccattccactgagctgagactagtttaattggctgcaagctccacatttcctttcaaatccattatgaatagcaaacatttactaaatttgaagacagagctatttatttgtaaatagtagatttrtttgttacttcctaccttttctgagactttgtgagttgtattcttcttttaatccatctatcataaaatttaacacatagccttagcttttatataggctatatta

SEQ ID NO: 689245 - DNA, 622 bp, Homo sapiens
atatagaacataaaaaaagatctaaaacaattgtatcatattctcatatgcatattaaaatgagacagaagaactatcttcattgtatgcttttttccctaccaagtatttcataaaataaatttttaaaaatgtaataacatcaaagcataatatattagattagtagaaatttacctgggttatgaacttcaaaatcctttttttttwaaaaaaattatacctttaagttctgggatacatgtgcagaatatgcaggtttgttgcataggtatacacgtgccatggtggtttgctgcacccatcaacccgtcatctacattagatatttctcctaatgctattcctcccctagcccccaaccccagacaggccctggtgtgtgttttttcccactctgtgtccatgtgttctcattgttcaacccccacttatgagtgagaacatgtggtgtttggttttctgtttctgtgttagtttgctgcgaatgatggtttccagcttcatccatgtccttgcaaaggacatgaactcatccttttttatggctgcatagtattccctggtataaatgtgtcacattttatttatccagtttatcattgatgggcatttgggatgg

SEQ ID NO: 689246 - DNA, 1542 bp, Homo sapiens
tcccaggtaatcctcaccctgtagagaaaggtgtattatttatctccgttttgcagatgagcctyaaggagatcattaattgtccaaagtcacctaggtaataagtgcagaaaatagggtttaaactcaagtcttggaactcctggcctagtgctttttccactgtgcacaacagagcacagcaggatggaaggctctgtgtggggacagcactctgtgcaaagcaacttcccccttagacctggtcattccagcatccagaatgtgcagataccaggcaggcggccggagtggagcttaacaaagacgcgtgattccaagtctgtgcccccaaatggtctaaactgtaaaggagaaagcaaaatatacccacaggatacctgtgtatcaataaatgccaataccagaggacaaataggccttaggaaggcaaacaaaaatgtgcagcatttagtcaatcctggaagctccctgggggaggtgatagactcctttcttttctcttcttgtttgacttggacttcagatgcagaagactcagttaactatattcatcagatcatagcacagtatcatgatcattggtctgttcaagatctgtcacatcttattgatgtttattctcactctcactttcatttaccttcttccataggcagccataatgtgtattcattttttggtatgtgttcttgaacatgtggattgtggatctgtgtgcttgtagtttaaatgcatgtgagcagaattcttatgcctctcatgcttggttgttttgttttgtttcgctgtttctcttagcactgtgctaagctttctccttgttgctgtgtgttgcagtgccacatctggtcctctgctttcagcaggtgcatatcctccgtgatagcatctacctgagtttacgggtccactcctcagtgatgatcactgaggttgcctccaagtccccgccatcataaacagcccagcaacggtaacaaacatcttcacatgtgacaccttatggctgtgttaagaaatttcagggacatcaaaccaggagcagaattgctgtttcatgggccatgtgtgtacttgctatgactaagtggtaccaggtcactccctcagtggctgccccagctacacccaccaccagtgctcctgtatacccacatctgcaccaatgcttggcattatcctgctcctgacttttgccaatccaaaggtaaaaagtgatagctcattgtggcttcagcttgtatttcttgaattaataatgagttggtgcatctcttttttgtgagcctttagggtaaaccacctgccattgcctactgttatattggggttcttgggggtcttttcttgatgatttgcaagagtcttgtatctcctagagagaccccttctcaaacagtgcacatctctttgctgctgtagttacccatctagggtaagagaacccatgtagtcaccagttcttcaaatcctcatcctgggggtcaggactttgtaatgggcatatatacaatcaaagtaaagggaaccccttcccca

SEQ ID NO: 689247 - DNA, 1542 bp, Homo sapiens
tcccaggtaatcctcaccctgtagagaaaggtgtattatttatctccgttttgcagatgagcctcaaggagatcattaattgtccaaagtcacctaggtaataagtgcagaaaatagggtttaaactcaagtcttggaactcctggcctagtgctttttccactgtgcacarcagagcacagcaggatggaaggctctgtgtggggacagcactctgtgcaaagcaacttcccccttagacctggtcattccagcatccagaatgtgcagataccaggcaggcggccggagtggagcttaacaaagacgcgtgattccaagtctgtgcccccaaatggtctaaactgtaaaggagaaagcaaaatatacccacaggatacctgtgtatcaataaatgccaataccagaggacaaataggccttaggaaggcaaacaaaaatgtgcagcatttagtcaatcctggaagctccctgggggaggtgatagactcctttcttttctcttcttgtttgacttggacttcagatgcagaagactcagttaactatattcatcagatcatagcacagtatcatgatcattggtctgttcaagatctgtcacatcttattgatgtttattctcactctcactttcatttaccttcttccataggcagccataatgtgtattcattttttggtatgtgttcttgaacatgtggattgtggatctgtgtgcttgtagtttaaatgcatgtgagcagaattcttatgcctctcatgcttggttgttttgttttgtttcgctgtttctcttagcactgtgctaagctttctccttgttgctgtgtgttgcagtgccacatctggtcctctgctttcagcaggtgcatatcctccgtgatagcatctacctgagtttacgggtccactcctcagtgatgatcactgaggttgcctccaagtccccgccatcataaacagcccagcaacggtaacaaacatcttcacatgtgacaccttatggctgtgttaagaaatttcagggacatcaaaccaggagcagaattgctgtttcatgggccatgtgtgtacttgctatgactaagtggtaccaggtcactccctcagtggctgccccagctacacccaccaccagtgctcctgtatacccacatctgcaccaatgcttggcattatcctgctcctgacttttgccaatccaaaggtaaaaagtgatagctcattgtggcttcagcttgtatttcttgaattaataatgagttggtgcatctcttttttgtgagcctttagggtaaaccacctgccattgcctactgttatattggggttcttgggggtcttttcttgatgatttgcaagagtcttgtatctcctagagagaccccttctcaaacagtgcacatctctttgctgctgtagttacccatctagggtaagagaacccatgtagtcaccagttcttcaaatcctcatcctgggggtcaggactttgtaatgggcatatatacaatcaaagtaaagggaaccccttcccca

SEQ ID NO: 689248 - DNA, 1542 bp, Homo sapiens
tcccaggtaatcctcaccctgtagagaaaggtgtattatttatctccgttttgcagatgagcctcaaggagatcattaattgtccaaagtcacctaggtaataagtgcagaaaatagggtttaaactcaagtcttggaactcctggcctagtgctttttccactgtgcacaacagagcacagcaggatggaaggctctgtgtggggacagcactctgtgcaaagcaacttcccccttagacctggtcattccagcatccagaatgtgcagataccaggcaggcggcyggagtggagcttaacaaagacgcgtgattccaagtctgtgcccccaaatggtctaaactgtaaaggagaaagcaaaatatacccacaggatacctgtgtatcaataaatgccaataccagaggacaaataggccttaggaaggcaaacaaaaatgtgcagcatttagtcaatcctggaagctccctgggggaggtgatagactcctttcttttctcttcttgtttgacttggacttcagatgcagaagactcagttaactatattcatcagatcatagcacagtatcatgatcattggtctgttcaagatctgtcacatcttattgatgtttattctcactctcactttcatttaccttcttccataggcagccataatgtgtattcattttttggtatgtgttcttgaacatgtggattgtggatctgtgtgcttgtagtttaaatgcatgtgagcagaattcttatgcctctcatgcttggttgttttgttttgtttcgctgtttctcttagcactgtgctaagctttctccttgttgctgtgtgttgcagtgccacatctggtcctctgctttcagcaggtgcatatcctccgtgatagcatctacctgagtttacgggtccactcctcagtgatgatcactgaggttgcctccaagtccccgccatcataaacagcccagcaacggtaacaaacatcttcacatgtgacaccttatggctgtgttaagaaatttcagggacatcaaaccaggagcagaattgctgtttcatgggccatgtgtgtacttgctatgactaagtggtaccaggtcactccctcagtggctgccccagctacacccaccaccagtgctcctgtatacccacatctgcaccaatgcttggcattatcctgctcctgacttttgccaatccaaaggtaaaaagtgatagctcattgtggcttcagcttgtatttcttgaattaataatgagttggtgcatctcttttttgtgagcctttagggtaaaccacctgccattgcctactgttatattggggttcttgggggtcttttcttgatgatttgcaagagtcttgtatctcctagagagaccccttctcaaacagtgcacatctctttgctgctgtagttacccatctagggtaagagaacccatgtagtcaccagttcttcaaatcctcatcctgggggtcaggactttgtaatgggcatatatacaatcaaagtaaagggaaccccttcccca

SEQ ID NO: 689249 - DNA, 1542 bp, Homo sapiens
tcccaggtaatcctcaccctgtagagaaaggtgtattatttatctccgttttgcagatgagcctcaaggagatcattaattgtccaaagtcacctaggtaataagtgcagaaaatagggtttaaactcaagtcttggaactcctggcctagtgctttttccactgtgcacaacagagcacagcaggatggaaggctctgtgtggggacagcactctgtgcaaagcaacttcccccttagacctggtcattccagcatccagaatgtgcagataccaggcaggcggccggagtggagcttaacaaagacgcgtgattccaagtctgtgcccccaaatggtctaaactgtaaaggagaaagcaaaatatacccacaggatacctgtgtatcaataaatgccaataccagaggacaaataggccttaggaaggcaaacaaaaatgtgcagcatttagtcaatcctggaagctccctgggggaggtgatagactcctttcttttctcttcttgtttgacttggacttcagatgcagaagactcagttaactatattcatcagatcatagcacagtatcatgatcattggtctgttcaagatctgtcacatcttattgatgtttattctcactctcactttcatttaccttcttccataggcagccataatgtgtattcattttttggtatgtgttcttgaacatgtggattgtggatctgtgtgcttgtagtttaaatgcatgtgagcagaattcttatgcctctcatgcttggttgttttgttttgtttcgctgtttctcttagcactgtgctaagctttctccttgttgctgtgtgttgcagtgccacatctggtcctctgctttcagcaggtgcatatcctccgtgatagcatctacctgagtttacgggtccactcctcagtgatgatcactgaggttgcctccaagtccccgccatcataaacagcccagcaacggtaacaaacatcttcacatgtgacaccttatggctgtgttaagaaatttcagggacatcaaaccaggagcagaattgctgtttcatgggccatgtgtgtacttgctatgactaagtggtaccaggtcactccctcagtggctgccccagctacacccaccaccagtgctcctgtatacccacatctgcaccaatgcttggcattatcctgctcctgacttttgccaatccaaaggtaaaaagtgatagctcattgtggcttcagcttgtatttcttgaattaataatgagttggtgcatctcttttttgtgagcctttagggtaaaccacctgccattgcctactgttatattggggttcttgggggtcttttcttgatgatttgcaagagtcttgtatctcctagagagaccccttctcaaacagtgcacatctctttgctgctgtagttacccatctagggtaagagaacccatgtagtcaccagttcttcaaaycctcatcctgggggtcaggactttgtaatgggcatatatacaatcaaagtaaagggaaccccttcccca

SEQ ID NO: 689250 - DNA, 634 bp, Homo sapiens
tactttaacttattatagaaggcttacaaaaactgtggataaataacatatatttatcttagttaatgaataactgatgctgaaaataatgtgaatgtcaaattagttctctttttttctagccctcacctttgaaaagcctgagcctctgagatgtgagatgactgctgtaaagtgaagcagcgaatttctagaggctgggttcacscttcaggtcctctaaatcctaggtcgcttcccactactacatactaccctaaaaaatctgtaattcgcaaatttattttttgatctttttcataacttattaaatttttattgaacaaatacaggaaacagttttaaattactcattgctcttgaatacattggtgattatttttcttctctgaaattctgttttccttaaaggcagtcattttttggtctcttctaaatgacacttagtatttttagtaacatcataacttcagtggccacagtgagccctcattttgcaacatatgcctacttttcatatctggcttgccttttattatttataatttaatgaaaagaaagtaccactctttccatagttttgtaatagaattgctgtcaacaaagtagtggatgcactatgttataaagattt

SEQ ID NO: 689251 - DNA, 1433 bp, Homo sapiens
aataacatttgaattcaaaataagacttaactacctgcaaagaaatttccatataaccttaacattacctaggaaatatcataaattcacatcacgctgtatgatgcatttaagattgatgtgaccaacagtttgtccaacagacttagctatacatctgttatcacgattataactaaatccgctaaaagatgaattagctttttgtttgaaaacagcttcaaattaattagtgaatgatccaagtttatggcatttttcatagaacaaaaacaggattgtagaggaaaacatctaggaaatatcatataaatgttctgctttaacctgtggcaaatcattacttttaaagtttatatttgaatataatatataaatgtaaatcagaagcaataaacacttcaaatatcaccaacaacctaaaagttgtagcttaccccctttcccctctatcgtatccatcttttaggagtataaaaaatctgattttagttgccatcttataaacataataccataaaataagtccaccagttaagacaagcactgaattacgatgaagaaaaagagcatttcagattaactcacaaagattatagaactgttattaccagaagcaccaacaattccatgaaagaactttgattaaaattcaaagcaatattttaactctcctccccccgacctgtttcaaagaagtactatgaaataaacatgtataaaacattccttttgttttagtcagcgtggctttaaaaatactcatttgtactctatgtctcctcttctacctcccccagaaatactagccaaactccaagtatactagctctaatattcacagcatggaaatgttttacattgtcttctaaagacccacagttagtaatcaagatcataaaatattttgaagctgaattaactttatttaaggggagaacaaagagtagaaggaaatggtggttgatctcttaatagaaaaggtactttagtcacacatggagaaaatagaactctgagttgtcagacatgtctcttcaaaggtattgacttacagttaaaatgttactcaggccgaccatttatggtatygtataaaaattctacactgctctgctaaaaaaggttatggtttagaaccccagaaatgagttggcattctggttgaaatcaaagcaaactctttcccatgtttcaatgttctctttgtggtaagatgtagcatgaagagatggtaaaatcactgcagataagggggaaaaaaaaactggctgatctcatctgtactgcagttattgctttgagatgatgctgaagactgcattattgaagcagtgctgggaaaaatgttgtattcctttctgtttcttttttcaaaatactttcaaaactctaaatcttttctcagaggcatttctaactctggaagccca

SEQ ID NO: 689252 - DNA, 965 bp, Homo sapiens
gaagatataagcagcaaagaacagattctctagggaatccactctacagtctcygtagactgcacagccctgccaccacctgattttagaccttggatgagagaataaatttctgttgttttaagccacagaacttcatgaacacagttggggtctgagaactggcatttcttatcactcccaggtgctgctgaagctgctgatctggggccccacacgagcactgcaatgaagccttggggaaaatgtgggtgtgaactcccagtccacggctcttctggatagagggcgcaccgactgcctctgtccaaaattctcttttagaaggtaagagatggattagcccaagggtcaagagtaaatttgtaagtcaagtgacataaatatattatgtttcttttgatgctaaccactaacataggaattaatcttgtatactaatgaagtatccgcagagacatgggtattgtcctccaaagacatccagaaatattctattacaaaagttctggaatcaaaagtaactgctgaaaaaatgtccagcttctctcctaaactcagtttcccttatgggcacataggcagtggccccagtgtccagaccattctcctacccctgcaaacctcttcagacagacggacaagcccttttctaattgccgtataaagaaactcagctaagaaatgaaatatgccagccgggcgcagtggctcacgcctgtaatcccagaactttgggaggccgaggcaggtgggtcacctgaggttgggagtttgagaccagcctgaccaacacggagaaaccccgtctctactaatacaaaaattagccgggcatggtggtgcatgcctataatcccagctactcgggaggctgaggcaggagaattgactgaacccgggaggcggaggttgtggtaagctgagatcacaccactgcactccagcctgggcaacaagagcaa

SEQ ID NO: 689253 - DNA, 965 bp, Homo sapiens
gaagatataagcagcaaagaacagattctctagggaatccactctacagtctctgtagacwgcacagccctgccaccacctgattttagaccttggatgagagaataaatttctgttgttttaagccacagaacttcatgaacacagttggggtctgagaactggcatttcttatcactcccaggtgctgctgaagctgctgatctggggccccacacgagcactgcaatgaagccttggggaaaatgtgggtgtgaactcccagtccacggctcttctggatagagggcgcaccgactgcctctgtccaaaattctcttttagaaggtaagagatggattagcccaagggtcaagagtaaatttgtaagtcaagtgacataaatatattatgtttcttttgatgctaaccactaacataggaattaatcttgtatactaatgaagtatccgcagagacatgggtattgtcctccaaagacatccagaaatattctattacaaaagttctggaatcaaaagtaactgctgaaaaaatgtccagcttctctcctaaactcagtttcccttatgggcacataggcagtggccccagtgtccagaccattctcctacccctgcaaacctcttcagacagacggacaagcccttttctaattgccgtataaagaaactcagctaagaaatgaaatatgccagccgggcgcagtggctcacgcctgtaatcccagaactttgggaggccgaggcaggtgggtcacctgaggttgggagtttgagaccagcctgaccaacacggagaaaccccgtctctactaatacaaaaattagccgggcatggtggtgcatgcctataatcccagctactcgggaggctgaggcaggagaattgactgaacccgggaggcggaggttgtggtaagctgagatcacaccactgcactccagcctgggcaacaagagcaa

SEQ ID NO: 689254 - DNA, 965 bp, Homo sapiens
gaagatataagcagcaaagaacagattctctagggaatccactctacagtctctgtagactgcacagccytgccaccacctgattttagaccttggatgagagaataaatttctgttgttttaagccacagaacttcatgaacacagttggggtctgagaactggcatttcttatcactcccaggtgctgctgaagctgctgatctggggccccacacgagcactgcaatgaagccttggggaaaatgtgggtgtgaactcccagtccacggctcttctggatagagggcgcaccgactgcctctgtccaaaattctcttttagaaggtaagagatggattagcccaagggtcaagagtaaatttgtaagtcaagtgacataaatatattatgtttcttttgatgctaaccactaacataggaattaatcttgtatactaatgaagtatccgcagagacatgggtattgtcctccaaagacatccagaaatattctattacaaaagttctggaatcaaaagtaactgctgaaaaaatgtccagcttctctcctaaactcagtttcccttatgggcacataggcagtggccccagtgtccagaccattctcctacccctgcaaacctcttcagacagacggacaagcccttttctaattgccgtataaagaaactcagctaagaaatgaaatatgccagccgggcgcagtggctcacgcctgtaatcccagaactttgggaggccgaggcaggtgggtcacctgaggttgggagtttgagaccagcctgaccaacacggagaaaccccgtctctactaatacaaaaattagccgggcatggtggtgcatgcctataatcccagctactcgggaggctgaggcaggagaattgactgaacccgggaggcggaggttgtggtaagctgagatcacaccactgcactccagcctgggcaacaagagcaa

SEQ ID NO: 689255 - DNA, 965 bp, Homo sapiens
gaagatataagcagcaaagaacagattctctagggaatccactctacagtctctgtagactgcacagccctgccaccacctgattttagaccttggatgagagaataaatttctgttgttttaagccacagaacttcatgaacacagttggggtctgagaactggcatttcttatcactcccaggtgctgctgaagctgctgatctggggccccacacgagcactgcaatgaagccttggggaaaatgtgggtgtgaactcccagtccacggctcttctggatagagggcgcaccgactgcctctgtccaaaattctcttttagaaggtaagagatggattagcccaagggtcaagagtaaatttgtaagtcaagtgacataaatatattatgtttcttttgatgctaaccactaacataggaattaatcttgtatactaatgaagtatccgcagagacatgggtattgtcctccaaagacatccagaaatattctattacaaaagttctggaatcaaaagtaactgctgaaaaaatgtccagcttctctcctaaactcagtttcccttatgggcacataggcagtggccccagtgtccagaccattctcctacccctgcaaacctcttcagacagacggacaagcccttttctaattgccgtataaagaaactcagctaagaaatgaaatatgccagccgggcgcagtggctcacgcctgtaatcccagaactttgggaggccgaggcaggtgggtcacctgargttgggagtttgagaccagcctgaccaacacggagaaaccccgtctctactaatacaaaaattagccgggcatggtggtgcatgcctataatcccagctactcgggaggctgaggcaggagaattgactgaacccgggaggcggaggttgtggtaagctgagatcacaccactgcactccagcctgggcaacaagagcaa

SEQ ID NO: 689256 - DNA, 598 bp, Homo sapiens
ttgatcttgatgatggctgcatgggtataaagactatcctttctccattgaattgcctttgcccctttgtcaaaartcaattgatcatttatgtgcaggtctatttctggactattcttttctgttgatctatgtttcctgtcttttcaccaataccagtcttgataaacgtagctttataatgagcaaaatcaggtagcatgattccttaactttattcttcgactcaatgacgtttagccttattttctaataggcagtatttaatgttaaaaattttcaaatacatttctgttttatcctaaaaattttatagtttgttgttcagttttagatttaaacattttttcattatgatttcttctgtaacctataggtgttttcctatccttttatatttatatccgatttaatggcattgtggacagagtacttggtccgttaagctatgcacttaatatctatctgtatactagctatctgttatacctcactgaataagttgaaagaaagaactaagaatgctggaatttggagattcattaaaatggaaagaaacctaggttgtcatcctgcttttgtacgttggatagatgcg

SEQ ID NO: 689257 - DNA, 668 bp, Homo sapiens
gaagccaaagaagggaaaagtgattaaacaaatgtgaggggctgatgtcaaatgctgtagaagtcaagtcaaaaagaactgctccctcaccactccatctctcctaagcccccctcaaacctcagcagctcctttctcaggctactggaatgtcttttcctgaaggtgcacagagacttccaagtctccagatccagtgatctattcacaaccttatctcttacaacttctttgcaacaatcaaatagcttcttgaaattttctcctaggcttttgtgactacagggtccttgttaccctcaaagcaccctcagcatggctcttcttcctgcctcctgaacataatctttccccaaagtcctgtcctcttttcttcctcaacatccactgaagtgtcttctagtggttagacctatgctaggtgctgatgataccaatawgtaaaacataagcctggcttttaagaggttgatggcatagccatagaggaagatgaaaatagatggcaataagacagtgtgatgaaaagttattagcagggtactctgggagtgtacagggagcaactgggcctgaagaagttaggaaagaaacagtaaatagaaaagcatcagccaggcatagtggctcacacctacaatcctagcactttagaggccaaggcagga

SEQ ID NO: 689258 - DNA, 585 bp, Homo sapiens
attatttaaagcaatattgtttccattatgcatatctgttgccagaacagcatgactgtcttgactgaatgaggaagtgggaatgctcttaattttcctacacgcatctgcagaagtacttttgattgtttagccaatgcacatataatgatgtaggcataaatgtttctgcacacattttccttggcacttcagaagagaagggtaatgcaaagggtaattacatatactattgtttgcattaaaatttacatatatatatatatatayacacacacatatatatatcctaaattgtaagctgaggaaatgtttaatattttgaagcataaaaattaggatggactccttctatagaaatctctgttatgtgatcacattttatttatatacttcagctaaacaatttcctttattttttgctttgggcttgtataagctttctaccaaactctaaagttcttagggatcaaatagtgctactcaaacttgcttaccttgccttgaaacacatcaacttacttgctcgttagatgggtccattattttccaaggagacaggaaaggaaaacagacaaggtatta

SEQ ID NO: 689259 - DNA, 585 bp, Homo sapiens
attatttaaagcaatattgtttccattatgcatatctgttgccagaacagcatgactgtcttgactgaatgaggaagtgggaatgctcttaattttcctacacgcatctgcagaagtacttttgattgtttagccaatgcacatataatgatgtaggcataaatgtttctgcacacattttccttggcacttcagaagagaagggtaatgcaaagggtaattacatatactattgtttgcattaaaatttacatatatatatatatatacacacacayatatatatatcctaaattgtaagctgaggaaatgtttaatattttgaagcataaaaattaggatggactccttctatagaaatctctgttatgtgatcacattttatttatatacttcagctaaacaatttcctttattttttgctttgggcttgtataagctttctaccaaactctaaagttcttagggatcaaatagtgctactcaaacttgcttaccttgccttgaaacacatcaacttacttgctcgttagatgggtccattattttccaaggagacaggaaaggaaaacagacaaggtatta

SEQ ID NO: 689260 - DNA, 601 bp, Homo sapiens
cccacactcctcattcattaatctttactagcttggtcattttaggcatttgatttttgaacccctggtgtaaaaggattttcatactgccatgccctgagttcatgacagaggtaggcctagagtgcaggtctgtggcttgtattcttttaccataaaatgtttacattgaactgatgtatggctaacacatccttctttcctctcctccaagagccttctgctcccctgaacttctcacaattgcccaagagctcacgcattcccatgtccccatacgcttgatgctgttccttgtgcttttcatccagtctacctgccactctcccrtctcccgactaaacctgagtcctagtgctccacttaaagttcccctgctctctgcagctgtctcagagccaatctgcaacctccctcctctccctcaaccatcatttattcagactcatcatttgttcaataaatgtcaaataagagaatgaagaagggatacaatagttttaggctaatgcattcgtctgcactggattgacttttttcccaaggtctatgttgggtgacacattatgacttccctgtctgtttaaactatgggtcagat

SEQ ID NO: 689261 - DNA, 1603 bp, Homo sapiens
tcttgacacttgctaaggtatagaagactcatatttctctcttttctctcccttttgttgagaggcaaccatggagatagcaggacttcttaaccctggggtgctttaaaaaactgaggcctgggccccacctggagattctgactcactgggtstgggtgggccccagcatgtctgttaacagcaactccccagggaacaactgatgaagggagggaggcctagctctgcaatttgtctctgtgagaccataggcgagtccttctccctgggcctccgtgctccacgtgttgtgtgtgtgcgtgtgtgtgcgcctgtgtgtgtgagcatgtgtgtgtgagatgatcttcgctctctgactctggatcttatatcgcagtccctaattctgatcccagcggctgaggccagggtgagaacttgggttctgactgcatgcaccactgccctcttgtggacatgcgcacaactgtgacggtggctgatgcgttctcccgtcaccaatgttaggaatcaatagtgcttcaaggggtgatttagtcaagcatagcaaaggctgcgattaatcactccctgaagatagccatctcctttttttaacagactttagtgaagacttcatcctgcgcattcttattttaaaagttgattaatttttttagaattagcttcctatagtaaggggatggggtggagtaattgctttgtagaataaccatgattaaaaataaggtggaacattcaggaaaaagtcaaaaagaccatcaagtagtccctgggagagagccgcatagcagagtggctgggagtcccagggatgagggagcaaaggttctgcagctgagctgctcagaatgtttcctcccctgctcgcagatacccctcctgaacctcttctaacccaccaccccttggaaatttcctcctctggtgtcagcctcctcttgccccatcttctctcagttcctttcttcgagccccttcctggcctctgtgttctaccacacacatgctcttctgtttccttttgttcaacagatttcactggcccattcgcagaaaaaatggtaacaacctgttagctgttttcatcaatttatgtgatgtattgtgcattaattactagtattctctatgtcatattattattattagagatgatggaagaggaagggcattgtatattaattatcagtatatttcatatatatatatgtatgtacgtgtatttgtttgagacaaggtcttgctttgttgcccaactggagtgcagcagcactgcagccttgagctcctggccttgaactcctggcctcaagtgatcctcccaccttggactcccaaagtgctaggattacaggcgtgagtcaccatgcccaactaggactatataataattattttgggggaaagatataagaaaaaggataaatgtgtttctaaaattggatataattttgaacatttaaatttacctgaaacagtttttgtgtcatatttgtacaattttttttttcttttgagacagattttcgctcttgttgcccaggctggggtgcaaatggcgcaatctcggctcactgcaacctctgcctcccaggtt

SEQ ID NO: 689262 - DNA, 1603 bp, Homo sapiens
tcttgacacttgctaaggtatagaagactcatatttctctcttttctctcccttttgttgagaggcaaccatggagatagcaggacttcttaaccctggggtgctttaaaaaactgaggcctgggccccacctggagattctgactcactgggtctgggtgggccccagcatgtctgttaacagcaactccccagggaacaactgatgaagggagggaggcctagctctgcaatttgtctctgtgagaccataggcgagtccttctccctgggcctccgtgctccacgtgttgtgtgtgtgcgtgtgtgtgcgcctgtgtgtgtgagcatgtgtgtgtgagatgatcttcgckctctgactctggatcttatatcgcagtccctaattctgatcccagcggctgaggccagggtgagaacttgggttctgactgcatgcaccactgccctcttgtggacatgcgcacaactgtgacggtggctgatgcgttctcccgtcaccaatgttaggaatcaatagtgcttcaaggggtgatttagtcaagcatagcaaaggctgcgattaatcactccctgaagatagccatctcctttttttaacagactttagtgaagacttcatcctgcgcattcttattttaaaagttgattaatttttttagaattagcttcctatagtaaggggatggggtggagtaattgctttgtagaataaccatgattaaaaataaggtggaacattcaggaaaaagtcaaaaagaccatcaagtagtccctgggagagagccgcatagcagagtggctgggagtcccagggatgagggagcaaaggttctgcagctgagctgctcagaatgtttcctcccctgctcgcagatacccctcctgaacctcttctaacccaccaccccttggaaatttcctcctctggtgtcagcctcctcttgccccatcttctctcagttcctttcttcgagccccttcctggcctctgtgttctaccacacacatgctcttctgtttccttttgttcaacagatttcactggcccattcgcagaaaaaatggtaacaacctgttagctgttttcatcaatttatgtgatgtattgtgcattaattactagtattctctatgtcatattattattattagagatgatggaagaggaagggcattgtatattaattatcagtatatttcatatatatatatgtatgtacgtgtatttgtttgagacaaggtcttgctttgttgcccaactggagtgcagcagcactgcagccttgagctcctggccttgaactcctggcctcaagtgatcctcccaccttggactcccaaagtgctaggattacaggcgtgagtcaccatgcccaactaggactatataataattattttgggggaaagatataagaaaaaggataaatgtgtttctaaaattggatataattttgaacatttaaatttacctgaaacagtttttgtgtcatatttgtacaattttttttttcttttgagacagattttcgctcttgttgcccaggctggggtgcaaatggcgcaatctcggctcactgcaacctctgcctcccaggtt

SEQ ID NO: 689263 - DNA, 1603 bp, Homo sapiens
tcttgacacttgctaaggtatagaagactcatatttctctcttttctctcccttttgttgagaggcaaccatggagatagcaggacttcttaaccctggggtgctttaaaaaactgaggcctgggccccacctggagattctgactcactgggtctgggtgggccccagcatgtctgttaacagcaactccccagggaacaactgatgaagggagggaggcctagctctgcaatttgtctctgtgagaccataggcgagtccttctccctgggcctccgtgctccacgtgttgtgtgtgtgcgtgtgtgtgcgcctgtgtgtgtgagcatgtgtgtgtgagatgatcttcgctctctgactctggatcttatatcgcagtccctaattctgatcccagcggctgaggccagggtgagaacttgggttctgactgcatgcaccactgccctcttgtggacatgcgcacaactgtgacggtggctgatgcgttctcccgtcaccaatgttaggaatcaatagtgcttcaaggggtgatttagtcaagcatagcaaaggctgcgattaatcactccctgaagatagccatctcctttttttaacagactttagtgaagacttcatcctgcgcattcttattttaaaagttgattaatttttttagaattagcttcctatagtaaggggatggggtggagtaattgctttgtagaataaccatgattaaaaataaggtggaacattcaggaaaaagtcaaaaagaccatcaagtagtccctgggagagagccgcatagcagagtggctgggagtcccagggatgagggagcaaaggttctgcagctgagctgctcagaatgtttcctcccctgctcgcagatacccctcctgaacctcttctaacccaccaccccttggaaatttcctcctctggtgtcagcctcctcttgccccatcttctctcagttcctttcttcgagccccttcctggcctctgtgttctaccacacacatgctcttctgtttccttttgttcaacagatttcactggcccattcgcagaaaaaatggtaacaacctgttagctgttttcatcaatttatgtgatgtattgtgcattaattactagtattctctatgtcatattattattattagagatgatggaagaggaagggcattgtatattaattatcagtatatttcatatatatatatgtatgtaygtgtatttgtttgagacaaggtcttgctttgttgcccaactggagtgcagcagcactgcagccttgagctcctggccttgaactcctggcctcaagtgatcctcccaccttggactcccaaagtgctaggattacaggcgtgagtcaccatgcccaactaggactatataataattattttgggggaaagatataagaaaaaggataaatgtgtttctaaaattggatataattttgaacatttaaatttacctgaaacagtttttgtgtcatatttgtacaattttttttttcttttgagacagattttcgctcttgttgcccaggctggggtgcaaatggcgcaatctcggctcactgcaacctctgcctcccaggtt

SEQ ID NO: 689264 - DNA, 1603 bp, Homo sapiens
tcttgacacttgctaaggtatagaagactcatatttctctcttttctctcccttttgttgagaggcaaccatggagatagcaggacttcttaaccctggggtgctttaaaaaactgaggcctgggccccacctggagattctgactcactgggtctgggtgggccccagcatgtctgttaacagcaactccccagggaacaactgatgaagggagggaggcctagctctgcaatttgtctctgtgagaccataggcgagtccttctccctgggcctccgtgctccacgtgttgtgtgtgtgcgtgtgtgtgcgcctgtgtgtgtgagcatgtgtgtgtgagatgatcttcgctctctgactctggatcttatatcgcagtccctaattctgatcccagcggctgaggccagggtgagaacttgggttctgactgcatgcaccactgccctcttgtggacatgcgcacaactgtgacggtggctgatgcgttctcccgtcaccaatgttaggaatcaatagtgcttcaaggggtgatttagtcaagcatagcaaaggctgcgattaatcactccctgaagatagccatctcctttttttaacagactttagtgaagacttcatcctgcgcattcttattttaaaagttgattaatttttttagaattagcttcctatagtaaggggatggggtggagtaattgctttgtagaataaccatgattaaaaataaggtggaacattcaggaaaaagtcaaaaagaccatcaagtagtccctgggagagagccgcatagcagagtggctgggagtcccagggatgagggagcaaaggttctgcagctgagctgctcagaatgtttcctcccctgctcgcagatacccctcctgaacctcttctaacccaccaccccttggaaatttcctcctctggtgtcagcctcctcttgccccatcttctctcagttcctttcttcgagccccttcctggcctctgtgttctaccacacacatgctcttctgtttccttttgttcaacagatttcactggcccattcgcagaaaaaatggtaacaacctgttagctgttttcatcaatttatgtgatgtattgtgcattaattactagtattctctatgtcatattattattattagagatgatggaagaggaagggcattgtatattaattatcagtatatttcatatatatatatgtatgtacgtgtatttgtttgagacaaggtcttgctttgttgcccaactggagtgcagcagcactgcagccttgagctcctggccttgaactcctggcctcaagtgatcctcccaccttggactcccaaagtgctaggattacaggcgtgagtcaccatgcccaactaggactatataataattattttgggggaaagatataagaaaaaggataaatgtgtttctaaaattggatataattttgaacatttaaatttacctgaaacagkttttgtgtcatatttgtacaattttttttttcttttgagacagattttcgctcttgttgcccaggctggggtgcaaatggcgcaatctcggctcactgcaacctctgcctcccaggtt

SEQ ID NO: 689265 - DNA, 624 bp, Homo sapiens
ggttatgaaaggatcatcacaacactcaggtggtggtcatggttgtgggggaaggggcttcctagcaggctccgcgactgcagccacatttgaaggatgtgctggctagtccagaaacccctagcttgccagtctgggggcccccattgtcctaatcccatcgggactggtcaggtctgaagtttctcctgcaggctgtaccccagagtccctgaggcactctgacgagggtgcagggccagtggcttggcttcagctaactcagctccttggatttgaaatgagccttgctgtctggaatgagactcggttgcctgtgtggcttaagataacagtaagacccaaagtgtattgagactttacaatttgccaggcattgttgtaaatgattcgcatgcgatatcctatttgatcaaragccctagcagaatggtactattttgaatgtctgcatcatacagatgaggaaactgaggcacaagagggcacctctcacaggcaataaatagccgagccaggcagactcaggcagcatgatttcagaggccagtgtactcaacaatgaggaatgttggaaattgcagcctctcccagtgggtcccatacacctgggcttttgcctca

SEQ ID NO: 689266 - DNA, 611 bp, Homo sapiens
tcactgatccctctctgctgctgcacaggggttctggtaatgtattccctctaagacccctctgagatgccaatccaggcagctcctccttcatgactccagctcccacaaggcccctttaggccaatgggcagcagacttctccctgtggctactcctgggtgcctcctcagccttagctgtttctctaacctggcttcacctctgtaaataggtagcctttgttcaattcttttccaaactccatctgaatgtagtgcctgcttcctgcagggaccctgactgacacaccctccttgtcccccttttcattaggagaccaagggataaacagttgaaaagttaaatggcagtatgagtgaaacaatgayaaatatgtgagaatacatttaagcaacaaacaggcacgcttacattttctttctaacttagaaaagtggattcccaaagtccgtctcaaaaactcagaaagctcaaaagttttctgtgggttatgcggtgcagctcctgtatttttacaaatatgggtaaatttctgactgaaagacattttcaggccggggtggcagctcacacctatgatcttagctacttgggagtctgaggtggca

SEQ ID NO: 689267 - DNA, 353 bp, Homo sapiens
gcccggctaattttttgtatttttagtagagacgggtttcaccgtgttagccaggatggtctcgatctcctgacctcgtgatccgcccgcctcggcctcccaaagtgctgggattacaggcgtgagccaccgcgcccggccgtactcttgatttttacatcccatcgccctgcccagtttttccccctcctgcctttcccatttcattgaatggaatctgtctattctccctggtactcctcatccttaatatttccctttccttcaccagtcctccttcccaccaagccacagctaatccaacagcaaarcaagttcaattaattctctctctctctgtttttttttttttt

SEQ ID NO: 689268 - DNA, 2821 bp, Homo sapiens
ggtggctttacataggtgaaggatatatttatctcctctgtctctgagttcccacagtataccttatctgtgtcactcattctgatactaaccttatacttcaattgacaatggggttatgtactgataaacccagcacaaattgaaaatattgaaagttgaaaatgcacttaatatacctaagtacttaaactgcctaatattatatctttaattaatacacctagcttgacaaatatcacagcttagcctagcctatcttaaaagtgctcagaacacttacattagcctaattttgggaaaaaatcaaaattcaaactttaaggtatggtttatattgaatttataccacttttacacagtagaaaagttgaaaaattttaaggggaaccgtgacaagttagggaccatctgtctagtgggtttccctgttacttcactcagccaaatgtggatagctttcatcccaactcaactgcaagctattgaagagcagacgagaacaaagtttgaaacaagtgaccttagatttcattctgcctctcttttctctagccccaagctcttctagcattatgagtcaaagagtaaatacttaatgctcagatatttaaaaatttatttcattgacctgcaaaggaatgtcataaagaattaattgtattttgtagtaaacttatacagttctctccctggagattgaaagttctcttctgaggtagattccaagtcagtttatcattttcttcagctctttgttctagaacactggttgtgaggcttgtcaatgaggtcatcctacacctaagttaaaaggggcggccagtcagggtggctcacgcctgtaattccagcactttgggaggccgaggcgggcggataacaacgtcaggagatcgagaccatcttggataacacagtgaaaccccgtctctactaaaaatacaacaaattggccgggtgtggtggcacaagttygtagtcccagccacctgggaggctgaggcaggagaatcacttgaacaggggagacggaggttgcagtgagccgagatcgtgccactgcactccagcctgggtgacagagtgagactccgtctcaaaagtaaataaataaataaataaataaataaataaataagggggcattttctagtttccgctttatatgagctcaacattgctctagattttagtgtgaaatcaatttctacaaaaactatctactgattacagagtccattgttttaactgggagtccacttccaggtatgtgtactgtttacatatagagattttccttataggctttctaatggaatgcccctttaaaaataaaatattaagctgagagtggtggcttatgacataaactcagcaatttgggagggtaaggcagaaggatcatttgaggccaggagtttgagaccagcttaggcaacatagcgagatcctgtctcttaaaaaacttaaaaataaaaaaaattagctggacttggtggtgcacacctgtagtctcagctacttcagttgctgaggtgggaggatttcactctggccccagaggtcaaggctgcagtgagctatgattgcgccactgcactccagcctcggtgacaaagtgagaacctgtctggggggaaaaaaaaaacagaaaatattatttttgaagaataaaatgaccatatttatttttctatgaatctgtttttcaatgtctgtctatctttattcacccttcccagaccatttgagagtaaattcaaaaagattatcttttacctctggccaggcatggtagctcacacctataatcccagcactttgggaggccgaggcgggtggatcacgacgtcaagagatcgacaccatactggccaacatggtgaaatcccgtttctactaaaaatacaaaaatttgctgggcatggaggcatgtgcctatagtcccagctactcagaaggctgaggcaggaaaatcgcttgaacccgggaggtggaggttgcatgagctgagattggccaccgcactccagtctgggcaacagaacaagacaccgtcgaaacaaaaaaaaaaattatattttgcctctaaattctttaatgtatacctcctaaaataagaatattctcttacatcttttatataacatcaatacaaatataaaaatgaggaaattaacattgatacaaaattatcatctaatatacaacaaatacacgctcaaatatcactagttgttccaattatattttttagaattttttttcctggttcaggatccagccccggattatgtgttacatttcatgccttatctcttcagtcatctttaatatggaatcattcttctctgtgtctgtcttttgagagcttgacatttttgtgaagcaaaaaataagtgattttaaaggagtatttatatcagaaatacacatcctctgtactaaaatattttattcacatgaattttgtgaagacatgataattgcaaaaggttagaaatcatggatttgagtttaaaattttatttttttagctttttagtttccttgtgattggtgttacagaatgtgggtccatttttaaatctcatatgaacacataatatttgaagtcaatacatttatagcttctagggggatggtgcatagaaggcaaggacaagggaaagaagaagaaagatacagaagagaaaaaatagtcttttttttttctttttaagaaagggatttcattatctgagaattatctggaaagcttttcaactgttgaagatatatttagcaaacatcctaaaaatgcttccttttctcttga

SEQ ID NO: 689269 - DNA, 604 bp, Homo sapiens
attcaatgctatccccatcaagctaccaatgactttcttcacagaactggaaaaaactactttaaagttcatatggaaccaaaaaagagyccgcatcaccaagtcaatcctaagccaaaagaacaaagctggaggcatcacactacctgacttcaaactatactacaaggctacagtaaccaaaacagcatggtactggtaccaaaacagagatatagatcaatggaacagaacagagccctcagaaataacgccgcatacctacaactatccgatctttgacaaacctgagaaaaacaagcaatggggaaaggattccctatttaataaatggtgctgggaaaactggctagccatatgtagaaagctgaaactggatcccttccttacaccttatacaaaaatcaattcaaggtggattaaagatttaaacgttagacctaaaaccataaaaaccctagaagaaaacctaggcattaccattcaggacataggcgtgggcaaggacttcatgtccaaaatatctatttagttttaataaatatacttcaagttaaaaaaatgcttttgacaataatttatatctaactgtgtagccttcccc

SEQ ID NO: 689270 - DNA, 604 bp, Homo sapiens
attcaatgctatccccatcaagctaccaatgactttcttcacagaactggaaaaaactactttaaagttcatatggaaccaaaaaagagcccgcatcaccaagtcaatcctaagccaaaagaacaaagctggaggcatcacactacctgacttcaaactatactacaaggctacagtaaccaaaacagcatggtactggtaccaaaacagagatatagatcaatggaacagaacagagccctcagaaataacgccgcatacctacaactatcygatctttgacaaacctgagaaaaacaagcaatggggaaaggattccctatttaataaatggtgctgggaaaactggctagccatatgtagaaagctgaaactggatcccttccttacaccttatacaaaaatcaattcaaggtggattaaagatttaaacgttagacctaaaaccataaaaaccctagaagaaaacctaggcattaccattcaggacataggcgtgggcaaggacttcatgtccaaaatatctatttagttttaataaatatacttcaagttaaaaaaatgcttttgacaataatttatatctaactgtgtagccttcccc

SEQ ID NO: 689271 - DNA, 2020 bp, Homo sapiens
cagrcatgacccgctgcgcctggcagaatgatttttaaatatgtaatattttctacatgaaggcagtttttgctcattaaaactgttcaaaagatagccatattttatttttaattttggtataaaatattaagtttgaaattgttatataaacatgttactcaatggaggatatttgagagctatgtttgggatcatttgtgtcttaagtgatgcaagtggtaggtggaaaacatttagataaatattagtgctatttagcagacagaatcaccctcagcttttctgcactgctatgacatttagagtggtacattttcatcctctgattttttttctgctgcttcccttaggtttgtatttatctcagttttcctgatgtaaacaaatccagcagttttggttacctggacatggttttatttgggtaacaggatatattaaggttgctagtgttatggttcacaaggcatttctcttatgatttcctatgaagagcttaagatactttattaaatctggagataattctcataactcagtgaaggtaggttaagtatattttaaaaaatcttagtagccgatctatctatatttcattttaatctcttttaccaacagctatcccagtgagctttcccaaattttaaaaattcaattaatgaataatcatttcaattaaagaaataaacaaaattgaaagtgcaaagtaattcaacattaacacaagtattagggtcatgccatatctttcaacccaacttatgctcttagaacaaaattgattattaaggagaacttagtaatttgctaataaaaggattatcttactctatgatttgatatcaaattccagagcttattaaagtaacttaacctgtttcctctatctgtctttggctctagaatttgttttgatttgctttttaataattcttaccgttaaataagaaatatagaaagcttcataaaacaaatgggtaggttactaaattaccaaaaggtgtacactcttgtaactctcacttatgtcaggaagtaaacctcaccagcttcctcaggacagtgctgtctgcttcctcaatcacagctcttttctttccactaagaattgccctcctgacttttaattgcctccttattttattgtccaattgtgcttccatagacactgacgttcagttttgcttgttattttttaaagtatttttaaatttataggatccctctgcatcacttgtcttttctgaaatctgtttatgaaagagccagagtcatgtgtcctgtcaattttcacaggctggattttgctgattgcgttcctgtatagtttaacacgttcctctgccttttctgataattggtagtcatatctagagacttaaactcaggctagctttattttgtatttatgttattttttaggtaaatttacttcctacttggtgtgtgcccctcatgaggagtcataggagggattcaatgacaaattgtcacttttgataaagttagaagctcttaaagttcagtacttggatcttttttattccttaggatttgcaaaatgttgatactatattctgtctgtcattcttcttttatctgttcattgaaatatttctgtaaggagccacattccttcctctactctttggtcacccaattctacagatcatataagaaaagcagaataaatgcttgattgtttccttttatttatacccagtttatgttttgaagctgtgttgactgtaattctcgtatactttggaacacaagatctataattcatctttaaataccacagctgtgcttttcaaaggagaaatatgcttattttaattttggccacatatctgagttattcaaaatttgcttttgagatattacactctgaactatataatgagccaatgctgtgtaaactccacttctttcaaaattccaccttcaccagatgtgtagtcagattgccactcactttaattcattttccttatagatgttctactgtgctttg

SEQ ID NO: 689272 - DNA, 1491 bp, Homo sapiens
cttctggattaatatcttgcttgctcaataatgcaaagtgttggctaatattgtacctgttatacagtacatgctttcaatgaatagttgttgaacaaaagaggggtgtgaaatagaagttttagaagttagactaaaagaaatagtttgcattaaacatatttttaatttacctattgattttaattaargtcttgctgagtttgcaaatgcaaagtgatttttctagaggaaatatattttaaatctttcccatatgtttttcatattcttaatgtataaaatcagagtcctaaagattacaatgcacacacttaaatgatggcttgttaaatcagcctgcatctacctgagatgaaaaaaaggttatgaaatagaaataatggattgagtttttgatataaaaagcagagacaatagctcttccagttaagaatacagaatttttcttatgaaagaaatgtttttatgatagaaaaatatttattgagcttatgcctctcttagatcaatttatgtcttccatgcagttttgaaaacctttttctctttttctttaaaatataatttctttccaagaaagtctcttatttacctcagagaaagaaaatcaatactagtgcagagaaaaagagacattcttattttccatttggttccttaaaattacagacattataattaacataaaatcattacatactgattttcataatagaaatcatgatgatcaaattggtacattttataacctcaaactcagaaaattgctaaggtagatatgtagttggtttttttaattggtatttcaccaaaagtaattaattatagaatgtgtcattttcagtagcatttttttttgcaaaatatcagagttccacaaaagatttagtagaaacccggcagaacacaatattctgtctttatatacaaaattaatgcttcaacattaggaattgtgcagatttcataatttttgcttaagagtattataataacagtgataaaataccattgtgttaaattaaactactctgttaaatgagagatggatggaggagataattgtagacagacagacaataatgattaggacataagggcatagaagaaaatatacttaataatacatgtgaaaagctaaataggcttatagctgtccaatcccaaaatactagatttaggttctatatctttaagctggaaagaaacctgggggcatagaacttaaaaaataggaaagacttaggaacaatataaagaaaaattaaaatagtacttttctgctaagttgtaaatgaatgtaacttaatacctccaggaagtggtatagtttagaaatacagtacaaggagattcaaaaaaacactgaagaattcataatgggtccttgctgcaattaatacacttgagatatatttggagtgggtattgacaagcaggccctgctactgaccgttagctgacactgacatactgggtggattgaag

SEQ ID NO: 689273 - DNA, 1491 bp, Homo sapiens
cttctggattaatatcttgcttgctcaataatgcaaagtgttggctaatattgtacctgttatacagtacatgctttcaatgaatagttgttgaacaaaagaggggtgtgaaatagaagttttagaagttagactaaaagaaatagtttgcattaaacatatttttaatttacctattgattttaattaaggtcttgctgagtttgcaaatgcaaagtgatttttctagaggaaatataytttaaatctttcccatatgtttttcatattcttaatgtataaaatcagagtcctaaagattacaatgcacacacttaaatgatggcttgttaaatcagcctgcatctacctgagatgaaaaaaaggttatgaaatagaaataatggattgagtttttgatataaaaagcagagacaatagctcttccagttaagaatacagaatttttcttatgaaagaaatgtttttatgatagaaaaatatttattgagcttatgcctctcttagatcaatttatgtcttccatgcagttttgaaaacctttttctctttttctttaaaatataatttctttccaagaaagtctcttatttacctcagagaaagaaaatcaatactagtgcagagaaaaagagacattcttattttccatttggttccttaaaattacagacattataattaacataaaatcattacatactgattttcataatagaaatcatgatgatcaaattggtacattttataacctcaaactcagaaaattgctaaggtagatatgtagttggtttttttaattggtatttcaccaaaagtaattaattatagaatgtgtcattttcagtagcatttttttttgcaaaatatcagagttccacaaaagatttagtagaaacccggcagaacacaatattctgtctttatatacaaaattaatgcttcaacattaggaattgtgcagatttcataatttttgcttaagagtattataataacagtgataaaataccattgtgttaaattaaactactctgttaaatgagagatggatggaggagataattgtagacagacagacaataatgattaggacataagggcatagaagaaaatatacttaataatacatgtgaaaagctaaataggcttatagctgtccaatcccaaaatactagatttaggttctatatctttaagctggaaagaaacctgggggcatagaacttaaaaaataggaaagacttaggaacaatataaagaaaaattaaaatagtacttttctgctaagttgtaaatgaatgtaacttaatacctccaggaagtggtatagtttagaaatacagtacaaggagattcaaaaaaacactgaagaattcataatgggtccttgctgcaattaatacacttgagatatatttggagtgggtattgacaagcaggccctgctactgaccgttagctgacactgacatactgggtggattgaag

SEQ ID NO: 689274 - DNA, 1039 bp, Homo sapiens
atttaatgattgttgtcttcagaagtttggagtataaattgttttcaattgtgatgaagaaggctacaagtgaagctggttttggaaaggggatatattttggttttaaacatgtcatgttttataagataaagtttgaatagaatgagattgctaggactggtattyttcactgactttttttagtatcacttaatcctgccctcacctttgtaaataaaacttacattaaaattcaccaattactttgaggtttttgtttcctgctaggacaatgaataattgattaacaaatacaaaccctttcactttcttggatccttaatgccaagcttttttttaggtggcataaatggattttcagaattaaaaaaaaaacaactttactagatttaattagtggtgtgctattggagtttcatgtgtttcatccatgtaacaatctactaatctactattgtaggaataactatggataaactatgtgagtatttgaggatttttgctttgtttgctttgctttgttttgattttttcccaagttgaaattcaacaatggtatatccccataggatctagtaatgttactgatcagagtcttatacagagagaaaaggctaatgtacacaaaaatgtgtccaaagttatcattgcaggacattttgtgaaaatggattttctgatgtggaactggtcaatgagctctatgaaacagagagacaaagcatgcttaaagctaaaggatgtccagcctctcctaaaagagaaagtacagcatttatcttatttttaaagtttcagctgtgaattagtacacacctttgagctcacatctctcttcccctgcctgtgggatgatgtactatggggaaaggagagagcttctgcaataccactattttccaaaacagatgcactcatgttttaacacctattcaaacaataccctttataggtttcatcctcaataaaacatttgcactctaaaactcaaaatgaattaaagagagaaagaaacaaaaatgatagtctttagaac

SEQ ID NO: 689275 - DNA, 650 bp, Homo sapiens
tatccactttatattccagttcaattttgttttaacatgatctgatgaaaaacttacgagaccaaggtattaatgaaactctaacattagttattttttaatcacctaatttttagttatttttactttttatttattcgtttttgaggcatagtttatatattataaaactcattcttttaagcattcaaatcagtgggttttaatatattcacaaagckgtgcaatcatcaccactttctaactccagaacattttcatagccccaaaaacaaaccacatgccctgtggcacttcgtcacaccgtttcttctcctctcaggccccagcaatcactaatctgtttcccgtctttatcgatttgcccattctggatatttcatacagatgaaataatacaatacacagctttttgtgtctggctttcttcacttagcataacactttcaaagtttatccgtattgtagcatgtgccattacttcatttctttttaaaattgaataataatattttattgtgataaacatatcacattttgcttctccatgcatccattgatgaaagattagtgtcgtgttcagtttttggctttttgaataatgcgcccatggatattcctgtacaagcttctgagtggaccagtgtttt

SEQ ID NO: 689276 - DNA, 628 bp, Homo sapiens
gataaagaggtatgtactcaatctattattatactctatggtattaatattcatgtatagggtgttcttggaatacgtgagttaagattatgtgtgtgtaagcttttatttatttaatttaattaattaatttatttatttgagactgagtctcgttctgttgcccaggctggagtgcagtggagtgatctyagctcactgcaacctccgcatcccaggttcaagctattctcctgcctcagcctcccgagtagctgagattacaggcgcccgccactacgcctggctaattttttgtatttttagtagagacggggtttcaccatgttggcaggctagtctcgaactcctgaccttgtgattcgcctgcctcagcctcccaaagtgctgggattacaggcgtgagccaccgtgcccagctatttatttattttttgagatggagtttcgctcttgttgcctaggagggagtgcaatggcacgatcttggctcaccacaacctccacctcccaggttcaagcaattctcctgccttggcctcccaagtagctgggattacaggcatgcaccactacgcctggctaattttgtgtttttagtagagaaggtgtttttccatgttggtca

SEQ ID NO: 689277 - DNA, 628 bp, Homo sapiens
gataaagaggtatgtactcaatctattattatactctatggtattaatattcatgtatagggtgttcttggaatacgtgagttaagattatgtgtgtgtaagcttttatttatttaatttaattaattaatttatttatttgagactgagtctcgttctgttgcccaggctggagtgcagtggagtgatctcagctcactgcaacctccgcatcccaggttcaagctattctcctgcctcagcctcccgagtagctgagattacaggcgcccgccactacgcctggctaattttttgtatttttagtagagacggggtttcaccatgttggcaggctagtctcgaactcctgaccttgtgattcgcctgcctcagcctcccaaagtgctgggattacaggcgtgagccaccgtgcccagctatttatttattttttgagatggagtttcgctcttgttgcctaggagggagtgcaatggcacgatcttggctcaccacaacctccacctcccaggttcaagcaattctcctgccttggcctcccaagtagctgggattacaggcatgcaccactacgcctggctaattttgtgtttttagtagagawggtgtttttccatgttggtca

SEQ ID NO: 689278 - DNA, 687 bp, Homo sapiens
tcctggaaatcccaataagcagcagagtttatgagtctaacaaggggttttgagcttaaggtatataaataaatgacataatttaggaggtgacttttccttaggattctgttctgagggaaccaggcttcttacctaaagtttgatgggactgctgaagtcagagataatgatggtgattggtccaggaaaagtctttatgggataactgagcagsctagagtattggactgattgtgagttagagaaggcagtgtacatcaggagtcatgaaggtcaaatggtaaggttgaggacactgtatctcaaaagggtcacgccatttttgcccagcttaaatcctttagcttgacaaattattttaaatccatccagaattgccagtctctatgaaattaaaggtcttcatctttttctctgactcatagattaacagtgctgacctaatgtttaggaaatccttgggtggaagaaatggtaggagtatggagatcctcttcttttacattagggaattagttgtccagatgttctgtttattctgagtgatctcaacacagtccatggagtatattttctgtttccacctttttagagaagacaatttgtgcatgtctacatatacacacatatatgagagagcacagattatacatttactcttttaactgccattacatctctcca

SEQ ID NO: 689279 - DNA, 687 bp, Homo sapiens
tcctggaaatcccaataagcagcagagtttatgagtctaacaaggggttttgagcttaaggtatataaataaatgacataatttaggaggtgacttttccttaggattctgttctgagggaaccaggcttcttacctaaagtttgatgggactgctgaagtcagagataatgatggtgattggtccaggaaaagtctttatgggataactgagcagcctagagtattggactgattgtgagttagagaaggcagtgtacatcaggagtcatgaaggtcaaatggtaaggttgaggacactgtatctcaaaagggtcacgccatttttgcmcagcttaaatcctttagcttgacaaattattttaaatccatccagaattgccagtctctatgaaattaaaggtcttcatctttttctctgactcatagattaacagtgctgacctaatgtttaggaaatccttgggtggaagaaatggtaggagtatggagatcctcttcttttacattagggaattagttgtccagatgttctgtttattctgagtgatctcaacacagtccatggagtatattttctgtttccacctttttagagaagacaatttgtgcatgtctacatatacacacatatatgagagagcacagattatacatttactcttttaactgccattacatctctcca

SEQ ID NO: 689280 - DNA, 595 bp, Homo sapiens
tttaacagatttccatatgctcacatatgtatgatgcacagcagtgacccctcctggagaatctgaattagaagtggacatcttctcttcccctgaaggcagatcaaaaattacccatgtctttcctagaactgctacagatgcattttcctctgatgagtgctggttgtgtcttcttagaaaaagacagctaaattggaaaaccgttttcaccaaagcrctcctccatgcccagtaggatccctattcataaacatcctaaaacgctagttcgtgttgcactacaactattaactgattttcagaaaataggatacagtgattgcctcaatctatattccaactctttttcgttaatgacaaaaagaatggggcttgcattttagcaatgtaccagtcatcctttcaaattgcaacttggctccataaaaccatgagctctttaaaaacaattcataccgtccataagggcatctcagatggaaccagccacctatgcttgttattagtagtgcccattcttgttttaatctattgctagctagtgtgttaaacttctatagctccaaattaatgaggcccctaatgtattttc

SEQ ID NO: 689281 - DNA, 593 bp, Homo sapiens
taaggccactatggagtaaagtgttaaatctatttaaggatatttttaaaaatcagagtaagtggagaaatatcctatactctttgatgagatgtcatcacattacagagttcagctatcttcaaataagtctataaattttatgcaattctattcaaaattctagctgaagttttttgaggaactaaaaaaacttattcaaaaactgtttatggaagattaatgtctacatgaccwaagtcatcttcaaaaaaggggggtgaataagctgacttgctgtaccagatattaagttgcattacaaggctgtggataggaaaaagtaagtcacaggaagaagaaagccaatcattaatgagcatatgaagagaagctcaaacccactagaaattagagaaatgcaaattaaaatgacaatgagaaatcacgttttactgattatataagtaaaggttacctctctggataatactaattgttagagacgtgtccccgtatagtactaggggaacataaactaatgcagctacttctgagagccatctggcaagacttagattaaatgcatacctgggacccagcaattcaagtct

SEQ ID NO: 689282 - DNA, 625 bp, Homo sapiens
gtgatgtcaccaaagttcctgattagcaaagatgatgayaatgtggggtaaatcatggacagggtgtgttgaaggtgattcagaagagtttgatctgagtgacaggaattttaggaatgctgttgttagtgtattctgcttatattttccatctttgtcatcatagaagtgatataagactaatacctgcatttatagtagttgaaagtttttttcagtaataatataaaattgtaagtgataagatgtatttgtcctatagtctacgaatttattcctatattgtgacataaaataatgatgcattttacaattgactcaaataataactatttcaattccttagaaaacactgtatgagaaaatgctgacttcatgtttagtatagatgtgctattagtctacaggttttaagtattattagttcattcaattctcacaacatttcaagaggtaggcaatattaccactcccaagttccagttgtgaatctgagctaaagccttacaggaaaagagtagaaaaacctgagcttgactttgtctgtctccagaatctttgtttacatcaaccatgttagaatatcttttctacgataaatacatcctaagtctagactcagaaa

SEQ ID NO: 689283 - DNA, 564 bp, Homo sapiens
tctttttatggtctgaaatcacggagtatattctctacatctcattcctaccttcaatgaggaaattagttcctgggatctgatgacctggagtgagagatgcagctgatctagaccacatttctcacttctgagatcagaatagcaaatatgtatgtactagtaatttggacatttgcaattcaagaaacctcgcacctcccacagcatacttcattcactccatgagaaaaaaacaaactcacttaaatattcatcttcagaaaaaaaaaaaaaaggctgcccgctgcggtggctcacgcctgtaatccactttgggaggccaaggctggcagatcacgaggtcaggaaatcgagattatcctggctaacacagtgaaacctcgtctctactaaaaatacaaaaaattagccgggcgtggtggcaggcgcctgtagtcccagctacttgggaggctgaggcaggagaatggcatgaaccygggaggtggagcttgcagtgagccaagatcgcaccactgcactccagcctgggtgacagagtgagactctgtctcaaaaaaa

SEQ ID NO: 689284 - DNA, 669 bp, Homo sapiens
cactgcactccagcctaggtgagagagtgagactctatctcaaaaaaaaaaaaaaaaaaaaaaaaaaaaagaataggcaaatccatatagacagaaagcagattagtgattttcaggggatgggagaggagtgaaaggagagtaattgctgttggttatgaggtttytttctgggatgatcaaaatattctggattttgtggaattagtaggttatctaattttccaaccataggatggttgggaaacgttgtgaatatactcaaaagcactgaattatatattttaaaagggtcaaattttatactatgtgaattataaatcagtttttaaaaaccctaattgagggacattctacaaacattcgaccagtaatccccaaaactgtcaaggtcatcaaaacaaagtgagaaaatgtcacaaccaagaacaaccttgagacacatgagtactagctgtactgtgatttcctgggtgagatcctggaacagaaaaagggtattttagaaaaaccaaagacatctggataaagtataaatttcagttaataaaaatgtaccaatattggtacatcaatgaaacaagcgtaacatgttaataggggaaacatatgagacacatgggaactctctcctatctttgaaataatttttaaatataaactgttctg

SEQ ID NO: 689285 - DNA, 643 bp, Homo sapiens
tggatcatgaggtcaggagttcgagaccagcctgaccaacatggttaaatcctgtctctactaaaaatacaaaaattagctgggcgtggtggtgcacatctgtaatcccagctactcaggaggctgaggagaagaatcgcttgaacccaggaggcagatgttgcagtgagccgagatcataccactgcactccagcttgggcgacagagcgagactccatctcaaaaaaaaaaatatatatatatatagtgagttgaaatgcatttaatatatctaatctattgaatatcattgattggcccagccttgagcacttaaatttgctcaaaacacttacattagcctacatttgggcaaaatcatcaaacacaaagtctattttataataaagtgttgaatatctcatgtaattcataaaatactggaagtgaaaaacaatggttgtgtgaattctcaaagttcagtttctactgaatgcttatcactgtcacaccatcataaagttgaaaaattgtaagttgaaccatcttaagttggggactatctgtactgtgaaattccaacttctggacagtcaagaaggaagccagkaaaatcagaaaccagcggctttgcagccaagtaagcagggaggccaagcgta

SEQ ID NO: 689286 - DNA, 552 bp, Homo sapiens
tgtttccttgacaaatagatgagaaagtcagtcaagctggtttgtaaattgttctgtycttgggtaatttttattagggtctctgagttccttcaacaaattaaacctcatgtatccttaattctcaattgaaattttaaaacaactgaccaaaatctccccttttgacttttaaaagtactgctgtaaaacaataaacacctggaaaaagtgggaggaaaaaagagaacataactgacaaaagcctaggaggaagaaagaattttgatgcaactattatttattagtttaagaaaggcaggaagccaaatcattaagagtaaaatcattcaacccaaggaagctgataacaacaaaaaagaataaaatcagtaagcttctactccctaaaaaattacgcacatacatacactcgtccctcctctacagacaaaactaacattaaagtaattctgggtggcctctgtgagcaaattttaatattagtgtttttccactgctattgtaattttcctttcaagatacctccatgtcacagaaccatgtgaagtt

SEQ ID NO: 689287 - DNA, 654 bp, Homo sapiens
ccctcccaagtggctgggaccacaggcatgtgccaccacatctagctaatttgaaaaaaactttttgtagtgatgtgctctcgctatgttgcccaagctgctcttgaattcctgggctcaagcaactctccagcctcagccttccaaagtgctgggattccaagcatgagccaccatgcccagtctattttgggttctgaaggaaaaaacttacacaaataaacaaaaaggcttatagaagaaaataataggccaagcacagtggctcacgcctgtaatcccagcactttgggaggccgaggtgggtggatcacctgaggtcaggagttcaagaccagcctggccaacatgatgaaaccctgtttctactaaaaatagaaaaaattagctgggcgtggtggcagccacctgtaatcccagctactcgggacgctgaagcaggagaattgcttgaacccaggaggtggaggttgcagtgagccaagatcatgccactgcaytccagcctgggcaacaagggcgaaattccatcttgaaaaaacaaaaaagaaaaaagaaaaaaaagaaagaaagaaaaagaaaaagaaaataataacaaaaccaataatacaaaggaaccacagcagcaacaaccatttgctcaatgctaggcac

SEQ ID NO: 689288 - DNA, 582 bp, Homo sapiens
ggtgagattgagtaatcaaaattaacaaaagagcattagaatttagttatattcattttacatgtaagatagttaaagaagacaaaaagtaatatttgtaggtagaactgttctattttattctttgaggataatattttacatagtcaatattttgaactgtaccataaagtttaaatactcayatttgtttgtttgtttcagttatatcaagatttcttgatacagagcagcttctttctgttttagtccaaattccaaagcaagacacggtatgtttttgtatacattttgtattatattattatacattatttgatggaacttgtcttaatgtaatgtaacaattggaaaatatcaaaatgttttgggaaagtccttcattattgatatctggagtattttatgccactgtagaggaaacttttttcctaatgtattatcctgtatgttatagtgaaatttaaaatttcagcccggcatggtgctcatgcctataatcccaacactttgggaggtcaaggcagttcaagacaagcctgggcaagaaagtgagaccccatctctacaaaggatcaaaaa

SEQ ID NO: 689289 - DNA, 636 bp, Homo sapiens
cttttccaagtatctgtttccttctcctggcaaatgaagatggcaatagtgtctcccttacaggcatcgtgaggaagagagataacctaggaaaactaatcatgtgtctggccaggagtgcctggggggcggggtgggacagggacagcacatgcaaaggtgtggggaaagccttgagcaaggagaaatcagcacaggaaagcggtattgcagggcctcagaggctggatgacgaggaacatggtccattaccaagcagagtcctgggaggttccagaagagtaaagtgaggagttcccaagtgtcctaaggtacagacagacatttcctacgaattaaacttgaggaacacacaacacggtgcctccatcacaggtgrctaacagaggagagtcaagcatcttaaatctatgacccgggactgcagggggagtgaggaagcccaatgatcgacctcagctgaggcctcagccattcccagggctgaacagcaggctccatgcagagcaggaagccaggagctgctcagagggcaggcagctgtgaggcctcctctgggaaaccactctttgatctccctggcagcagaggggtcccacttcctgcatcatagaatgcctgctctggaagggacct

SEQ ID NO: 689290 - DNA, 1935 bp, Homo sapiens
aaacttcaggtcaaatatcacctcctctgtgaagccttccctgacctactaagcacaattgctttgtactccagattacatcacaggggtcagatcctgacatgctgtgtgtccttggtcacgtcactttgcttctctaaggctccttctctaaggttcatctataacaagaggatatgatgttcctgggaaggatgttgtaagggttagggatcctttatcagaagtgcctagtactgtgcctggcatagtaggcaccccaaaactatttttaaatgtctttattctgattataaaattaacataagaagcagagctgtataatgtaaaagttaaagtccccccataataataccccatgaaacatggcaggagttactatacagttctaaggatttttatgtaacctgtgggtgtgcatgtgcrtgtgtgtgcatgcgtacatgcatgtgtgtgtgcatgtgtgtgcatttgtgcatgcatgtgtgtgtgtgcatgtgtgtgtgtgtgcgtgtgtgtgtgcatgtgtatgtgtgttggtgtcttcctccccacctccactgctgagtacctggaccactgagcaaagtggagggaaggagcccatttccaaagagttcagggcttctcagccaatattcatcgagcccagtctgaatgcctgggactgcactaagggcttttcttgcattacctcatttaatcttcatagcaccctgtgggatgggtattgttatctatttcttctactgatgaagaaacagactcagaggaattaagtgactcatttggtcacgcagctggtaaatggcagggccaggattggaagccagtctgactaggccacataccgtccctgagctacctctgagggctgggtaattgtctcccagccaccctgcctgtcctgtattgacagggctaggccatctgtgccagctgacgccccgagggcaggtggttgggacgtcatcttggtcagagcagacgtggcatccggctctctggccgtctcaggttcctaacccccagagaggggatccgattcagtctcagccgccccctccaggcctcatgtgaccattggagcccttcccaaggcttccttcatgccagagaagacagcagtggatcagccttggacgcaagccctggtaggcagggtatggtgatccagtgacaccaaggcagccacccaaggagggagggggctgggggctaggttcaaatttcggctctggtttcttccaggagagggggtgacaccctcttacccaatctgagaaatggaagtaagaactagccctcctgctttctgtataaagagagagaaagagttgctaaatatccaaagaaatgagagattcagaggcactttattttgtagcatggacaggaaggcagctgggttgtctgtgttgtggggaagtggctctgctgttacttttccaaggagagggcaggatttctatgccaacagcagcctctgtgagggcaaagctggctgtgggtcaaactcagagctggccgctggcatctccacatccctcttcacaggtgtctgggcagccaggatacctttgctgagcacgggccacagtgtagaagcttagggccaacattggggaccccaagatgtttattttatagaaagaaaaaagacctggtagggactaacaatgatgaaacaatgactctataaaattatagcccaagttttggaggcacaaagtaagttatggggcacttactgtgtgccaggtgctgtgttataggcatttgattctcacaaggattttttcgttccctactccctgagtgggactgagatcagtaccatctcacagatgaagaaaatgaggctgagagattcagtaaccttcccaagatcacactgcaagtaggaggaagagctgagattcaaagtggtctttc

SEQ ID NO: 689291 - DNA, 1935 bp, Homo sapiens
aaacttcaggtcaaatatcacctcctctgtgaagccttccctgacctactaagcacaattgctttgtactccagattacatcacaggggtcagatcctgacatgctgtgtgtccttggtcacgtcactttgcttctctaaggctccttctctaaggttcatctataacaagaggatatgatgttcctgggaaggatgttgtaagggttagggatcctttatcagaagtgcctagtactgtgcctggcatagtaggcaccccaaaactatttttaaatgtctttattctgattataaaattaacataagaagcagagctgtataatgtaaaagttaaagtccccccataataataccccatgaaacatggcaggagttactatacagttctaaggatttttatgtaacctgtgggtgtgcatgtgcgtgtgtgtgcatgcgtacatgcatgtgtgtgtgcatgtgtgtgcatktgtgcatgcatgtgtgtgtgtgcatgtgtgtgtgtgtgcgtgtgtgtgtgcatgtgtatgtgtgttggtgtcttcctccccacctccactgctgagtacctggaccactgagcaaagtggagggaaggagcccatttccaaagagttcagggcttctcagccaatattcatcgagcccagtctgaatgcctgggactgcactaagggcttttcttgcattacctcatttaatcttcatagcaccctgtgggatgggtattgttatctatttcttctactgatgaagaaacagactcagaggaattaagtgactcatttggtcacgcagctggtaaatggcagggccaggattggaagccagtctgactaggccacataccgtccctgagctacctctgagggctgggtaattgtctcccagccaccctgcctgtcctgtattgacagggctaggccatctgtgccagctgacgccccgagggcaggtggttgggacgtcatcttggtcagagcagacgtggcatccggctctctggccgtctcaggttcctaacccccagagaggggatccgattcagtctcagccgccccctccaggcctcatgtgaccattggagcccttcccaaggcttccttcatgccagagaagacagcagtggatcagccttggacgcaagccctggtaggcagggtatggtgatccagtgacaccaaggcagccacccaaggagggagggggctgggggctaggttcaaatttcggctctggtttcttccaggagagggggtgacaccctcttacccaatctgagaaatggaagtaagaactagccctcctgctttctgtataaagagagagaaagagttgctaaatatccaaagaaatgagagattcagaggcactttattttgtagcatggacaggaaggcagctgggttgtctgtgttgtggggaagtggctctgctgttacttttccaaggagagggcaggatttctatgccaacagcagcctctgtgagggcaaagctggctgtgggtcaaactcagagctggccgctggcatctccacatccctcttcacaggtgtctgggcagccaggatacctttgctgagcacgggccacagtgtagaagcttagggccaacattggggaccccaagatgtttattttatagaaagaaaaaagacctggtagggactaacaatgatgaaacaatgactctataaaattatagcccaagttttggaggcacaaagtaagttatggggcacttactgtgtgccaggtgctgtgttataggcatttgattctcacaaggattttttcgttccctactccctgagtgggactgagatcagtaccatctcacagatgaagaaaatgaggctgagagattcagtaaccttcccaagatcacactgcaagtaggaggaagagctgagattcaaagtggtctttc

SEQ ID NO: 689292 - DNA, 1935 bp, Homo sapiens
aaacttcaggtcaaatatcacctcctctgtgaagccttccctgacctactaagcacaattgctttgtactccagattacatcacaggggtcagatcctgacatgctgtgtgtccttggtcacgtcactttgcttctctaaggctccttctctaaggttcatctataacaagaggatatgatgttcctgggaaggatgttgtaagggttagggatcctttatcagaagtgcctagtactgtgcctggcatagtaggcaccccaaaactatttttaaatgtctttattctgattataaaattaacataagaagcagagctgtataatgtaaaagttaaagtccccccataataataccccatgaaacatggcaggagttactatacagttctaaggatttttatgtaacctgtgggtgtgcatgtgcgtgtgtgtgcatgcgtacatgcatgtgtgtgtgcatgtgtgtgcatttgtgcatgcatgygtgtgtgtgcatgtgtgtgtgtgtgcgtgtgtgtgtgcatgtgtatgtgtgttggtgtcttcctccccacctccactgctgagtacctggaccactgagcaaagtggagggaaggagcccatttccaaagagttcagggcttctcagccaatattcatcgagcccagtctgaatgcctgggactgcactaagggcttttcttgcattacctcatttaatcttcatagcaccctgtgggatgggtattgttatctatttcttctactgatgaagaaacagactcagaggaattaagtgactcatttggtcacgcagctggtaaatggcagggccaggattggaagccagtctgactaggccacataccgtccctgagctacctctgagggctgggtaattgtctcccagccaccctgcctgtcctgtattgacagggctaggccatctgtgccagctgacgccccgagggcaggtggttgggacgtcatcttggtcagagcagacgtggcatccggctctctggccgtctcaggttcctaacccccagagaggggatccgattcagtctcagccgccccctccaggcctcatgtgaccattggagcccttcccaaggcttccttcatgccagagaagacagcagtggatcagccttggacgcaagccctggtaggcagggtatggtgatccagtgacaccaaggcagccacccaaggagggagggggctgggggctaggttcaaatttcggctctggtttcttccaggagagggggtgacaccctcttacccaatctgagaaatggaagtaagaactagccctcctgctttctgtataaagagagagaaagagttgctaaatatccaaagaaatgagagattcagaggcactttattttgtagcatggacaggaaggcagctgggttgtctgtgttgtggggaagtggctctgctgttacttttccaaggagagggcaggatttctatgccaacagcagcctctgtgagggcaaagctggctgtgggtcaaactcagagctggccgctggcatctccacatccctcttcacaggtgtctgggcagccaggatacctttgctgagcacgggccacagtgtagaagcttagggccaacattggggaccccaagatgtttattttatagaaagaaaaaagacctggtagggactaacaatgatgaaacaatgactctataaaattatagcccaagttttggaggcacaaagtaagttatggggcacttactgtgtgccaggtgctgtgttataggcatttgattctcacaaggattttttcgttccctactccctgagtgggactgagatcagtaccatctcacagatgaagaaaatgaggctgagagattcagtaaccttcccaagatcacactgcaagtaggaggaagagctgagattcaaagtggtctttc

SEQ ID NO: 689293 - DNA, 1935 bp, Homo sapiens
aaacttcaggtcaaatatcacctcctctgtgaagccttccctgacctactaagcacaattgctttgtactccagattacatcacaggggtcagatcctgacatgctgtgtgtccttggtcacgtcactttgcttctctaaggctccttctctaaggttcatctataacaagaggatatgatgttcctgggaaggatgttgtaagggttagggatcctttatcagaagtgcctagtactgtgcctggcatagtaggcaccccaaaactatttttaaatgtctttattctgattataaaattaacataagaagcagagctgtataatgtaaaagttaaagtccccccataataataccccatgaaacatggcaggagttactatacagttctaaggatttttatgtaacctgtgggtgtgcatgtgcgtgtgtgtgcatgcgtacatgcatgtgtgtgtgcatgtgtgtgcatttgtgcatgcatgtrtgtgtgtgcatgtgtgtgtgtgtgcgtgtgtgtgtgcatgtgtatgtgtgttggtgtcttcctccccacctccactgctgagtacctggaccactgagcaaagtggagggaaggagcccatttccaaagagttcagggcttctcagccaatattcatcgagcccagtctgaatgcctgggactgcactaagggcttttcttgcattacctcatttaatcttcatagcaccctgtgggatgggtattgttatctatttcttctactgatgaagaaacagactcagaggaattaagtgactcatttggtcacgcagctggtaaatggcagggccaggattggaagccagtctgactaggccacataccgtccctgagctacctctgagggctgggtaattgtctcccagccaccctgcctgtcctgtattgacagggctaggccatctgtgccagctgacgccccgagggcaggtggttgggacgtcatcttggtcagagcagacgtggcatccggctctctggccgtctcaggttcctaacccccagagaggggatccgattcagtctcagccgccccctccaggcctcatgtgaccattggagcccttcccaaggcttccttcatgccagagaagacagcagtggatcagccttggacgcaagccctggtaggcagggtatggtgatccagtgacaccaaggcagccacccaaggagggagggggctgggggctaggttcaaatttcggctctggtttcttccaggagagggggtgacaccctcttacccaatctgagaaatggaagtaagaactagccctcctgctttctgtataaagagagagaaagagttgctaaatatccaaagaaatgagagattcagaggcactttattttgtagcatggacaggaaggcagctgggttgtctgtgttgtggggaagtggctctgctgttacttttccaaggagagggcaggatttctatgccaacagcagcctctgtgagggcaaagctggctgtgggtcaaactcagagctggccgctggcatctccacatccctcttcacaggtgtctgggcagccaggatacctttgctgagcacgggccacagtgtagaagcttagggccaacattggggaccccaagatgtttattttatagaaagaaaaaagacctggtagggactaacaatgatgaaacaatgactctataaaattatagcccaagttttggaggcacaaagtaagttatggggcacttactgtgtgccaggtgctgtgttataggcatttgattctcacaaggattttttcgttccctactccctgagtgggactgagatcagtaccatctcacagatgaagaaaatgaggctgagagattcagtaaccttcccaagatcacactgcaagtaggaggaagagctgagattcaaagtggtctttc

SEQ ID NO: 689294 - DNA, 636 bp, Homo sapiens
aaatttcttgttggaacagtggacaagttactaactagaactctttttggggtgagccggggttaagtttagattctgtaaccaagctggagagccaggggcgcaatctgggtcaatacagttcggcctcccaagtaaaggggacctccaacctaacctccaaaggtggggggaataagggaaggcccccggcaggaccaccaaactttggttttggggtttttgggggggggttttttttttttttttttttttttgtagaagcagggtctgtaraaatcttttttttctttcttttctttcttttttggagacagggtctcactctgttgcccaggctagagtacagtggtataatctcagctcactgcaacctctgcctcccaggctcaagccatcctcccattgcagccttcctagtagctgggaccactagcatgcgccaccatgcccggctaatttttgtattttttgtagagacagggggagtctcactttgtttcccaggctggtcacgaactcctgagctcaagtcatctgcccgcctcagcctcacaaagtgctgggattacaggaaaatcctttgattctgaggtgaggagccagttcacacttcccagtactctgcctttcccc

SEQ ID NO: 689295 - DNA, 710 bp, Homo sapiens
ggttccaaggtggaatgaatcagagcccacactgaccagacagttacaggaatatcctcagcactatccttatatgcctttttgagtgcactgcctaccttcttccagacctctacatccatagttcctcagttcggaaaccagggacaatatttctctaccgcactaaaaagccgcataaggcggctagtgctaaccttcactccttttctgaggagctgctgaagcagactcaaataagcctcatgcctgttcgacccttgtcttatttttaccctgatgcttctaagctcccctttttattcaccacggggattgcttaagagtactcgggtgtcctccagtgtagttccacgttctccaaccgtcrctctggcgacccttcgatccgggttcgagccccaagtttgggtgctgcttgctgagactagcttggttgtggagatcccaatccagcggtgctagaggaataaagacacagacagagaaatagagtgcaaagtgggatcggggggctaacagcttcagagctgagagcctcgaacagagtttgacccacctatttaatggcagtaagccgagataaacatcgtttctgcagtttatagattaactaaaactattcttcacaagaacaaagggacaggctctgactagttatctgcagcaggaacatgtccttaaggcacagatcgctcatgccattgttt

SEQ ID NO: 689296 - DNA, 1335 bp, Homo sapiens
cctttaccatttatctgggggacacgaaggtgaacttttttactttagttgcattttctcatctttagaatggggaaaataacatgagatgaccaattttcatgaagcttagattactaactgctatatcaattttccaaactcttacatgacccttgcaaagggtaatctgttgcagcaaactaatctcaagtataattttgtttttagtttttcttcaatctgaaaatttagaactgatcgtgaaccagagcatgcaaattcctcttatttagttttgttatattttattacacaaatttactttttttagagattgggtcttgtgatcttgcccaggctggagtggagtggcatgatcatggctcactgygacctccgcctcctgggctcaagtgatcctcccacctcagcctcccgagtagctgggactacaggtgcacaccaccatgcctggctaattttggtactttttgtaaagataaggtttcactatgttgctcaggctggtctccaactcttgggctcaagcgatctgcctgcctcagcctcctaatgtgctgggactataggtgtaagctactgcacccggcctagatcagtattttaataacctgcatttgatggcttaaagttgttccctgaacttaatattaagtttaatttgcctgaactgctagagcaacactgcaatatcaattattgttggaactaaatacatgtatgtatatatgtaatgaaaggcaaaatttgcacttggttttggagctcagaaaacttttcagggcaaaggccatgaaaatacaaattcatgctaattaatttttttaaaagggggtgttgaaaaaatctaattctgacatttaaattaatcccccaaatttgagaacctagaacaaagttcataccaagaggtaccctcttaaccacatgttaataatgaaactgcagtcgtgcaataaaggagaaaaattaaagtgatgagaaaaatatggcattctttgatgttgagtctaggacacatgggttctaaaactgctgaattggaaaggcatctgctctcgacattgtaaaacaatgccaagagctaaatatttaaaaggtaattagaatatctaaacctaggcttggaaacatttttaaagcttaaatacctaaaaataactgtttcaaaatagccacttagaagtatgagtgaaaaaaaatcccatgagatttaggccagaaactagttacaccacaaaaagattttagccttggaaggaagctttcctgatatattcatgcactttgcatgaacaatttttttttctcttaacacacaattcacaagtt

SEQ ID NO: 689297 - DNA, 2084 bp, Homo sapiens
tggatttacagttagaatgtgtttggcacacagtgaatacttaataaaagcaagctaaattaataagtgaggaacgccaggaagatgttactcaaatatctatatcaaatatgcacccaaataatagaaatgcttagcaccatctttgaattatctatgattataatctttatttaaaataaataatagcattgtatttataattggaagaaaacattattttgccagctatagccatagcagttttaaatacacacagaaacttcttaaatagaggtcccttgttttaatgtaatttgatggagtttttaaagtttttaattgatgttttttaaagatgaactgctttctacaagagaaaaagaagaatttggagatcccaggtactctgaaaggtagaagggataagatgaggggaggagaacagaggaggaagaagaggaaagaaggaatcaatgaaatggatggccattcccaaagacttccaaattttcagtaacatagacaaaattcatgtataatgtgaatatagacatacttttgtatatattggaaaaaggaatgcatttcagatggaatttacacagcttggaagaatataaactccctaggtaattaacacacattttaagaagagctatttaaatttcatatgccatgaaattcagagaggtattcaaaaaatttcatatagattaaagatcttgaagaacataaataccacaatattatttatgcaatataaaatataaatattaatctcagtgtggtaggctgaataaccaccccccgctccaagatgtgcaccttccagtctctagagcctgtgaatattcccacacgtggcaaaagggactgtacagatgtgattaaattaaggatcttgagatgaagacattgttctggattatctgggtaggcccaaatataaccagaaaggtccttataagtaacagatggagcaagagggaccatcacagagagatttgaatatgctatgctgctggttttcagatgatagaagggaccatataagcaaaggatgcaggggcctgtagaaattgaaaaaggccaggaaaaaaattctcccctaaagactctaaatttatgcaaaattgttagaccaacaataagcaactaatacactaagtaaaatcttgattaactaggagtcaaatttggattgagactatcagaagttttcaacacatggtcaaataataagaaaacaatcagattgtttaggtatatggagagggagaggatacacaccactgaagtgaagcccttaatatggtaaatyttattttatgtaaaattttatattatgcaaattatatctaaaaaacaataaatcacctgtgaataaagattgcacaataataagcaagttttattttaatctattgtttgaaccatttcaatgcaacactaatctattttcttctgttttctgaaaatatgatgatgataatcataacaattttgaagacaataaccgtggtgctttttgtccatcctgaatcttttaaagtctattcctaacctaaagaaatataatacattaaagaaaaaaaacactttctaaatataatactcaccattcaattacttgattctgacccactacggagtctgatccattccccaacattattccttacttctttttgaccgccttatttttttactgatttctatccaacttaacctcagccccagattctttttgtcaacctgattctactctgaataccgctttcacctctgctccagagtgactctgtgatctgcctttcaagagggacctagtgcctgggcttggctttcctctacactgagatacaactagacagtccacccccaaatccagagcagataatggaaagtatctttctccacatcatcatcatcaggatattggtcaatatcataatagaaagaaaaatggaattatgaaaaaagtaagtaggtcaagatagtgcctgtaaggaaggcttttttctgtggtggaaccttgaagatagtaaggagcttggtacatatgatggggagacacgagctcagatgtggagagagagagc

SEQ ID NO: 689298 - DNA, 2084 bp, Homo sapiens
tggatttacagttagaatgtgtttggcacacagtgaatacttaataaaagcaagctaaattaataagtgaggaacgccaggaagatgttactcaaatatctatatcaaatatgcacccaaataatagaaatgcttagcaccatctttgaattatctatgattataatctttatttaaaataaataatagcattgtatttataattggaagaaaacattattttgccagctatagccatagcagttttaaatacacacagaaacttcttaaatagaggtcccttgttttaatgtaatttgatggagtttttaaagtttttaattgatgttttttaaagatgaactgctttctacaagagaaaaagaagaatttggagatcccaggtactctgaaaggtagaagggataagatgaggggaggagaacagaggaggaagaagaggaaagaaggaatcaatgaaatggatggccattcccaaagacttccaaattttcagtaacatagacaaaattcatgtataatgtgaatatagacatacttttgtatatattggaaaaaggaatgcatttcagatggaatttacacagcttggaagaatataaactccctaggtaattaacacacattttaagaagagctatttaaatttcatatgccatgaaattcagagaggtattcaaaaaatttcatatagattaaagatcttgaagaacataaataccacaatattatttatgcaatataaaatataaatattaatctcagtgtggtaggctgaataaccaccccccgctccaagatgtgcaccttccagtctctagagcctgtgaatattcccacacgtggcaaaagggactgtacagatgtgattaaattaaggatcttgagatgaagacattgttctggattatctgggtaggcccaaatataaccagaaaggtccttataagtaacagatggagcaagagggaccatcacagagagatttgaatatgctatgctgctggttttcagatgatagaagggaccatataagcaaaggatgcaggggcctgtagaaattgaaaaaggccaggaaaaaaattctcccctaaagactctaaatttatgcaaaattgttagaccaacaataagcaactaatacactaagtaaaatcttgattaactaggagtcaaatttggattgagactatcagaagttttcaacacatggtcaaataataagaaaacaatcagattgtttaggtatatggagagggagaggatacacaccactgaagtgaagcccttaatatggtaaattttattttatgtaaaattttatattatgcaaattatatctaaaaaacaataaatcacctgtgaataaagattgcacaataataagcaagttttattttaatctattgtttgaaccatttcaatgcaacactaatctattttcttctgttttctgaaaatatgatgatgataatcataacaattttgaagacaataaccgtggtgctttttgtccatcctgaatcttttaaagtctattcctaacctaaagaaatrtaatacattaaagaaaaaaaacactttctaaatataatactcaccattcaattacttgattctgacccactacggagtctgatccattccccaacattattccttacttctttttgaccgccttatttttttactgatttctatccaacttaacctcagccccagattctttttgtcaacctgattctactctgaataccgctttcacctctgctccagagtgactctgtgatctgcctttcaagagggacctagtgcctgggcttggctttcctctacactgagatacaactagacagtccacccccaaatccagagcagataatggaaagtatctttctccacatcatcatcatcaggatattggtcaatatcataatagaaagaaaaatggaattatgaaaaaagtaagtaggtcaagatagtgcctgtaaggaaggcttttttctgtggtggaaccttgaagatagtaaggagcttggtacatatgatggggagacacgagctcagatgtggagagagagagc

SEQ ID NO: 689299 - DNA, 2084 bp, Homo sapiens
tggatttacagttagaatgtgtttggcacacagtgaatacttaataaaagcaagctaaattaataagtgaggaacgccaggaagatgttactcaaatatctatatcaaatatgcacccaaataatagaaatgcttagcaccatctttgaattatctatgattataatctttatttaaaataaataatagcattgtatttataattggaagaaaacattattttgccagctatagccatagcagttttaaatacacacagaaacttcttaaatagaggtcccttgttttaatgtaatttgatggagtttttaaagtttttaattgatgttttttaaagatgaactgctttctacaagagaaaaagaagaatttggagatcccaggtactctgaaaggtagaagggataagatgaggggaggagaacagaggaggaagaagaggaaagaaggaatcaatgaaatggatggccattcccaaagacttccaaattttcagtaacatagacaaaattcatgtataatgtgaatatagacatacttttgtatatattggaaaaaggaatgcatttcagatggaatttacacagcttggaagaatataaactccctaggtaattaacacacattttaagaagagctatttaaatttcatatgccatgaaattcagagaggtattcaaaaaatttcatatagattaaagatcttgaagaacataaataccacaatattatttatgcaatataaaatataaatattaatctcagtgtggtaggctgaataaccaccccccgctccaagatgtgcaccttccagtctctagagcctgtgaatattcccacacgtggcaaaagggactgtacagatgtgattaaattaaggatcttgagatgaagacattgttctggattatctgggtaggcccaaatataaccagaaaggtccttataagtaacagatggagcaagagggaccatcacagagagatttgaatatgctatgctgctggttttcagatgatagaagggaccatataagcaaaggatgcaggggcctgtagaaattgaaaaaggccaggaaaaaaattctcccctaaagactctaaatttatgcaaaattgttagaccaacaataagcaactaatacactaagtaaaatcttgattaactaggagtcaaatttggattgagactatcagaagttttcaacacatggtcaaataataagaaaacaatcagattgtttaggtatatggagagggagaggatacacaccactgaagtgaagcccttaatatggtaaattttattttatgtaaaattttatattatgcaaattatatctaaaaaacaataaatcacctgtgaataaagattgcacaataataagcaagttttattttaatctattgtttgaaccatttcaatgcaacactaatctattttcttctgttttctgaaaatatgatgatgataatcataacaattttgaagacaataaccgtggtgctttttgtccatcctgaatcttttaaagtctattcctaacctaaagaaatataatacattaaagaaaaaaaacactttctaaatataatactcaccattcaattacttgattctgacccactacggagtctgatccattccccaacattattccttacttctttttgacygccttatttttttactgatttctatccaacttaacctcagccccagattctttttgtcaacctgattctactctgaataccgctttcacctctgctccagagtgactctgtgatctgcctttcaagagggacctagtgcctgggcttggctttcctctacactgagatacaactagacagtccacccccaaatccagagcagataatggaaagtatctttctccacatcatcatcatcaggatattggtcaatatcataatagaaagaaaaatggaattatgaaaaaagtaagtaggtcaagatagtgcctgtaaggaaggcttttttctgtggtggaaccttgaagatagtaaggagcttggtacatatgatggggagacacgagctcagatgtggagagagagagc

SEQ ID NO: 689300 - DNA, 1635 bp, Homo sapiens
cacaacctgggtttcctaagtaaatgaagtcaatgatgaacaccataatgtgcaagatccagagctttactaaggsgcaagagtgaatgagatttggcctttgcccttgaggttgagagaaaacctgtacacaaataactacaatacaaactggaatgtgatgagcgccaagagtgttacacaatcattccaaggctctgtagaggatgaaacgacacctggttgggagaatctgaaaggttcatgaaggaagtgacccctgggatgcatcttaaagaatgagcagaaatttcctgggcagaaatgaggggtgaccatccagaaagagagaacaataagaagaaaggcattaggtggaaggaaatactcaggagacacttgtagtcagttttgttggtatcttggggtgcatgagaatgagtccttgaatgctaaattgatacatttttaataattcaatagagaatgagcagctagtggtagttttcttatttaaaaaaaggatagcaacacaaagattcatataaaatatgctagaattgagaaaatagaggcagttagagactaattagaaaataagaaggcttccaaaggagataagtaaaaataggctgggcgcagaggttcacgcctgtaatctcagcacttgggagtccaaggcaggcagatcatgatgtcaggagtttgaaaccatcctgaccaacatggtgaaaccccatctctactaaaaatacaaaaattagccgggcgtggtggtgtgcacctgtaatcccagccactcaggaggctgaagaatcgcttgagcccaggaggcggaggctgcagtgagccaagattgtgccactgcactccagcctgggcaacagagcaagactccatctgaaaaaaaaacaaaaacaaaaacaaaaaacaaacaaacaaaaacactagaattgagagaatagaggcatttagaaactaattagaaaataagaaggctcccaaaagaggtaagtaaaaataaaggcctgaatcatggcaggcggaatacagaggagagattgaaatcaaaaggttatttttgcagaggctctggccaccaatatggtgctataaacaggatggaggaatatctgggtgagaaagagctgctgctttagagtacaatgttctgaacatatgaatgacttgtgcatgcacaagaaagccctctccagagaagacccaacacactcatgcatttcttccctttctcagtgtcagagatcctagaacttacctagctacaactgggtcacacctgaggttttctccagcatgagaagaatacccaagaccctctttcaatacatccaatctctattgctcatttattcaacattataaactcatgtgcttcccatcgatatgcactatactcaaccttataaagaggataagacactgtcttcatctccatgttctgatagtctagtgctattgcaactctggcagagaaggatgtgttttcttggtgtttacctctttttaaaaaaaggaaatgactttttctgcaaagttaaaataaggtgaaatttaaaaaagaaaatattacacacattgcaataaaaataagcaagataaagttgacgcaatctcagaaaatagagcaagcaa

SEQ ID NO: 689301 - DNA, 1799 bp, Homo sapiens
gaaaaaacagaaacatcttaagctggatcttattatcctaactgttagtgtgttggcatatttctgttagacctggacatacatatatcagacccatgctgtctgagtccagacagtacactacacagtggtcatcatactccatctgtaatttcaaattattttttacctgaacaatttataataataaggatgataatagctaacatttatagggcccttgcgatgaaccttatttatgtatcatagaagctccataataggagttggcaaactatgacccaagggcctattccaatctgcatctgttttgctaaatacgatttttacataggtgaaaaaaatcaaaaggggaacagttttttttgcagcatrtaaaaataacaagaaattcaaatctctatatgcataaagtttattaggacacagccattcctattcacttgtgcgttgtctctggccactttcgcactgtaacagcagagttgagtagttacaatagaaaccgtagggcctgcaaatccaaaaatatctgctatttggccttttacagaaatgtttgccaactcctgctctataaagatagatgttattatctcccccattcgacaaatgaagaagcagaagcttagagagattgaggctccaaagctacagaattaacaagcagcaaaatgggcttttgtttattagttgagtattttcatttcctgaaaattggcaatccatgtgtgatttgcattaataaaactattctgttcattcaccagaaccttctgtttcccgtccacagtaagagcaggtctttacaattacatctttcttattggaagctcagactttggcagacactgaacagtgtttgaacagatgtgcttctctcatttccttaaaatggaaacagaagctatgaggtcaagttactttcacaggatcatgtgacatgatgtctaggcttgttatctgtgaggccaggagttccactagtagattagggacaaggttgggggctgaacattctctcctttgcctcaaaccaaaattacagtgatgtcatgttaccagaactttctgtatggatcccacagctccccgtgtgaacccactgatggcatctaacataccagttaggccacactatatgtatttcttcatttattcaggatttattagcttctatgtgccaattactgtgccacacattaggcatataaaggtgaataactacaggtttctaatttagataagttcatttttcagggaaactgagagctgcctggtaacttttttcacattgtctaggtcttgccagtaaaagtgaccaaaatggaaatgattgcattcattacttcatttcaacagtaatgaatttattctatcattcaatctatactactgtgagctgcttacgggcaattgaaaatggtgctgccagaacaatttcttcattttgatacctgaaggagaaggctagagattagaagatcagagttaggagataagttgtatcaccatgtatgttaaactaaagcccccaacaagacctacctgagatatagcctcccccaaaaagagaaaatagtttgggaaaactgaaatggccatgtttccaaatgaaaccacaataacaactaatattgtattgtcattttaggttattaagccatttcacatacaatatctgtgtaagttaaacagacaagatatttttatccccatttatgtttgtaaatggggaaatgatagattgtgttggcagaaaactggctcattatagggaggaaaatgaagctggcctc

SEQ ID NO: 689302 - DNA, 651 bp, Homo sapiens
aagttaaatgagaaaatgcaagcaaaacatttaatayattgcttagaacactgtaaacgttcaataaatgctgggtactactacacttttaattagtctttgtgctttttttttaaagtgatgtcaactgttgaaataccatcagcacagtctcactcagactcatagctagaggatctatgtttctaaagcctttgttttatgggcaaatatctaccctactgtgaacagaagggctctttgaacttaagaaatagttctatccacaaaggaagaaaagaaatgttacaggaaaatgcaagtatttgattattactgactggaacagaacttagaagacacgctcctgtcatttcctactggaggagacacacacagtgattaatttccttgcttttaaaaatcggaaaccatgaagatcaacaagttagaaatgtaattaacaactcctgctagttaatgcgttgccgcaggtgctgttggtctagataaaaaggatttgattctgtaagctccctactttctgctactgaaatgaatgcttagtgggtttcaccatgaaagaaaatgatactggcatagagggggtttgcaataacaattacttttaactaatggtgacagaagaagtgacaagtatgctctgttgaa

SEQ ID NO: 689303 - DNA, 577 bp, Homo sapiens
ccccaactctattaaaaacacaaaaattaccctggcatggtggcgggtgcctgtagtcccagctacttgggaggctgaagcaggagaattgcttgaacccaggaggtagaggttgccgtgagccaagatcgcaccactgctactccagcctgggcaacaagagcgagactccatctcacaaaaaamagaaagaaagaaaaccttgttgataaagtataaaacaaagcaagggtttttattgtattttatgcggtgggaattctttatttcaaggttggagagaaatgataggttggttcccagagccagttttaagggagatttcatgtgaatcctggagaagtccatctaaactgtccacatcagcactcccacctgcaacattctcttgaggttcaatagaaatatccctccattatgggacatagtagaaaccttacaagcctggttaaggattcagagtcagactggtttcaaattctagcctcccagctatgaaaccataggcaaattatacttatcttctctgaacctaataataatgcaactaatagcaattatattatagggttattgg

SEQ ID NO: 689304 - DNA, 575 bp, Homo sapiens
atgattccgtgtctagttcctttccaggtccccccaagcggaagacagttctggcagggagtctgggcaagattactacaatatttagcctttgtcccttcttttgctacgtcttattgtagaatgaggcacacaggtctgagagattgagtatgctggacttgagacctgtactcaaaaggtccctgcaggaccgcaggtcagcttaatccagcccaggaatctccatttcaaagatgaagaaactgaggttcaaagaaagcaaatcatggtctctactcagagtactggaaggcctgatataaacttaaccccaatgccatgcctcctgccttagtaaatttactgagcacctaaccagtgagaaataggcagaagtgaataaggccagatttcactcccttcactactggtgtgaatggataaaggtaactccactttctctctgggctttagttttctcatccattaagtraaagacaagactgaattggtgatttctaatgtgcctttaagctctgaaactctcataagagttgaggatataattatgtgttggtgtgtgcaaatgtata

SEQ ID NO: 689305 - DNA, 742 bp, Homo sapiens
cctgtgctaaagagaacatagatatatagagaagccactaatgaccattgtatcttctttattctttgagggctgtgttctggaagcttactgttgaaccttcagaaacgactgtgtgggctagaccagaatgagtcaggagagcttgcttgtttcacagaataagtgtccatatgtcacaaagaggatcttcctctttttcctggggatatcatattatctttgtctttgataattagcacctctgtgaagggaccacatcaaagggaggatgatttttcctaattatgatttttttttctcactcaaattcacctttacccttagcactatggttcagttatggccttggccttcgtcagccattgcaacaccttccatgagtggcagtgtaaaggagggaatcatggagttctccccacaaaagttttgtgactattgtcactaccattgcaaggtaaaaactttatacccagcttatatttttatatataccccatacatttagtgtcatgcccatcacacaagggagcatgaaatgtgatctgacstattcacatgtttgctcattacaacatccaatatgcatagagcatggtaccgcacagtggttaaaacttaattacagactgttgagggtgatgatcacagaatcatagttcaaccatctcattttagacacaaggaaaataagacccagagaggctaaataagtggccaaagcctcatgttcgagtagcag

SEQ ID NO: 689306 - DNA, 611 bp, Homo sapiens
gtagctatttgccttagtcagagctttgttaggtgctgctgctgctgctgtttatagagaggtaagtgtgagggttggagctaaacattattccattaaattgtaataaaaaaaagacacccacctcctgtagtgacagccaggccaatgcggatggaattgttgggttgagtttcttaatttatgggtcctagcttcagagactctgatttaatacatctgggggtggagatcagggacaaacatcatgggtagtcagcggcctcacttggaaacaggtgtaagatgttaggacttcaccacagttaataatgaattattaaagaaagaatttacatgtcatgccacagacttatggggagtccttgaggggtgttaggaaggggtgagttggcattytagaagaaacactcaggcaggagcatacaaatggattggagactaaggagactaagacgggagaatagtgaggaagctgtgtgcaatgaagaattattgcatttcccccctgatggagacacccatcagactgccatcctgactccttaggaagctcagtattcacaatcaagggacatgtttaccatggccacagcaattgtccttcgtta

SEQ ID NO: 689307 - DNA, 680 bp, Homo sapiens
agagcaacaaaaacccttgcaattcttccaaagactcatagcttaatcaagttttccttttctggttctaagtgactggaggtaatagatgggaatttgaacagaggaacagcctaaagtgtcagttccaagcttgtatcctaccacaytgccttccttctgtttgaaagtgtggggagttactcttcttaggcctgctttgtttctctttatagatcatgcaacagatgagtgaccaccgctacgacaaactcactgtgcctgatgacatagcagcaaactgtatatatctaaatatccccaacaaagggcacgtcttgctgcaccgaaccccggaagagtatccagaaagtgcaaaggtaaaaaaatatcccttctgaccactgcagctgggtcagcctccctggggattttttcataaaggagtgaccaataggagcctccttttcctgtatacatatcaaacaattaagaaaagaaaggataatacaatttagggcacaaggaaaatgtgtttcacttttctcattcatgtcattgctcactaatgcatgcatagtaattgagatgatcatgccgggtattcaaggcttttcaaataaatactcagattttcaaataagtagtcacccaagtctatgccccagctctgattaaatgtactttcccaccctcagata

SEQ ID NO: 689308 - DNA, 346 bp, Homo sapiens
aaamaaacaaacaagaaagcacacgagaaacaacattttgcttttttacagacttataatagcacagatgattagggaactgttcccaagactgccactttttcatagataataatataaacgaagaaatacacataagatcaactttaagcttacatgcctgaaacactctctcacatatagtttacaggagtaagtctaattcctatgaatacttcctttttaaagcagtggagtatttttcagctcttaccatttcgaactctaatacgtatgcagcatcctagaggttgaccctgagggaacttgccagaatcagttctattcagaaggctctgctgagccc

SEQ ID NO: 689309 - DNA, 1434 bp, Homo sapiens
gcacatctggcaaaaaggaaaaaaaaartgtgtctgtgtgtgtgtgtgtgtgtgtgtgtgtgtgtgtgttctaacagcccattttctaacatactagcatcagtatatgcagccaccaggctatctccatttttactaatgacttactaaaatcaccaaattggtttataaattcctaacttatcctcactttccttccaaaaaaaaggcttattagtagaatgcatccctataaaatataaaattaaattctgattgaaataaatatttcctggttgctaaaacatctgtcgtgacagctggtcatatggtcaaactcattcaatttccatccttcttttccctcctcccatacctgaaagaaaacctttaacataaacctcttcaattagccatttgaatacatgatgactagtttttcactttacattcacctgttttctccatcatctcagtggccaatacaagccacagttttgtttgaaatatcaaacacaagaataataagtacataaagtattttcttcgttcttctcatcttaaagatcaaccaagatgaacaagaagagcagagaaactaatacattcttcttcaaaacacacacaggttctttgttcttcccccagatactaagaccaaaaggataacagacagcaaatcatgcccacaaaccaaaacacagctggttcatctaattttagaaaaaaaataacaaggaagaagagaaaagttctctctggaataactcaatcctcaaatcaaggaaattcaaagaatacaacatggaaaaactaagagcctcaaatatctcctgcgggatactgattccatcagtgtcaaatccaaataaacaatatgtttttagaagatcccacaaaagtttgaaaatcactcctttaaaaaaaaaaaagcctacttacagagaaaatatctaaatggttggtttccaaccacaggtgttattcagttgattccaaacctgtttctcattttcaccatactctctaaaaaagacaagctgggaaacatatttgttttttttttaactcagttataacatttatatccagaggtatactttatttgtatgctaaattctctcagccagatgtttattcatctgctcaaccctgcacaatacggcttttccttttctggaggtcatgaacaaggccctctctagctgcttcttaatctgagtaagatcttgtacttctttttccctggaatcctcaagagaagaaagaaaatataagtcataatctaattgttttggggggagtattacttatatccctagaatccttcataccatctctttaagaagagaaatccttttctttagtaacccctaaggaatctatccaaaataaagagcacaaactttttgccagaactaagattaactaggtaaaattggcattagcaaaata

SEQ ID NO: 689310 - DNA, 1434 bp, Homo sapiens
gcacatctggcaaaaaggaaaaaaaaaatgtgtstgtgtgtgtgtgtgtgtgtgtgtgtgtgtgtgtgttctaacagcccattttctaacatactagcatcagtatatgcagccaccaggctatctccatttttactaatgacttactaaaatcaccaaattggtttataaattcctaacttatcctcactttccttccaaaaaaaaggcttattagtagaatgcatccctataaaatataaaattaaattctgattgaaataaatatttcctggttgctaaaacatctgtcgtgacagctggtcatatggtcaaactcattcaatttccatccttcttttccctcctcccatacctgaaagaaaacctttaacataaacctcttcaattagccatttgaatacatgatgactagtttttcactttacattcacctgttttctccatcatctcagtggccaatacaagccacagttttgtttgaaatatcaaacacaagaataataagtacataaagtattttcttcgttcttctcatcttaaagatcaaccaagatgaacaagaagagcagagaaactaatacattcttcttcaaaacacacacaggttctttgttcttcccccagatactaagaccaaaaggataacagacagcaaatcatgcccacaaaccaaaacacagctggttcatctaattttagaaaaaaaataacaaggaagaagagaaaagttctctctggaataactcaatcctcaaatcaaggaaattcaaagaatacaacatggaaaaactaagagcctcaaatatctcctgcgggatactgattccatcagtgtcaaatccaaataaacaatatgtttttagaagatcccacaaaagtttgaaaatcactcctttaaaaaaaaaaaagcctacttacagagaaaatatctaaatggttggtttccaaccacaggtgttattcagttgattccaaacctgtttctcattttcaccatactctctaaaaaagacaagctgggaaacatatttgttttttttttaactcagttataacatttatatccagaggtatactttatttgtatgctaaattctctcagccagatgtttattcatctgctcaaccctgcacaatacggcttttccttttctggaggtcatgaacaaggccctctctagctgcttcttaatctgagtaagatcttgtacttctttttccctggaatcctcaagagaagaaagaaaatataagtcataatctaattgttttggggggagtattacttatatccctagaatccttcataccatctctttaagaagagaaatccttttctttagtaacccctaaggaatctatccaaaataaagagcacaaactttttgccagaactaagattaactaggtaaaattggcattagcaaaata

SEQ ID NO: 689311 - DNA, 1511 bp, Homo sapiens
tgcaaaactaacttggagcaattgatgtagtaatgatgagtcataatatgagcaagttatataactgatatttatttcttctttgcaggtcttcttgacaatgtaacagttcttattggaattgcttatgaaggaaaagccatagcaggagttattaaccagccatattacaactatgaggtattactataaatgatacaaagtaatttcattagataaataattatagtgttatctgattctttatgttacctaagcaagtggtttttagcttggttgcatatgcaatcatctggggaacttttcattttttaaattttatttatttatttatttatttttaactttttttttagctatgctattaactgatgagaaacctttaaaaatacggattcccaggccataccccagacctactgaatcaaaatcgctgggggcattggtactgggtatgtatatatatgcatgtgtatgtacacagacccactaaatgcattatatattttttaatttattccttatgattcaaatataaatgttgagagaattactgatagggttcttgattagcttgggcatcaagacacctgatttatgattggttcctgaagcacattcaagaaatgaaccatttcaactaagaaaagatgctaggcctgttgttttccaggtaacgctgtgtagcgcctaagttacagtcagtgttggtaacagaacgtactatgctcttgcattcttttttcttgtctcttctaatctgctttgattttctattatacatcagataaattgccttccatagaagcaagggactagtgtaatttcaaagcaagaatttaccattaaattgcattaaattgtataggaaattgttgagataaagtagttaaggtatttatattaatgtgaccttgatagaactttagagaaacaaagtaatcagagtgggcaatactacttctgaatttccactctgagttaaaagcaaggttaagctttatttctaatataaatttgttttttcctgctgtttgtatgattataaattatattaagaatcgtgtttcttaggatttaccaaaagagttatatgttattgagaaagtctctggggttaaattgcttgtgtctattaattctttaaatatgattttaatgttgatactgttatatacagacayaagtttgtggtttttatgtaaactttaagttaatactattactttcaaaaggggcatttaattcatataaagcattgtaatgcacggtacctttcatcaagaaaaaatctaagtgcttaggagttaataattttcaccacttctttctgagattagaaaaattgtattcattttccacagaacaatgaaaagcagcagttaagggaacacaggaatgaagcaaaggtgagaaaaatagctagggttttggctccactagtaggtagaaaagaagcaggcaacttgtggtaccccaggtggtcattgtacatcccacataccagttca

SEQ ID NO: 689312 - DNA, 1511 bp, Homo sapiens
tgcaaaactaacttggagcaattgatgtagtaatgatgagtcataatatgagcaagttatataactgatatttatttcttctttgcaggtcttcttgacaatgtaacagttcttattggaattgcttatgaaggaaaagccatagcaggagttattaaccagccatattacaactatgaggtattactataaatgatacaaagtaatttcattagataaataattatagtgttatctgattctttatgttacctaagcaagtggtttttagcttggttgcatatgcaatcatctggggaacttttcattttttaaattttatttatttatttatttatttttaactttttttttagctatgctattaactgatgagaaacctttaaaaatacggattcccaggccataccccagacctactgaatcaaaatcgctgggggcattggtactgggtatgtatatatatgcatgtgtatgtacacagacccactaaatgcattatatattttttaatttattccttatgattcaaatataaatgttgagagaattactgatagggttcttgattagcttgggcatcaagacacctgatttatgattggttcctgaagcacattcaagaaatgaaccatttcaactaagaaaagatgctaggcctgttgttttccaggtaacgctgtgtagcgcctaagttacagtcagtgttggtaacagaacgtactatgctcttgcattcttttttcttgtctcttctaatctgctttgattttctattatacatcagataaattgccttccatagaagcaagggactagtgtaatttcaaagcaagaatttaccattaaattgcattaaattgtataggaaattgttgagataaagtagttaaggtatttatattaatgtgaccttgatagaactttagagaaacaaagtaatcagagtgggcaatactacttctgaatttccactctgagttaaaagcaaggttaagctttatttctaatataaatttgttttttcctgctgtttgtatgattataaattatattaagaatcgtgtttcttaggatttaccaaaagagttatatgttattgagaaagtctctggggttaaattgcttgtgtctattaattctttaaatatgattttaatgttgatactgttatatacagacacaagtttgtggtttttatgtaaactttaagttaatactattactttcaaaaggggcatttaattcatataaagcattgtaatgcacggtacctttcatcaagaaaaaatctaagtgcttaggagttaataattttcaccacttctttctgagattagaaaaattgtattcattttccacagaacaatgaaaarcagcagttaagggaacacaggaatgaagcaaaggtgagaaaaatagctagggttttggctccactagtaggtagaaaagaagcaggcaacttgtggtaccccaggtggtcattgtacatcccacataccagttca

SEQ ID NO: 689313 - DNA, 992 bp, Homo sapiens
aaaattaaaaaaaaaaaaaagaagaaaagaaaaaaaagaaacccatatggttggagtgaaacatttgtcttaagcctcttgttatctcagcatgaacatacacattggaaaataccacttcccaaacaaaagcttaactaagacctatccagtaataattcaattttataaaaatagaactatggtgtgtaccaagtttcatactggtcagagtcagaccgtttacctaaattgcttttgttatgtgcaggtaaatgttgtatgtcaagaatgaaggcaaaatcagaactgttatgtgacaatcaaaaatataatggtaatgtcaacactaatcatttgaaatcatctctcttgccttaaatttatacctagcaataaaaaatatatatttgtcttatatgaaatatgtgaatttcatgatctggaagctctagtagtaattttcacgatgattggtgtagccatagcatagggtctcaagttaacaatgaattttcctttacaaaagatgaggcccaaattcagtgattcattaactcaaataaaaatctagactctagtttctaatttatttttatgtttaccacatcctacagatactctcataacatatgttctaccaacaggaaaatcgacacagaggtaggataaaggaccggctccaactgacgtaatttatmatagtagcaaagacagggaatcaaataaaaaatgcaacttagcctctgaggtccccatactcagttatataatggcccagctactgagagaaaactcttcagcatcaaataaggaaatatttgaaatttttaaaaattcatatgagctattagaattaaataccggattgccatgtagtttaaaggcttgcattgtgatttcgaaaataatttatatttatcaagtgcctactaaatactaaataagttacttagcatttctctcagtccttattaactccatattacaggtagagaaacatgctaggtgaa

SEQ ID NO: 689314 - DNA, 992 bp, Homo sapiens
aaaattaaaaaaaaaaaaaagaagaaaagaaaaaaaagaaacccatatggttggagtgaaacatttgtcttaagcctcttgttatctcagcatgaacatacacattggaaaataccacttcccaaacaaaagcttaactaagacctatccagtaataattcaattttataaaaatagaactatggtgtgtaccaagtttcatactggtcagagtcagaccgtttacctaaattgcttttgttatgtgcaggtaaatgttgtatgtcaagaatgaaggcaaaatcagaactgttatgtgacaatcaaaaatataatggtaatgtcaacactaatcatttgaaatcatctctcttgccttaaatttatacctagcaataaaaaatatatatttgtcttatatgaaatatgtgaatttcatgatctggaagctctagtagtaattttcacgatgattggtgtagccatagcatagggtctcaagttaacaatgaattttcctttacaaaagatgaggcccaaattcagtgattcattaactcaaataaaaatctagactctagtttctaatttatttttatgtttaccacatcctacagatactctcataacatatgttctaccaacaggaaaatcgacacagaggtaggataaaggaccggctccaactgacgtaatttatcatagtagcaaagacagggaatcaaataaaaaatgcaacttagcctctgaggtccccatactcagttatataatggcccagctactgagagaaaactcttcagcatcaaataaggaaatatttgaaatttttaaaaattcatatgagctattagaattaaataccggattgccatgtagtttaaaggcttgcattgtgatttcraaaataatttatatttatcaagtgcctactaaatactaaataagttacttagcatttctctcagtccttattaactccatattacaggtagagaaacatgctaggtgaa

SEQ ID NO: 689315 - DNA, 673 bp, Homo sapiens
ttcctgttttcttttcttttccttttctttccttttcccctttcctttccttctttcctttcctttccttcttgtttggagaggaagtctcactctgtagccgaggctacagtgcagtggtgtcatctcagctyactgcaacctccgcctaccggattcaagcgattctcctgccttagcttcccgagtaactggaattacaggtgcgtgccactgcacctggctaattttttgtgtttttttagtagagatgagggttcaccatgttggctaggctggtcttgaactcctgacctcaggtgatccacctgtttcggcctcccaaagtgctaggattacaggtacccagccacactgttgcatttctttccttttatttaaacctctagttttagtaattcagggagatggatttgagtctgagctcccatctcctcagctgtagcacccaattataggcttcttccttggcaataattattgcctcagttattgactttctgtgtggcaagcagtaggacctagactgaacctctggtactttcataacaccaattcttgagttattatattgagtatgaattttgcagaggaaaaagaaataagatgcataagatacaggctgctgtcttctccaggaaaaaaaaaaatgagaaacaggacaggagtttta

SEQ ID NO: 689316 - DNA, 673 bp, Homo sapiens
ttcctgttttcttttcttttccttttctttccttttcccctttcctttccttctttcctttcctttccttcttgtttggagaggaagtctcactctgtagccgaggctacagtgcagtggtgtcatctcagcttactgcaacctccgcctaccggattcaagcgattctcctgccttagcttcccragtaactggaattacaggtgcgtgccactgcacctggctaattttttgtgtttttttagtagagatgagggttcaccatgttggctaggctggtcttgaactcctgacctcaggtgatccacctgtttcggcctcccaaagtgctaggattacaggtacccagccacactgttgcatttctttccttttatttaaacctctagttttagtaattcagggagatggatttgagtctgagctcccatctcctcagctgtagcacccaattataggcttcttccttggcaataattattgcctcagttattgactttctgtgtggcaagcagtaggacctagactgaacctctggtactttcataacaccaattcttgagttattatattgagtatgaattttgcagaggaaaaagaaataagatgcataagatacaggctgctgtcttctccaggaaaaaaaaaaatgagaaacaggacaggagtttta

SEQ ID NO: 689317 - DNA, 673 bp, Homo sapiens
ttcctgttttcttttcttttccttttctttccttttcccctttcctttccttctttcctttcctttccttcttgtttggagaggaagtctcactctgtagccgaggctacagtgcagtggtgtcatctcagcttactgcaacctccgcctaccggattcaagcgattctcctgccttagcttcccgagtaactggaattacaggtgcgtgccactgcacctggctaattttttgtgtttttttagtagagatgagggttcaccatgttggctaggctggtcttgaactcctgacctcaggtratccacctgtttcggcctcccaaagtgctaggattacaggtacccagccacactgttgcatttctttccttttatttaaacctctagttttagtaattcagggagatggatttgagtctgagctcccatctcctcagctgtagcacccaattataggcttcttccttggcaataattattgcctcagttattgactttctgtgtggcaagcagtaggacctagactgaacctctggtactttcataacaccaattcttgagttattatattgagtatgaattttgcagaggaaaaagaaataagatgcataagatacaggctgctgtcttctccaggaaaaaaaaaaatgagaaacaggacaggagtttta

SEQ ID NO: 689318 - DNA, 673 bp, Homo sapiens
ttcctgttttcttttcttttccttttctttccttttcccctttcctttccttctttcctttcctttccttcttgtttggagaggaagtctcactctgtagccgaggctacagtgcagtggtgtcatctcagcttactgcaacctccgcctaccggattcaagcgattctcctgccttagcttcccgagtaactggaattacaggtgcgtgccactgcacctggctaattttttgtgtttttttagtagagatgagggttcaccatgttggctaggctggtcttgaactcctgacctcaggtgatccacctgyttcggcctcccaaagtgctaggattacaggtacccagccacactgttgcatttctttccttttatttaaacctctagttttagtaattcagggagatggatttgagtctgagctcccatctcctcagctgtagcacccaattataggcttcttccttggcaataattattgcctcagttattgactttctgtgtggcaagcagtaggacctagactgaacctctggtactttcataacaccaattcttgagttattatattgagtatgaattttgcagaggaaaaagaaataagatgcataagatacaggctgctgtcttctccaggaaaaaaaaaaatgagaaacaggacaggagtttta

SEQ ID NO: 689319 - DNA, 1414 bp, Homo sapiens
ccctgtttttctgctgaatggaatagtttcagaaggaatagtaccagctgctccttgtacctctggtagaattcggctgtgaatccatctggtcctggagtttttttggttggtaagctattaattattgcctcaatttcagagcctgttattggtctattcagagattcaacttcttcctggtttagtcttgggagagtgtatgtgtcgaggaatgtatccatttcttctagattttctagtttatttgcaaagaggtgtttatagtattctctgatggcagttacatgtttttaatggaagtatagcatcaacccacctttggattgagatgtttttaagaaagttatgttacgttttgttttacatggatattttaggtcccatgtctgaccatgtgttttataggtaacagatcaaaaaacaatgagtttctattaagagcaaaatatattatacttatctattatctgtccatctacactcagtagcctttgtaaatttttgcatctattagtatcccacagaagcaacattaataaaattcaaatttgcataaatatattttcaaagttatttcataaattgttggatgcttacataactgcatctttttgcagatgtagcactggtatgcagtcatagagtttattccaatattaccatctgcaacaatgattatggaatatacagtacatgcaatatgaaattgatttagattcaggtttagagtgtacacatgcaggtttgttacatgggtaaattgcatgtgtcatgggagtttggtgtacagacattttgtcacccagatagtaagcatagtacctgataggtacccttttaaaatccttatcctttttccactctctaccctcaggtaagcctagtgtgtgttgttcccttatttgtgtcaatatgtactcactgtttagctcccacttataagttagaatatgcagcattttttttgtttctgtgttaactaacgattctttaaactatgattttcactaccttcacagttacctaacttctcctgaaaatagacatagaattaaaatttattagtccacaaattttccacaatagaatttgtacttgttatttattacatttgttcagatcattgggctaataaagccaaggacataggttttgacattttgtttataaagtagcattgttctgttatatttccattgacaatacttctgatcaaccatctcacaaatatatgcctggttacagcagtctggttataaaacacgtgaattcattcttacattatatattttttctaacaataatacaataataatacagttcttctatatacctggaagcaaaaatrcacttcttctgtaacaataatacatttcttctgtatacctagaaacagccaagatatctggtg

SEQ ID NO: 689320 - DNA, 1193 bp, Homo sapiens
tatgctcattttgttagcatttttaaacaataaagtatttttaatgtatgtacatttttagatatcatgctactgaacatttaacagactatattatagtgtaaacataacttttatgtgcactgggaaattttaagtatgactcttttttttgcaatattcactttattgtggcagtctggaactgtacccatattatctccaaggtacgcctatatcttctcaagaatattcagattgatatttaatttttttatgataaatttacttgttgagcatgtcttttgggatatatatagagtattataaatatacttagtttaaagtaaattgttgtatcacatctttaaatatccaagaaaatctaaacacataatgttttgatacctgacatcatgaatttaagaatacatgaacatgttctttaacagtcagatattttacatcagtacctttttcctctaactgaaaattttattttacctccatcaaaaagttttgaccatgcactgtatatttatatttaaaactattttaatattcaccatatcataattctttgcaataaaaatgtacataatttaaatttgatgtttaaaaatagttgaagttgtttttattttctaatatcattcccgtatgaaatataatgstagaaaaacattttaattaccagaagttttaggtttatttttctcatcaaaaatctaaattttgagcttcagtattttctatgctggttttatttgtcagataagttaaaattatttccaaagatattcagttttatgttaattcatgtgtttgttcctactggattgtcgtcacttctaggtgctcctagcttacagagcaaaaaaaatatgtcagcatactaaactgtgcatatacaaaatctataaatatttctgtgtttatctgcatctatattaggctaaactgacatcacactgatgtcttcaactctaattcatggttcattcaaggcttttccccttgtgtctgtaaccttctactctaactctgaaaaacctggctcacgccatctgtcattcacttcacttacctaactgttcaatttcagcacacatgtgtaggggcagggagaacgcctcactttcattctctgtgaagattcactggaatgactgacaacagacagattaataggataaaaggcatatgaatttatt

SEQ ID NO: 689321 - DNA, 603 bp, Homo sapiens
ggctcacttccaatgccagatggaccaactagtgctggtcttcatgggttgccttctcaaagaccatgacacactgagccagaggggcatcatggatggccacaccatctacttggtcatcaagtccaagcagggctccagatctctagcccattccttccgggacctgccaacgaatgatccctgccaccgggacagaaacaccaaaggaaacagcagcagagtgcaccaaccaactggtatgaatcaagctccagtggaactggcccactttgtggggtctgatgcacccaaagtgcatacccaaaacttggaagtgagccacccagagygcaaagcacagatgctggagaatcctagcatccagcggcttctgtccaacatggagttcatgtggcagttcatttcagaacatctagacacgcaacaattgatgcagcagaacccagaagtttcccgccttcttcttgataattctgagatcctattgcagactctggagctggccaggaaccttgctatgatccaagagataatgcagatccaacaaccttcacaaaaccttgagtatccactgaacccacagccatatctgggcttaga

SEQ ID NO: 689322 - DNA, 603 bp, Homo sapiens
ggctcacttccaatgccagatggaccaactagtgctggtcttcatgggttgccttctcaaagaccatgacacactgagccagaggggcatcatggatggccacaccatctacttggtcatcaagtccaagcagggctccagatctctagcccattccttccgggacctgccaacgaatgatccctgccaccgggacagaaacaccaaaggaaacagcagcagagtgcaccaaccaactggtatgaatcaagctccagtggaactggcccactttgtggggtctgatgcacccaaagtgcatacccaaaacttggaagtgagccacccagagtgcaaagcacagatgctggagaatcctagcatccagcggcttctgtccaacatggagttcatgtggcagttcatttcagaacatctagacacgcaacaattgatgcagcagaacccmgaagtttcccgccttcttcttgataattctgagatcctattgcagactctggagctggccaggaaccttgctatgatccaagagataatgcagatccaacaaccttcacaaaaccttgagtatccactgaacccacagccatatctgggcttaga

SEQ ID NO: 689323 - DNA, 587 bp, Homo sapiens
cacacagtaaaaacactgaacttacttcattttattcttttggcacctgcatcctaacccccagcagaactgtaagcacaaaacctgtcttgttggtctttgccttctcaccagctagcactaggccaggcacacatcaatcaataatttgttgacctgaagtgacatttatttagtggacttcaacaccgagtttcctcataaccaaaggcatggtgctttatcgaatcattttcttttgctggatcattacagccaccagaatagtctgtctgatctgtattcaaccacgtgaccccttaaagttccctttgtggcagaatattgaagacatttcaattwtcctactcatcttccccagtctctcagctttattaactaaaccactgataagctcaggactcagattcaacttacatcttctttatgaaagccggttaggtagcatattaaggacaattatttatttacacctaccaactctataaccagctgaactctaagtagatagatgcactatggcacaatgaacaatgtaccattttatgtgtatgcaattatgaatatttcccttatctatcaaatag

SEQ ID NO: 689324 - DNA, 645 bp, Homo sapiens
atacacagtctgttctgctggacacagagaatgactgcccacccccctccaggatgctgccggcagtgtgatcggtgggcacagacggccccagctgtcagacctttcagggtctgcctgagctgcagagacccaccttgcctgaggtcatgcctttcctggggcagcctacagctggggattgagcaaggccgaggataaagactcagccatttgggtcctccatgggacattctgatgggcactcgctgaggctttgccaggcctgccttgaggttcagcttgtccctgtgcccatcctcccccacccttcytcatgtgtaatgaactcctgtgtgttcatccctcatatacatcttccaccccaaatgtcacctcagtgtctgctttgggggaacccaatctgcaaaagctatataataaaaaggctgcctcttgctgacacagctatgcttaccacacagagaaggcagccccaggcctgaacgcccctcctctaaaatgggctctttaacacctggctcagaatcctacaaatctggaaatacagtttgccagcgcttagacagtttagatggagactctccaagtgagttttgttagagttgcagggaaagctcaaaggcagagtggaaggtgaggaga

SEQ ID NO: 689325 - DNA, 1226 bp, Homo sapiens
cacatgttcccagacttgctgactggctttgtaaaatgctctgctgatttttttatattgcctgtgaatgatgtagcaagatggtaatgamactcaataggaaattgtacccatacatgatatctaggagatgtgacttattaaagacaatttttcaccatataaagtaattatcttacgaactgagcacaccagagaagacatgcattaagcattaccaaacctatatctcctggtggcctttgctgaaaacctgtccactgtacttatttcagtaaactatattgtcaaagagctcatttgcattaaacctaaaacctaatttttctatggactaacttactcttggtaccaatactctaatactcaaatatttatttggtatagccctaccactactgtaatttactccaccatgcatccctgaccttcaagttatgaatgagcgtcttaaacctctcagaaaagtagctcctgccatgatctggattccacgttatgcagggagagtttggagaattgtcaatgtagaactgtagtctttttccacagtttatggcagttggactccttatcatctttacttaagtcggtctccttattctctttccaaaagctcccctggttattttctccttcagccacaccctatctaaagagatctatccttaccatgaacagtgcccacacctggactggatctgaattctggtgatcatactctatcttagctcctgagaggctctctaagccagtggtttgaaaatgttcttgtacttctaaactacttaccgctcctgttaagcagattgctagtccacatccccagagtttctaattcagtgagtttggagcacgacctcaaaatttcctttactaacaaatttccaattaaagggaatgctgttggtcaagagatcatactttaaagaaacaccacccccaaaaaaaattttttttaagttttttgattgagtttttctccccaaactgctatctggtctgcactcttcatgagttctactggacaatttggctaccacaaatatccttaataagtcatgttaaaaatctagagcagaataggcttgcagcaactttcctttcctagaatcttgacctgaaaaattttacctttctagagctaaagatgcctctaaaagccttcaacccactgggaatttttttgttcatcccacaaaacaagtctacctctcagcaacttc

SEQ ID NO: 689326 - DNA, 1226 bp, Homo sapiens
cacatgttcccagacttgctgactggctttgtaaaatgctctgctgatttttttatattgcctgtgaatgatgtagcaagatggtaatgacactcaataggaaattgtacccatacatgatatctaggagatgtgacttattaaagacaatttttcaccatataaagtaattatcttacgaactgagcacaccagagaagacatgcattaagcattaccaaacctatatctcctggtggcctttgctgaaaacctgtccactgtacttatttcagtaaactatattgtcaaagagctcatttgcattaaacctaaaacctaatttttctatggactaacttactcttggtaccaatactctaatactcaaatatttatttggtatagccctaccactactgtaatttactccaccatgcatccctgaccttcaagttatgaatgagygtcttaaacctctcagaaaagtagctcctgccatgatctggattccacgttatgcagggagagtttggagaattgtcaatgtagaactgtagtctttttccacagtttatggcagttggactccttatcatctttacttaagtcggtctccttattctctttccaaaagctcccctggttattttctccttcagccacaccctatctaaagagatctatccttaccatgaacagtgcccacacctggactggatctgaattctggtgatcatactctatcttagctcctgagaggctctctaagccagtggtttgaaaatgttcttgtacttctaaactacttaccgctcctgttaagcagattgctagtccacatccccagagtttctaattcagtgagtttggagcacgacctcaaaatttcctttactaacaaatttccaattaaagggaatgctgttggtcaagagatcatactttaaagaaacaccacccccaaaaaaaattttttttaagttttttgattgagtttttctccccaaactgctatctggtctgcactcttcatgagttctactggacaatttggctaccacaaatatccttaataagtcatgttaaaaatctagagcagaataggcttgcagcaactttcctttcctagaatcttgacctgaaaaattttacctttctagagctaaagatgcctctaaaagccttcaacccactgggaatttttttgttcatcccacaaaacaagtctacctctcagcaacttc

SEQ ID NO: 689327 - DNA, 1631 bp, Homo sapiens
gacaggaccttaatccaaggaggcctcgtcctttttattccttgacattgcatgagtcctgaagccatttgattagttctcttctctgtcctgtccctgttgggggtggaggctagaaagtggacatgttacaattacacatacatacctggaactgagcacaaagatagactctatgatgaggaaggctagcaaatactgtgttccattgctcttttccaacrgggctctactacttctggtggaagacactacataaaggactatggttttcctcaagattcaaattaggagtgtggtaaggcaggcagtcatgaatatccaggaaagctatctagaagctaagccttatgttttatattttgtctcagggttggcctagataagacagtttgaggtcattgttttggtaggtactgaaaggaaaatagtaggaaaaaatagcttccctccaagtacctctattgcttctactcccttgctgatttgaactccctgaaaaaaaaaatcgatatatagataatacaaatatatatatacagataatataaatacacacacacacacacacacacacacacacacacacacatatatatatatatatatttccctactggctcctaatcccttgcacaataggccttagcctgacaaacttactacaactctctcttgtccatccttgcagtatcaggtacaaactgagagacaaaggatacaaacagaatttgatcagcttagaagcatcctaaataatgaggagcagagagagctgcaaagattggaagaagaagaaaagaagacgctggataagtttgcagaggctgaggatgagctagttcagcagaagcagttggtgagagagctcatctcagatgtggagtgtcggagtcagtggtcaacaatggagctgctgcaggtaagaaggttcgctcaatctgagattctgggaacacagttccctcctgtgtccttgcgttctcatcctggtggtgacactaaggggtttctttggccttgcagtgccgccttgtcgtccattctagatgtcatggacatgaatgacatttttattaatttatgaagtaagggaatacattttaccttgcagaaaagatccattatatctagttatagtctctaggcccctattatatgtgatctagtgtcaagcattcatcagacttctctttactctggttagtcacaggtaaacacatgcattttcaggtttaagagcatacacatttaagaaatgtgttctatttaagtttaaaatatgcttatttgttatgcaaatgttccctgttaatttttttttttttttttttgagacggagtctcgctctgtctcccaggctggagtgcagtggtgcgatctcggctcactgcaagctccgcctcccaggttcacgccattctcctgcccagcatcccgagtagctgggactacaggcacccaccaccacgtctggctaattttttttgtatttttagtaaacatggggtttcaccgtgctagccagtatggtattaatctcctgacctcgtggtccgcctgcctcggccttccaaaatgctgggattacaggcctgacccaccgcacccagccccctgttactttttt

SEQ ID NO: 689328 - DNA, 1446 bp, Homo sapiens
tgggagattacattaataattttcaaagattgaaccagcttgcataccttgaataaatcccacttacttgtggtgcacaatttttatatatattttgttggatttgttttactaacgtactgttgagaatttttgcatctgtgttcatgagagatactggtttctggttttcctttctcataatggctttacttggctctggattaggataatgctgacctcctagaatgtgttacaaaatagtccatctcctttcattttctgaaacaaatttggggagaattttgataatttccttctccaacttttggtagaattcatcagtttaccaataaaacccactaagcctatttttaaagtgttgcttaatattttggagtattacagctgtctgttactgattactagttaaattctattgttgtgtaagaaaacattttgtatgagttcaattgtttacatttgttaacgtgtattttgtggtatagaatgtgttatagcttggttaattttcaatgtgagcttgagaagaatagatatttgcctttagatggaatattctatgaatgccatttaaattagttgatatatagtgtgctgttcaggtacaactgtagtggtaatcatttcctgtggctgatgtaagaaattgtcacaaactttataacttaaaacctcatacaaaaaaattgtctcatagttctgaaagctcagagcccaaaatcagtgtaccagcaaccaccagaagctaatagggaagcgtggaacagattacagcagggaccaacattaccaatatcctgattttgaacctagcctcaagaactgtgagagactaaatctcagttgtttaaaaaccatacagtttgtgctgctacgttgttasagcaaccccagaaaattaaaacgcctaccatttttcactgttttctattgaccgtacttgttctttgcttttttttcccttcctctctttttctgccctcttttaactattttgtattattcaattgattattttatattattcaattttctttcctctcttagcttattagttatatattactaatatacatcacaaatatagctatattagttatatataatagacataactaatatatatgagttatatattacatatacataacgaatatatattagttatatattacatatacataactaatatatattagttatgtattatatatacataactagtatacataactaatatatattatattatatatagttatatataatatataactaatatgcctaaaggtatatatataaatataactaatatgcctaataatataactaatataactaataataatataactaatatgcctaaaggtatatatataaatataaaacaaacatacaaatatatttgaaatataaaaatattttaaaaatataaacttttta

SEQ ID NO: 689329 - DNA, 2141 bp, Homo sapiens
taactgacatggtgaaacccgctactaaaaattaaaaaaaaaaaaaaaaaaattagccaggcatagtggcccatgcctgtaatcccagctacttgtgaggctgaggcaggagaatcccttgaacccgggaggcagagtttgcagtgatccgagatcatgccactgcacgtcagccggggcatcagagtaagactgtgtctcaaaaaaaaattatattgaagaaaaatgacaattcagcatatcaaaatgtgtgggacactgcgaaagtattaccaagagggaaattcatacaattaaataattatattaggagaattaaaagtctcagatcaataagctcagctaccacttcaagagtatagaaaaaatcagactataaatccaaagcaagtagaaaaaagaaaacaacaaarataagagtgaaatcaataaaactgaaaagagaaaaataatagaaaaaatcaataaggcatggagctgcttccctgaaaaaaacaacaaaatttataatttctcacaatacagtcatctgtctgattcatttagagatatgaaaaagcctcggaattgtgtagataggatcaatgggagtgtgagaattccaagttcagctgtaacatgtactgtgtgatatcaggcaagtttcttaaaatttatgtgcatcagttcctttatctataagatgtaaagatactggtgcctaacacaatggaggttattatgaatgataatttttaaaatatgtaagacacaaggaatgatttctgtcatataagaagtactatataagtgtttgctatttttgttatgaaatagataaagtagttctgaatctagcttgcattaagggaaagttttctgttaattgtgtgacatggttggggaaggcgtgctgtgtacactatgcatatgcattgataagcttagactatggaatattataaaatcatatggatttcttatttgcatatgtttgtgtgaggttagaagaggggataggtaggatggagttgacaaattgaattcttttgcaaactatttctagggttacccagagagaatcaggctattctacaacctatcagagagctaagcacctcatcttcccttccttttgtgtaatgaagctcagactacctaagctgaatacaagaggatgcaagaattttaagcctctatcctatggttgttcatcaattacttaatattatttgacctctagatctcactacctgaattatttttggagtgctttcctcaatattgtacaagtcctagagatacaaattgacagaaaatccctctgaaatttctgtatgtataaaacttaaaaatgtaggaagaggttttgtattgtgcttttccttaaaaaaaaaaaaaaaaaaaaactttcccaaagccttcctcaaagagaaaattatcataaaatttagatatttaacccttttatgcctatatttaataaaagctagctctaccatacccaaattaagatttttagcaaaatgatgtgacttgttcctaattacatccacgccctagatttgacttgcttcaggctaattgggttttacaaccctagggaatagacttttcctccacttaagcaggtccctgagtttctctgcactggtcataatatcctagtccatcttcagtggctgtaaaccagctctgggtatactgaagatcactacatatgacaagtctttgacaggacgccacagtaagtacatagctggggccagagtcagtctttttaatcttcgcggagatttgggaatgccatatagaagagtaagcctcagctatgatggaggcatctacataatgcttctttaatgactgtgtagaaaccatgaaatacacttcatgtcaaattaatctgaatattggaaaactttatggaacctaatacaacaaaatgttagatatttcataaccactatgtcttaatatgtaaaaataaaagtatattaccaccagcatttttagaatgatatttcttgtttgtttattgttttggcattttttattttattagatactttggagctttgtaattcttcacaaaattttttcaagctcaatatttagcttgtgtattagacactgtaactctccagctcccttgagttttt

SEQ ID NO: 689330 - DNA, 987 bp, Homo sapiens
cacccaaagtattagaatttttgctgaactgtgagaataatatatttacatgtgtgtctttcaattggaartactagaattggaaagacagagtctcacatacacctgccaagaagtaatattaatgtttagcaatcatcaatatataaatataatccattgtaagaataaattgtacagttttcttccaagcagtttttcattataaaagatttatcttaaattttcctggtatttcaagctagatcattgtattttctaagacagatgccacatgtattttttttttctttactaatctattgaacagtggacccttacttcattgaagaaaaataattgatttactatactctctagcaatttaaacaatttttctctggaggccatgtccaatactattttatatttgattcatttatcgtttaatgcccttgctaaatttttctaaatatatgaatgtcatttgttttttatggctttcgataattttgcatgttgttttatgaaatttatgatattctttgttacttctcactcattacccaaagcatcactgatattcatgcatcttctttatgtatttatgatcggtaatctcttattttttgcaagagatttacatttaactcctttggtacaaatatacagttatatagaataaataaaacctagtatctgatagatcagtagactgactaaagttaacaataatctattgtacatttcaaaataactggaagagaataatttaaatgttcctagcatcaaagtatcacatgtacactgaacatatgtacatttatgtattaataaaaaaaagacaaaaacaaataattcaagaaaaaatctatatcactgccagtttttgtttacatatttatttaaagaaatatatttaaatatactttaccataaccatactttgtcattttctactagaatttcaagtttaggttatgtgtttgggatcaggctagtcacaaa

SEQ ID NO: 689331 - DNA, 987 bp, Homo sapiens
cacccaaagtattagaatttttgctgaactgtgagaataatatatttacatgtgtgtctttcaattggaagtactagaattggaaagacagagtctcacatacacctgccaagaagtaatattaatgtttagcaatcatcaatatataaatataatccattgtaagaataaattgtacagttttcttccaagcagtttttcattataaaagatttatcttaaattttcctggtatttcaagctagatcattgtattttctaagayagatgccacatgtattttttttttctttactaatctattgaacagtggacccttacttcattgaagaaaaataattgatttactatactctctagcaatttaaacaatttttctctggaggccatgtccaatactattttatatttgattcatttatcgtttaatgcccttgctaaatttttctaaatatatgaatgtcatttgttttttatggctttcgataattttgcatgttgttttatgaaatttatgatattctttgttacttctcactcattacccaaagcatcactgatattcatgcatcttctttatgtatttatgatcggtaatctcttattttttgcaagagatttacatttaactcctttggtacaaatatacagttatatagaataaataaaacctagtatctgatagatcagtagactgactaaagttaacaataatctattgtacatttcaaaataactggaagagaataatttaaatgttcctagcatcaaagtatcacatgtacactgaacatatgtacatttatgtattaataaaaaaaagacaaaaacaaataattcaagaaaaaatctatatcactgccagtttttgtttacatatttatttaaagaaatatatttaaatatactttaccataaccatactttgtcattttctactagaatttcaagtttaggttatgtgtttgggatcaggctagtcacaaa

SEQ ID NO: 689332 - DNA, 987 bp, Homo sapiens
cacccaaagtattagaatttttgctgaactgtgagaataatatatttacatgtgtgtctttcaattggaagtactagaattggaaagacagagtctcacatacacctgccaagaagtaatattaatgtttagcaatcatcaatatataaatataatccattgtaagaataaattgtacagttttcttccaagcagtttttcattataaaagatttatcttaaattttcctggtatttcaagctagatcattgtattttctaagacagatgccacatgtattttttttttctttactaatctattgaacagtggacccttacttcattgaagaaaaataattgatttactatactctctagcaatttaaacaatttttctctggaggccatgtccaatactattttatatttgattcatttatcgtttaatgcccttgctaaatttttctaaatatatgaatgtcatttgttttttatggctttcgataattttgcatgttgttttatgaaatttatgatattctttgttacttctcactcattacccaaagcatcactgatattcatgcatcttctttatgtatttatgatcggtaatctcttattttttgcaagagatttacatttaactcctttggtacaaatatacagttatatagaataaataaaacctagtatctgatagatcagtagactgactaaagttaacaataatctattgtacatttcaaaatarctggaagagaataatttaaatgttcctagcatcaaagtatcacatgtacactgaacatatgtacatttatgtattaataaaaaaaagacaaaaacaaataattcaagaaaaaatctatatcactgccagtttttgtttacatatttatttaaagaaatatatttaaatatactttaccataaccatactttgtcattttctactagaatttcaagtttaggttatgtgtttgggatcaggctagtcacaaa

SEQ ID NO: 689333 - DNA, 987 bp, Homo sapiens
cacccaaagtattagaatttttgctgaactgtgagaataatatatttacatgtgtgtctttcaattggaagtactagaattggaaagacagagtctcacatacacctgccaagaagtaatattaatgtttagcaatcatcaatatataaatataatccattgtaagaataaattgtacagttttcttccaagcagtttttcattataaaagatttatcttaaattttcctggtatttcaagctagatcattgtattttctaagacagatgccacatgtattttttttttctttactaatctattgaacagtggacccttacttcattgaagaaaaataattgatttactatactctctagcaatttaaacaatttttctctggaggccatgtccaatactattttatatttgattcatttatcgtttaatgcccttgctaaatttttctaaatatatgaatgtcatttgttttttatggctttcgataattttgcatgttgttttatgaaatttatgatattctttgttacttctcactcattacccaaagcatcactgatattcatgcatcttctttatgtatttatgatcggtaatctcttattttttgcaagagatttacatttaactcctttggtacaaatatacagttatatagaataaataaaacctagtatctgatagatcagtagactgactaaagttaacaataatctattgtacatttcaaaataactggaagagaataatttaaatgttcctagcatcaaagtatcacatgtacactgaacatmtgtacatttatgtattaataaaaaaaagacaaaaacaaataattcaagaaaaaatctatatcactgccagtttttgtttacatatttatttaaagaaatatatttaaatatactttaccataaccatactttgtcattttctactagaatttcaagtttaggttatgtgtttgggatcaggctagtcacaaa

SEQ ID NO: 689334 - DNA, 987 bp, Homo sapiens
cacccaaagtattagaatttttgctgaactgtgagaataatatatttacatgtgtgtctttcaattggaagtactagaattggaaagacagagtctcacatacacctgccaagaagtaatattaatgtttagcaatcatcaatatataaatataatccattgtaagaataaattgtacagttttcttccaagcagtttttcattataaaagatttatcttaaattttcctggtatttcaagctagatcattgtattttctaagacagatgccacatgtattttttttttctttactaatctattgaacagtggacccttacttcattgaagaaaaataattgatttactatactctctagcaatttaaacaatttttctctggaggccatgtccaatactattttatatttgattcatttatcgtttaatgcccttgctaaatttttctaaatatatgaatgtcatttgttttttatggctttcgataattttgcatgttgttttatgaaatttatgatattctttgttacttctcactcattacccaaagcatcactgatattcatgcatcttctttatgtatttatgatcggtaatctcttattttttgcaagagatttacatttaactcctttggtacaaatatacagttatatagaataaataaaacctagtatctgatagatcagtagactgactaaagttaacaataatctattgtacatttcaaaataactggaagagaataatttaaatgttcctagcatcaaagtatcacatgtacactgaacatatgtacatttatgtattaataaaaaaaagacaaaaacaaataattcaagaaaaaatctatatcactgccagtttttgtttacrtatttatttaaagaaatatatttaaatatactttaccataaccatactttgtcattttctactagaatttcaagtttaggttatgtgtttgggatcaggctagtcacaaa

SEQ ID NO: 689335 - DNA, 986 bp, Homo sapiens
tgcttagaattggtagcaagaagctaattgttcccagttcagctcctctgctcttcagcaatgccggcctccccttccttcctctgcctccccccagggtcccaattaggagagttttccggcagcgagtgctccaagaattcagctgctgctccctgccctgcaaagctctgctcgaccttgggttcactgccttcctgggattgagagggccaaggccggagtgaagctgggtcatttccagttctggaccatccctcctttgtttgcttgcaacactagcagaaactcctcttcattatttcatcccagtcccttcttgtccagcctcccccactttggaggaagaaccgctaaggcagygagtcctagaattaatcttagttgtggcaagcacagtgcagaggggtgcaggaaccttcgggatgtgtcagtggtcacctcgaggtcatgcgttccctggactgaagctcagggcctgcagtgctctccgcttcacagctggcctcccctcaaatgctctgcctcccctcccacatctggagggagtggacggcatccttccgtctgccccacgttgctgggggcaggtcctacccctttaaaacatagtgtggatcccccatgctgtgctctgtctttagtcctccgtggggaggacaggcacggggcccacatggaatgacacgagagaaccgggcctgggctctgaggtctgtgttccaggatgggaggactgagaagtcctgacctttagctcagttggaaggagagcaaatgtactactactactattattactgctattttttttttttttttggtcagagtctcgctggagtgtagtggcagaatctcagctcactgcaacttccgccttccaggttcaagcaattcccctgcctcagtctcccgagtagctgggactacaggcatgcgccaccatgcccagttaatttttgtgtgtttgtgtatatatatatata

SEQ ID NO: 689336 - DNA, 986 bp, Homo sapiens
tgcttagaattggtagcaagaagctaattgttcccagttcagctcctctgctcttcagcaatgccggcctccccttccttcctctgcctccccccagggtcccaattaggagagttttccggcagcgagtgctccaagaattcagctgctgctccctgccctgcaaagctctgctcgaccttgggttcactgccttcctgggattgagagggccaaggccggagtgaagctgggtcatttccagttctggaccatccctcctttgtttgcttgcaacactagcagaaactcctcttcattatttcatcccagtcccttcttgtccagcctcccccactttggaggaagaaccgctaaggcagcgagtcctagaattaatcttagttgtggcaagcacagtgcagaggggtgcaggaamcttcgggatgtgtcagtggtcacctcgaggtcatgcgttccctggactgaagctcagggcctgcagtgctctccgcttcacagctggcctcccctcaaatgctctgcctcccctcccacatctggagggagtggacggcatccttccgtctgccccacgttgctgggggcaggtcctacccctttaaaacatagtgtggatcccccatgctgtgctctgtctttagtcctccgtggggaggacaggcacggggcccacatggaatgacacgagagaaccgggcctgggctctgaggtctgtgttccaggatgggaggactgagaagtcctgacctttagctcagttggaaggagagcaaatgtactactactactattattactgctattttttttttttttttggtcagagtctcgctggagtgtagtggcagaatctcagctcactgcaacttccgccttccaggttcaagcaattcccctgcctcagtctcccgagtagctgggactacaggcatgcgccaccatgcccagttaatttttgtgtgtttgtgtatatatatatata

SEQ ID NO: 689337 - DNA, 986 bp, Homo sapiens
tgcttagaattggtagcaagaagctaattgttcccagttcagctcctctgctcttcagcaatgccggcctccccttccttcctctgcctccccccagggtcccaattaggagagttttccggcagcgagtgctccaagaattcagctgctgctccctgccctgcaaagctctgctcgaccttgggttcactgccttcctgggattgagagggccaaggccggagtgaagctgggtcatttccagttctggaccatccctcctttgtttgcttgcaacactagcagaaactcctcttcattatttcatcccagtcccttcttgtccagcctcccccactttggaggaagaaccgctaaggcagcgagtcctagaattaatcttagttgtggcaagcacagtgcagaggggtgcaggaaccttcgggatgtgtcagtggtcacctcgaggtcatgcgttccctggactgaagctcagggcctgcagtgctctccgcttcacagctggcctcccctcaaatgctctgcctcccctcccacatctggagggagtggacggcatccttccgtctgccccacgttgctgggggcaggtcctacccctttaaaacatagtgtggatcccccatgctgtgctctgtctttagtcctccgtggggaggacaggcacggggcccacrtggaatgacacgagagaaccgggcctgggctctgaggtctgtgttccaggatgggaggactgagaagtcctgacctttagctcagttggaaggagagcaaatgtactactactactattattactgctattttttttttttttttggtcagagtctcgctggagtgtagtggcagaatctcagctcactgcaacttccgccttccaggttcaagcaattcccctgcctcagtctcccgagtagctgggactacaggcatgcgccaccatgcccagttaatttttgtgtgtttgtgtatatatatatata

SEQ ID NO: 689338 - DNA, 1451 bp, Homo sapiens
ggaagcaagatcacacgccttatctccttccattcttctgatagcctcctatggcctgaattattaccatgccccccttacaggtgtgactcaaagcgataagacgactcctccaaggtcacacaacaagtacaacccaggtgttctaagccccacatctggactcatttcctgtaaatttcatgacccctctgctctgctactgccccttcacacacctcatcccatctttgagcctagttcaatcctattttcacctcctgcctccagagaacccccagccttgtgaacggcgtctctctgggccaggggacctctgacacacagcggcctccctcacctcctgggccaatttgtgctgtgaacccttgggagctgccgttctgggasgatgtgtgaccctgtgggccagtacagctcatttcagggaaaaagtgaccacacagagcttagttgaggctggggttgcaaatggaagaagggagggatgtgggctgtgaactctgctcattcatttgtctagcaaatgcactgtgtgccaacccacgctggaggttcagacatgaactgaacaccaccctgtccccagggaggccaaggggaaatcgtattgctttactctctaggcatgcactggctgccccagccccctgatgtgcgtgaactcccccagaaaatcagggttatgcccctgaaacctggggcagaaagagcccccagatgcaggtacttttccccaccatggtggaggagtcttgtctggagccccaggcactctgccagtagtttggtattttcaggattttcccagctgctcagcaggttgccccagccccatgaaagggctccaggtggttcccaagaacggggaagcaaggcgtgaaagagcctctctcttgcaggcatgggagtggacagcccagcgccaggccaccccagctgatgggctcctgacctggatcaccaaggctccacccaaactgtgctgacatcaagccatggtggcaccttgaggttcagtccaggaccatcttgtctcacctcaataggggaaggggggctcaaaatagacttgaaagccaggcacggtggctcacacctataatcccagtcctttgggaggcagaggagggaagatcacttgaagtcaagagttcgagatcagcctggccaacagggtaaaacctgcctctactaaaaaaaaaaaaaaattagccaggaattggctaattggtagtgggcacctataatcccagctactcaggaggctgaggcaggagaatcgcttgaacccaggaggcggaggctgcagtgaactgagattgcggactgcactgcagcctgggcgtcagagcaagaatcctaaaaaaaaaaaaaaaaaaaaaaaaaaaaaaggggaatagacatagaaagttgtagtgttcttgcttggggagatagcttatttcacg

SEQ ID NO: 689339 - DNA, 596 bp, Homo sapiens
  misc_feature 182: n = A,T,C or G
tgcaggtcactgtggctgcccaaagggaccaaatatcctggccatgatggctacaggggaggacagctccccgcatcccattagccacaccmcccagcacatccttgcgggtagaactattgaggtaggtcagaggggacagcagggaaactcagctgaaatcacggccatcctgggctagncctggggtccccaggatcttgttcaaccccacaccccagaaagacagggacaggtctacccagtgctgcctgctgccacggtctcgcttcctggggggttgggaacgagactttgtggcttgtagaaagccatcttcaataaccagcaaggaagggtcctgagagagttggggcctagagggagtcacgcatctgtcccactgccccagcgaggagggggctgcagtacctggcagtccacactggggatgaggcctgggtgtctggagctcagactagacaggccacccagcaggattgagggtcagcaacagcttggtttcaccagccttgagtgaccttgagtcactctgagcttctaacagagaacagtttggaggtgacgagctggatcatagagtttaagagaaagta

SEQ ID NO: 689340 - DNA, 596 bp, Homo sapiens
  misc_feature 182: n = A,T,C or G
tgcaggtcactgtggctgcccaaagggaccaaatatcctggccatgatggctacaggggaggacagctccccgcatcccattagccacaccacccagcacatccttgcgggtagaactattgaggtaggtcagaggggacagcagggaaactcagctgaaatcacggccatcctgggctagncctggggtycccaggatcttgttcaaccccacaccccagaaagacagggacaggtctacccagtgctgcctgctgccacggtctcgcttcctggggggttgggaacgagactttgtggcttgtagaaagccatcttcaataaccagcaaggaagggtcctgagagagttggggcctagagggagtcacgcatctgtcccactgccccagcgaggagggggctgcagtacctggcagtccacactggggatgaggcctgggtgtctggagctcagactagacaggccacccagcaggattgagggtcagcaacagcttggtttcaccagccttgagtgaccttgagtcactctgagcttctaacagagaacagtttggaggtgacgagctggatcatagagtttaagagaaagta

SEQ ID NO: 689341 - DNA, 634 bp, Homo sapiens
ccttttcatgtgttccattctatttgtgctaaataaatttagacctttcacataaaaaacagtaagagcaacatgaagaatagatcactttccaatgtgaattatcagccttataccacagctagacaaagttactgaagaaaaactatgatcatattgatcatatgacttatgaacataaacacaaaaattaaaggaaatactatcaaagcaaataactgacatgtaaaaatttataaattttgacgaaggtatacatcttacgaatgcaaatttggttcaacatacgaaaagaattagtgccataaactatattaagagataagggacacaatacacatggtcatcttaaaagatgagcaataagcacctgctaaaktgaaatttcattccttataaaaccatgcaacaagttaggcaaataagaaaagtttcctcaccatgaaagcacagaaaacctcacatgacatcctaaatcttctgagaagctcaagaactttcttgtaaaattagaaacaagagaaggctatcactttcacagttttattcaacactgtattggaggatatgaacaaggtaattggtatagaaaataaatataaaaaagtcagatttgaaggaaagtcaaattatg

SEQ ID NO: 689342 - DNA, 634 bp, Homo sapiens
ccttttcatgtgttccattctatttgtgctaaataaatttagacctttcacataaaaaacagtaagagcaacatgaagaatagatcactttccaatgtgaattatcagccttataccacagctagacaaagttactgaagaaaaactatgatcatattgatcatatgacttatgaacataaacacaaaaattaaaggaaatactatcaaagcaaataactgacatgtaaaaatttataaattttgacgaaggtatacatcttacgaatgcaaatttggttcaacatacgaaaagaattagtgccataaactatattaagagataagggacacaatacacatggtcatcttaaaagatgagcaataagcacctgctaaagtgaaatttcattccttataaaaccatgcaacaagttaggcaaataagaaaagtttcctcaccatgaaagcacagaaaacctcacatgacatcctaaatcttctgagaagctcaagaactttcttgtaaaattagaaacaagagaaggctatcactttcacagttttattcaacactgtattgsaggatatgaacaaggtaattggtatagaaaataaatataaaaaagtcagatttgaaggaaagtcaaattatg

SEQ ID NO: 689343 - DNA, 634 bp, Homo sapiens
ccttttcatgtgttccattctatttgtgctaaataaatttagacctttcacataaaaaacagtaagagcaacatgaagaatagatcactttccaatgtgaattatcagccttataccacagctagacaaagttactgaagaaaaactatgatcatattgatcatatgacttatgaacataaacacaaaaattaaaggaaatactatcaaagcaaataactgacatgtaaaaatttataaattttgacgaaggtatacatcttacgaatgcaaatttggttcaacatacgaaaagaattagtgccataaactatattaagagataagggacacaatacacatggtcatcttaaaagatgagcaataagcacctgctaaagtgaaatttcattccttataaaaccatgcaacaagttaggcaaataagaaaagtttcctcaccatgaaagcacagaaaacctcacatgacatcctaaatcttctgagaagctcaagaactttcttgtaaaattagaaacaagagaaggctatcactttcacagttttattcaacactgtattggaggatatgaacaaggtaattggtatagaaaataaatatwaaaaagtcagatttgaaggaaagtcaaattatg

SEQ ID NO: 689344 - DNA, 634 bp, Homo sapiens
ccttttcatgtgttccattctatttgtgctaaataaatttagacctttcacataaaaaacagtaagagcaacatgaagaatagatcactttccaatgtgaattatcagccttataccacagctagacaaagttactgaagaaaaactatgatcatattgatcatatgacttatgaacataaacacaaaaattaaaggaaatactatcaaagcaaataactgacatgtaaaaatttataaattttgacgaaggtatacatcttacgaatgcaaatttggttcaacatacgaaaagaattagtgccataaactatattaagagataagggacacaatacacatggtcatcttaaaagatgagcaataagcacctgctaaagtgaaatttcattccttataaaaccatgcaacaagttaggcaaataagaaaagtttcctcaccatgaaagcacagaaaacctcacatgacatcctaaatcttctgagaagctcaagaactttcttgtaaaattagaaacaagagaaggctatcactttcacagttttattcaacactgtattggaggatatgaacaaggtaattggtatagaaaataaatataaaaaagtcagattkgaaggaaagtcaaattatg

SEQ ID NO: 689345 - DNA, 1208 bp, Homo sapiens
cactcttctctcataataggctattaatttttatatattaatttattaatccatgaaaggattaattcatttatggggtcaaactcttcatgatccaatcaccttttaaaggtctcacaattcaatactgccatgttagggatgaaatttcagcataaatttgggagggaagcagtattccaaccacagggctccacttctgactctaaaaatcacgccctgtcacttaaaaaagtttatttcattcctatcgttcaaaggcttaaattgttccagcaccaacagaaagttcccaaatctaaagtctcctctgtcagcccatgaaatcaaaacaagttatcttcatacaaaattcagcagttgggttgttaatggccaatgggttcatgttggctgctgcccagttagagccactttaccaagataggggaattgctgtagagaaaattttatacatgtagagctggctaaaggagagagcagagttttcctattactcaaaactgcttccccaaatattcagaggctagagtttttatagatagttttgtgggcaggggttagagaaagggacatgctgattggttgggtcagggatgaaatcttaggaagtcaaagccatcttctttactgactcagctcctgggtgtgggccacgtatccagatgagccagtttactggtttgggtggcacccgctgatctgtcaggatgcaagttatgaaaaatacctcaaacaccaatcttaggttttacaatagtaatgttattgataggagcaatcagggaggttattaatcttgtggcctctgatggtatgacttctgagccatactttctaatattgtggttaatttgttagttttacaaagttgatgttgtccccaaacaatgaggggttttgtttcagggaggagctgttattatctttgtttcaaaattcaactacaaagtaaatttctcccaaagttagttttgtttttacccaggartaagcaagggctgcttggaggttaaatgcaagatgaagtctcttaggtcatatctctctccctgtcataattttctcactgttactgtctttgcaaatgtgatttcaatttccccttccaagtttcattgcatcttattcttaatgggtgaggtacagagttgggaaaaggccaaagaccattctaacttcttcctgctgacaaggggtatacttga

SEQ ID NO: 689346 - DNA, 2289 bp, Homo sapiens
aaaaagagttgaaaatctgatagatgcctatataaacaaataatccaaaagaaaaagtaatggaaaaaggtgaattttcttattttttcttttttttttttttgagacggagtcttactctgtcacccagactggagtgcagtggggccatcttggctgactgcaagctccgcctcccaggttcacgccattctcctgcctcagcctcccaagtagctgggactacaggtgcccgccaccacccctggctaattttttgtatttttagtagagatgaggtttcaccgtgttagccaggatggtctcgatctcctgacctcatgatccaccacctcagcctcccaaagtgccgggattacaggcatgagccaccgtgccaggctggaaaaagatgaattttcaataaatatttcagtatacctaatgtccatcgggagaaataaaatttacttttaaactcatgcacaaaatcaacttcaggtggattatagacctccatagaaaaaagaattcaatggagtatttagaatttaatataggaaaataatttcattacaatagggtaggtgaggaattcttaaaaagcacctacaaagtgtttattctaagagagaaatgctattctaacatagttgatgtgagtaggaacactgggtcaaactcaaagttgttctaagtcttttcctatagggctttagctcagattcagagttagaactttcagaaggtcacagtagtgtctacctcttgagatgctgtaacaacttaatgcactcatacacaaaatgtgtagactaatagcagctttgaaaggaaaataaaatctcaggacactaaatcactatgcccagtgggaaagttaggcttgggaactgtgtcacactaaaactgacttcctttttttctcaagtagacagctgtaattatacatggttactttatcttatgcaaaatgtagatccagcaaacacgagatgaattcatactcaactttatcccccactcctctatttgcacatatcaaatgtggtttcagtgagtgctaatcaaagcctcacgagaatgcaaacgcttgcctcagtgcctagccctctttgcttttttcccccttcccctactgctcactttttcccctttaaatgctgaagtcatcaaaacttgctttggaaaaagcacagatcacagatcctgctgtaatttgtgttgctttttcccatgcactttctcaacgttggcaagatctagctctaaatttactgagacctgcctcagtcacttttcagtttatattttggaaascacaatgagttctgtgcagagtttcgccctttggcctgcagcaactctcctagaagggccctggtacagccaactggaagctttgtattgctctgactgattggatgatttgctgaggtctgggagcctccccctacacagatccctgatctcccaaactttttgctggaggtctgaggtatgttctcttgtagaactccctctctgggagtttgctgcttctgaggaggcagagcgcagtcttccacttgggccagcatctccaagtaaggagctggctgggggtttttaaatgggatttggtggctttgagtctagctttcttcttagccagttacaaattcttaggttcaaagatctcaacttacgtaaactgtgcaatcactttttcttactgttttggtaaaaatcactgtttgtctcctctacaaagttttgactggagatacataaaaaagattttagagatctcatattcttaataatcgattagagaatcaaattttacaaatgacttacaatagcgtcatgactatccttgagaattctggctctgtacattaaaatctattagcattgctttaaattcagaagacatacccttgattaaagtccatggtcaaatatttaactttctttgggttcagtgcacatacatgtgttagtgtgtgttccaaaattgtacaccaaaactctgtgaccacaattttcctgtattacaaacctgcaaatgtacccctgagcctaaaacaacacaattggtaaaataaaatagaaatatcttcagaatttaatttagatatttggtctgaactggtcaggcaagtcagatactgtttttgctggatgttttagggccataaactgctctgtgatattttaaataattgtttgatttgtctttcttacagccatagtaagttcaggggacatatagtgttctccctagcccaactgtgccctctgactacactgggaagggtcagacgt

SEQ ID NO: 689347 - DNA, 2289 bp, Homo sapiens
aaaaagagttgaaaatctgatagatgcctatataaacaaataatccaaaagaaaaagtaatggaaaaaggtgaattttcttattttttcttttttttttttttgagacggagtcttactctgtcacccagactggagtgcagtggggccatcttggctgactgcaagctccgcctcccaggttcacgccattctcctgcctcagcctcccaagtagctgggactacaggtgcccgccaccacccctggctaattttttgtatttttagtagagatgaggtttcaccgtgttagccaggatggtctcgatctcctgacctcatgatccaccacctcagcctcccaaagtgccgggattacaggcatgagccaccgtgccaggctggaaaaagatgaattttcaataaatatttcagtatacctaatgtccatcgggagaaataaaatttacttttaaactcatgcacaaaatcaacttcaggtggattatagacctccatagaaaaaagaattcaatggagtatttagaatttaatataggaaaataatttcattacaatagggtaggtgaggaattcttaaaaagcacctacaaagtgtttattctaagagagaaatgctattctaacatagttgatgtgagtaggaacactgggtcaaactcaaagttgttctaagtcttttcctatagggctttagctcagattcagagttagaactttcagaaggtcacagtagtgtctacctcttgagatgctgtaacaacttaatgcactcatacacaaaatgtgtagactaatagcagctttgaaaggaaaataaaatctcaggacactaaatcactatgcccagtgggaaagttaggcttgggaactgtgtcacactaaaactgacttcctttttttctcaagtagacagctgtaattatacatggttactttatcttatgcaaaatgtagatccagcaaacacgagatgaattcatactcaactttatcccccactcctctatttgcacatatcaaatgtggtttcagtgagtgctaatcaaagcctcacgagaatgcaaacgcttgcctcagtgcctagccctctttgcttttttcccccttcccctactgctcactttttcccctttaaatgctgaagtcatcaaaacttgctttggaaaaagcacagatcacagatcctgctgtaatttgtgttgctttttcccatgcactttctcaacgttggcaagatctagctctaaatttactgagacctgcctcagtcacttttcagtttatattttggaaagcacaatgagttctgtgcagagtttcgccctttggcctgcagcaactctcctagaagggccctggtacagccaactggaagctttgtattgctctgactgattggatgatttgctgaggtctgggagcctccccctacacagatccctgatctcccaaactttttgctggaggtctgaggtatgttctcttgtagaactccctctctgggagtttgctgcttctgaggaggcagagcgcagtcttccacttgggccagcatctccaagtaaggagctggctgggggtttttaaatgggatttggtggctttgagtctagctttcttcttagccagttacaaattcttaggttcaaagatctcaacttacgtaaactgtgcaatcactttttcttactgttttggtaaaaatcactgtttgtctcctctacaaagttttgactggagatacataaaaaagattttagagatctcatattcttaataatcgattagagaatcaaattttacaaatgacttacaatagcgtcatgactatccttgagaattctggctctgtacattaaaatctattagcattgcttkaaattcagaagacatacccttgattaaagtccatggtcaaatatttaactttctttgggttcagtgcacatacatgtgttagtgtgtgttccaaaattgtacaccaaaactctgtgaccacaattttcctgtattacaaacctgcaaatgtacccctgagcctaaaacaacacaattggtaaaataaaatagaaatatcttcagaatttaatttagatatttggtctgaactggtcaggcaagtcagatactgtttttgctggatgttttagggccataaactgctctgtgatattttaaataattgtttgatttgtctttcttacagccatagtaagttcaggggacatatagtgttctccctagcccaactgtgccctctgactacactgggaagggtcagacgt

SEQ ID NO: 689348 - DNA, 2289 bp, Homo sapiens
aaaaagagttgaaaatctgatagatgcctatataaacaaataatccaaaagaaaaagtaatggaaaaaggtgaattttcttattttttcttttttttttttttgagacggagtcttactctgtcacccagactggagtgcagtggggccatcttggctgactgcaagctccgcctcccaggttcacgccattctcctgcctcagcctcccaagtagctgggactacaggtgcccgccaccacccctggctaattttttgtatttttagtagagatgaggtttcaccgtgttagccaggatggtctcgatctcctgacctcatgatccaccacctcagcctcccaaagtgccgggattacaggcatgagccaccgtgccaggctggaaaaagatgaattttcaataaatatttcagtatacctaatgtccatcgggagaaataaaatttacttttaaactcatgcacaaaatcaacttcaggtggattatagacctccatagaaaaaagaattcaatggagtatttagaatttaatataggaaaataatttcattacaatagggtaggtgaggaattcttaaaaagcacctacaaagtgtttattctaagagagaaatgctattctaacatagttgatgtgagtaggaacactgggtcaaactcaaagttgttctaagtcttttcctatagggctttagctcagattcagagttagaactttcagaaggtcacagtagtgtctacctcttgagatgctgtaacaacttaatgcactcatacacaaaatgtgtagactaatagcagctttgaaaggaaaataaaatctcaggacactaaatcactatgcccagtgggaaagttaggcttgggaactgtgtcacactaaaactgacttcctttttttctcaagtagacagctgtaattatacatggttactttatcttatgcaaaatgtagatccagcaaacacgagatgaattcatactcaactttatcccccactcctctatttgcacatatcaaatgtggtttcagtgagtgctaatcaaagcctcacgagaatgcaaacgcttgcctcagtgcctagccctctttgcttttttcccccttcccctactgctcactttttcccctttaaatgctgaagtcatcaaaacttgctttggaaaaagcacagatcacagatcctgctgtaatttgtgttgctttttcccatgcactttctcaacgttggcaagatctagctctaaatttactgagacctgcctcagtcacttttcagtttatattttggaaagcacaatgagttctgtgcagagtttcgccctttggcctgcagcaactctcctagaagggccctggtacagccaactggaagctttgtattgctctgactgattggatgatttgctgaggtctgggagcctccccctacacagatccctgatctcccaaactttttgctggaggtctgaggtatgttctcttgtagaactccctctctgggagtttgctgcttctgaggaggcagagcgcagtcttccacttgggccagcatctccaagtaaggagctggctgggggtttttaaatgggatttggtggctttgagtctagctttcttcttagccagttacaaattcttaggttcaaagatctcaacttacgtaaactgtgcaatcactttttcttactgttttggtaaaaatcactgtttgtctcctctacaaagttttgactggagatacataaaaaagattttagagatctcatattcttaataatcgattagagaatcaaattttacaaatgacttacaatagcgtcatgactatccttgagaattctggctctgtacattaaaatctattagcattgctttaaattcakaagacatacccttgattaaagtccatggtcaaatatttaactttctttgggttcagtgcacatacatgtgttagtgtgtgttccaaaattgtacaccaaaactctgtgaccacaattttcctgtattacaaacctgcaaatgtacccctgagcctaaaacaacacaattggtaaaataaaatagaaatatcttcagaatttaatttagatatttggtctgaactggtcaggcaagtcagatactgtttttgctggatgttttagggccataaactgctctgtgatattttaaataattgtttgatttgtctttcttacagccatagtaagttcaggggacatatagtgttctccctagcccaactgtgccctctgactacactgggaagggtcagacgt

SEQ ID NO: 689349 - DNA, 1553 bp, Homo sapiens
  misc_feature 916, 917, 918, 919, 920, 921, 922, 923, 924, 925, 926, 927,928, 929, 930, 931, 932, 933, 934, 935, 936, 937, 938, 939,940, 941, 942, 943, 944, 945, 946, 947, 948, 949, 950, 951,952, 953, 954, 955, 956, 957, 958, 959, 960, 961, 962: n = A,T,C or G
  misc_feature 963, 964, 965, 966, 967, 968, 969, 970, 971, 972, 973, 974,975, 976, 977, 978, 979, 980, 981, 982, 983, 984, 985, 986,987, 988, 989, 990, 991, 992, 993, 994, 995, 996, 997, 998,999, 1000, 1001, 1002, 1003, 1004, 1005, 1006, 1007: n = A,T,C or G
  misc_feature 1008, 1009, 1010, 1011, 1012, 1013, 1014, 1015: n = A,T,C or G
tttgaaccagagcaccagagcagctccatcttgaataggggctggagaaaatgaggctgaaacctacggggctgcattcctagatgattaggcattctaagtcacaggatgagataggaggtcagcacaaggtacaggtcataaagaccttgctgataaaacaggttgcagtaaagacactggctaaaacctaccataaccaagatggcaatgagagtgacctctggtcgtcctcactgctacactcccaacagcaccatgacagtttacaaatgccatggcaacatcaggaatttaccctatatggtataacaagsggaggaaccctcagttccaggaattgccatccccttcccagaaaactcatgaaaaatgcaccccttgtttagcatataatcaagaaataaccaaaaaaaaaaaggcaatcagcagcccatgctactgttctgcctatggagtagccattctttcattcctttactttcttaacaaacttgctttcactttatggactcaccccaaattctttcttgtgcaagatccaagaaccctctcttggggtctagatctagagccctttctgataacagtaccagtactgcttgactccctagtagggcatctctctctcttatgtgtattatgttcttccaacagttctctacctcaagatctactaatcagcaattattgatactaaaaaatatctttttggcgaatagcgttgtttctccaacttgtacaccaaacacagctgaaagctaacatttttaagccctggatctacaatgaagagaaaccaattctccaaaccaattgttaccaaaaccaatcaacccttagaaatgctgaaaagggcagttttcttctgaactctgtaggaaaatagaacaagaaatgcaagtcaagttccagnnnnnnnnnnnnnnnnnnnnnnnnnnnnnnnnnnnnnnnnnnnnnnnnnnnnnnnnnnnnnnnnnnnnnnnnnnnnnnnnnnnnnnnnnnnnnnnnnnnngatattcggcaagagcatgcctagggacacataagggtacagagtcggcgaagtgggataacatcagcgatacgcctggtgttatgcgtggggtaagcgaatactcgcgcgcgccgagaggaagaggatagatccttgccacgcacaagaacgggccggtatgggaggcattagtggttgaagctcacgtgggtcggctgttagagcggggaggggtggaggagagggtggctggcaggggaactgagatagctaagagtgtgagcgggatagctgcagccgtgctagacaacccccatggtgaggctgattcaatagagccgtaggaatgctgacactgggacctgacttacgcctagaaaaggattaatgatgagtgagtggcgtgagttccctcgatgaacacaatgagaagaagcacaatggatacaagccaccctttgatcaacaacaggtaagggtacttatttcccatgagatggaatacagcagcaggtcttcagtatttgaaaacttcccacgccaatagacagaatag

SEQ ID NO: 689350 - DNA, 885 bp, Homo sapiens
atggatttaagctacaagtcatagaaatgtgatgagaagcctcagcgctgtaaaacagagggtggaggaaagcttttcctctctcaaatgagctttgcgaggtatacttcttgaaggataggaagttgaagtgttcaggacttttatgtctattctactttggcttagtttacatgattcgtagtttgttagcctagaaatggccaagaaaacttaaggttcaataattagttataaatatgaaatatccccgatttttaagataaaaacaacttataaatgtatttgtctgtaaaaattgtgtatatttttacagaacatctatttctttttttatttttttatatttatttattatgctttaaattctagggtacacatgcacagtgtgcaggtttgttgcatatgtatccatgtgccatgttggtgtgctgcacccatttactcatcatttatattaggcatatctcctaatgctatccctcccccctccccccaccccacaacaggccctggtgtgtgatgttccccttcctgtgtccaagtgttctcattgttcaattcccacctatgagtgagaacatgtggtgtttggttttttgtccttgcgatagtttgctgagaatgatggtttccagcttcatccgtgcccctacaaaggacatgaactcatcattttttatggatgcctagtattccatggtgtatatgtgccacatgttcttcatccagtctatcattgttggayatttgggttggttccaagtctttgctattgtgaatagtgctgcaataaacatacgtgtgcatgtgtctttatagcagcacgatttataatcctttgggtatatactcagtagtgggatggctgggtcaaatggtatc

SEQ ID NO: 689351 - DNA, 885 bp, Homo sapiens
atggatttaagctacaagtcatagaaatgtgatgagaagcctcagcgctgtaaaacagagggtggaggaaagcttttcctctctcaaatgagctttgcgaggtatacttcttgaaggataggaagttgaagtgttcaggacttttatgtctattctactttggcttagtttacatgattcgtagtttgttagcctagaaatggccaagaaaacttaaggttcaataattagttataaatatgaaatatccccgatttttaagataaaaacaacttataaatgtatttgtctgtaaaaattgtgtatatttttacagaacatctatttctttttttatttttttatatttatttattatgctttaaattctagggtacacatgcacagtgtgcaggtttgttgcatatgtatccatgtgccatgttggtgtgctgcacccatttactcatcatttatattaggcatatctcctaatgctatccctcccccctccccccaccccacaacaggccctggtgtgtgatgttccccttcctgtgtccaagtgttctcattgttcaattcccacctatgagtgagaacatgtggtgtttggttttttgtccttgcgatagtttgctgagaatgatggtttccagcttcatccgtgcccctacaaaggacatgaactcatcattttttatggatgcctagtattccatggtgtatatgtgccacatgttcttcatccagtctatcattgttggacatttgggttggttccaagtctttgctattktgaatagtgctgcaataaacatacgtgtgcatgtgtctttatagcagcacgatttataatcctttgggtatatactcagtagtgggatggctgggtcaaatggtatc

SEQ ID NO: 689352 - DNA, 3057 bp, Homo sapiens
caatatatttactctgacaagccatagccagcaactcacttcacagcaatttatagcatttccacgacaagttgaattatttttaactagactctctttgccttaatcaaaatatgaagaagcaatatattgttctagttaggttcaaaagttggcagtctctctcctggaaagaataataaaacttttcagtggcctaatatgcatctatagacacacacacacacacacacacacacacacacaggcactattcataatatttaaagcacattctgttctatgacttcatttatctagcacaaaataaaacgatctcagtatatgtcaagtaccaattatttcgtatggccaattataggtattttattttttaaagattcgagtgttcttgaagctctttctatttctttgtcaatgaactaaacattggcaaatatgtagggtttcccacataagaacattattaacatcaaaatagaaagctggtggtagaaataatgattaggaacacagagtctctactcagcgttctacttctgctataccataagtttgtgatctcacgaaatatctctccatgttgtcatccctatgtatagttctgtcatttttcaataagagctttttgcttaattatgaagtactagttactataaccattattttgagcttcatgtaaatcaagaacacatggactccacttgcaaaacattgaaaatgtagttagggattggggcctaaagcaacattttaaaatgtgtaaagacaatgagtaagcaacaaagtgtccaattttttagggcaaatttgcatacgtcaggaaaaggcaggattaagtaacagagaatttgaatgataactggccaattggtgtcgtttacaattgcaagtcatacaaatgaagtttgcttttttaaagagaaaaggagttagttagaatgggtcaacctattggggaagcaatgtagttagagacaatgcccaaaaccatgtgagcaaatgctctgtagagcgcacccctgcaatgctgccattgtgaggccaagtctctccttgtcttggtactgagccctccattctgcctccatcattgccactgtagctgccacaaagtgaaccctcaaccaccgctgcccaggaacaaagaaagaattatgtccttccgcgctctcagatcaatttccaacatcaggtgagcctttgatgggcactattcagttcccatatccctgaaatagatgcagtaaaaacatagaaattgcctatgtgtttcccaataagacacatatggaagcctgttttcccacaacaggaagggttttccatgatgggtgttcaaaggaacaatattccctgcaaaccatactttgcccatgtgaagaaaagcaatgaggattatttagtaaatagacatagaaactcatccagggttggctgatgagaatctggttagcaagggggtctgccttcagttaggacaaggtctgtgctccccacaggttctctccacagcatgagggatgcaaacttccctttcctcccctgcacctaccctcaaatggcccagargtcttcaggtgctagaatttctcaattaatgctgcacaaaataacagacagccttggctgtcacagtctgttctcatgaagctagtctctgctcactacataaaacaggagagtaagaacaagggtgtttaacgctaccctagctcaaacaagtttctctctgtaggatgccaagaacctgggaaccagtgcatctgctgctttcccttctcggattctagcccagacaaaagaggcaagggtcatttcttcagaggccttgagcttcactacacaatgctccaggctctacatgcaccctctttatatatttctaccttgaaaaaaatttttatataatattaatagtatatatttctatataagaaacacatatgtttattttatagacagatatacatagataaagatctctagtcacccttttttaaggctgggctgatcgcggtgcctcaaatctataatcccagcactttgggaggccaaggtggccagatctcttgagtccaggagttggagatcagccagggcaacatggtgaaaccccatctttacaaaaattagctagtatggtgtcatgcacttgcagtccctgctactcaggagactgaggtgggagaatcgcttgagcacagtatgtgaaggcttcagtgagctctgatcacatgaatgcaccccatcttgggtgacaaagtgaaaccctctctgaaaaataaaataaaataaaaaggctaccaccatactcacagataagtgtgtcaggtatatttgcagctatccttcctatattctatttggtaaaaaaaaaaaaaaaaaaaaaaaaaaaaaaaaaaaatgcaaagaactcttctcattctagatttttgtattacttagacatttgaagtttatagcagaagagctataatcatgtttggtatgtgtactctatagaccagatagtgcaaacagatatcaatgctttttaaaagtatataaggttattagaaatattttaaactacctataggtgtatatgtatctaattgaactatcaaatgcaagtaagatcatttccttagcgtgttaaatccactcaatttattaaaatattttctaatgtctattacaataatgtttcttaattagctaacataagaggagttttaagacatttatttatatgtacttactagattcaaactcgattccactattttcagaaatcatgctctgagacaagtcctttttttatctaactatgtttctgcctatattaaaagacagatatgtccattttgctaatcatgctgttccaaacctctccatcctatttttcggtttgttctagcagtcattcagagacttacttatattcaaatttctctctaggtttaacatttgtgtatgtcttcttgtggttttgtctatttttgctgtatataagacatttattgacatatatcatacatgcagaaaagtacaatgattaaatatggatagctt

SEQ ID NO: 689353 - DNA, 918 bp, Homo sapiens
cttacaaataatgggctctgattgggcaactactcatctgagttccttccatttgacctaattaagcttgtgaaatttacactaagccatgagctcatctttaaaaagttttattaaaagattttcagctgttccaaatgggacttattagtggaatgtgttttaaaggatcatatcagatgaatgaaaggtatttgatccttcgtttccttaataataaaatgatggtttggaaaaataggctacagtctaaccacagtgctattattaggctttcttgttaaacataggtctaagcctaagtatgtcaatacagcaaatacttactgtttcatttctagtaatgaaaaaaaaaaaaacaagtctttctggcataaggatgattttcatctggttattttgaaacatttttgtaaaataaatttacatctataaagaacatttttatttgtaaggaggggtatgtctctgtgcactggaagagagggaggactaaatcactgggaagtcttatgataaagaagccattggcttaaatcagcaaagcaagctgtcccttggtttaaggtgtttttcctggccatcctgtcttgactagaactttacctacaccttcctttttggtttaggcaaattatrgtatctaaaactaaagtctcagctctgtgtctttgacatataaatgttctaccatgtcttctctggaatctgataactatctatctctttaaaatgcaagtctagggagatgactcatcagaaaaagaagaaaaaagaggtatttggaaattgtgcaaattaaagcagcccctgatgtcaaagtctacacattcctgagtgagtcagttctggccagttctagctggatcaagagagctcttctgggcaggcctgaagagcacctggatggcagacacc

SEQ ID NO: 689354 - DNA, 630 bp, Homo sapiens
aagtgttgggattacaggtgtgagctaccgtgtccagccccagaaccctaccctttttactccacagaagtatggagtcttatacaggccttcaagctgacagatgagtacatactagctttttgattctcttccaaattccttatttatgactatacttttggcagtctcctgataaaatgaaatctaccaatgtatttcagttcaatcacgtgtttgggaaatacctacttcccatcaggtctaaactgctgtaaaggagaatataggaaaaacaaataaaaccaagtttctacccacaatgtacttccaatctagttagggtaaaaaagcagcacacatatgttcacaaaaacagctaagaaaagatagtgcagtactaataaatgaggattcaagtgataaaatcaaatatttgtatttcttcatttaacaatattagctaaacacctactttgtgcctggcacagttattggtactgggactaaagtagtgacaaaacaaaacagagctaacaatccagtgaatgaaayatatgttgcctaagacgtatgtgtaccagtagcatacgttatatttacttagaaccagaaacacagttgcaggcaaaagcagtgaatataaaaata

SEQ ID NO: 689355 - DNA, 478 bp, Homo sapiens
ctctaatatgacaagctgatagaggctgacaggtaactaggttgttcaggatggcaagccagtcccagaaattctgattaaattaaaatattaatggtaccgccgggagaggaagattgagttgaggtgggcaaattctgtatgaggaccgaggagcaaacaccacgtcgcagtcgctgtgctggaagcagaagcctgggggtgccagggggagttacctttgctaaacccgaaagcagggcytgcattgcaatgaactgtgcggtgctggagacagggtggggacaacacacctgccaggctcagaagggaacacggagattccctaatcacctcctctctcctgcagctgcaaaggtgacggccggagaccctcatctctgcagctcttaattccccagtaacctctcccatggcctctgcaaatgctggtttgcagggcactttaacccaatctgaaattgagactccaacatca

SEQ ID NO: 689356 - DNA, 478 bp, Homo sapiens
ctctaatatgacaagctgatagaggctgacaggtaactaggttgttcaggatggcaagccagtcccagaaattctgattaaattaaaatattaatggtaccgccgggagaggaagattgagttgaggtgggcaaattctgtatgaggaccgaggagcaaacaccacgtcgcagtcgctgtgctggaagcagaagcctgggggtgccagggggagttacctttgctaaacccgaaagcagggcctgcattgcaatgaactgtgcggtgctggagacagggtggggacaacacacctgccaggctcagaagggaacacggagattccctaatcacctcctctctcctgcagctgcaaaggtgacggccggagaccctcatctctgcagctcttaattccccagtaacctctcccatggcctctgcaaatgctggtttgcagggcactttaacccaatctgaaattgagactccarcatca

SEQ ID NO: 689357 - DNA, 635 bp, Homo sapiens
aagattaaaaatgtgtttaaagtatcttcttcccagtaaagtgtgtatgcaccctcaacacacacacacatacacacacacacacacacagatggtcactgtcttttaatagatttcctgtgaagtttcgaaagtaaaattgcttgaaacttgaaagttgctaagagtagattttaatgttctcacccgccaaaaatataaatatgttatgtgatggatatgctaattaccttgatttaatcattttacaatgtgtgtgcacatatatgtatatgcatatgtacgtatgcacatatatgtatatgcatatgtacgtatgcacatatatgtatatgcatatgtacgtatgcacatatatgtatatgcatatgtacgtatgcacatatatgtatrtgcatatgtacgtatgcacatatatgtatgtgcatatgtacgtatgcacatatatgtatgtgcatatgtacataggcacatatatgtatgtgcatatgtatgtatacatataaatgcatatatgtgcatatctatatatgtattgcacacatatatatacaccacattatacaccataaatatatacaatttgtatttgtgaattttaaaactttcttttaaaaagatgtgcttctctgaga

SEQ ID NO: 689358 - DNA, 775 bp, Homo sapiens
tatataatcttcttattgaayctttgcaataaacctttaagattggtgatattactatgttcttttttacagataaagaaattaaagctttgaaagcttacacgatatgcccaggatcacagagttagagccaagaccccagttcaaggttgtctaactccaaaacccaacccttgccaccacgttctgcctcatctttctcaatactcataaaaatcaacaaggatgacatttattgactccattttaaagaggagggatttcattaaaattaagactccaggtcatgccactaagtagaaaatggaccaggacaagaatccagatcttctgacaccaaggagatgctctagggtacagtagaaagatcatatctttgaaatcatacagacttgcattcaaaggctgattgctgagggtatttactgtgtgacttaggcaaatttctcaacatctctgacctgtgaaatagtttttttttaaatacatactctaagtaaggattcaataagacaatttacataccatgaatgttaacttccttcttcatctccaaagtctccgatctttctaccaaactagattaaatggcagaatcctagctcgaatccacaaatagctacatggagaaagaaaactcaacttaccaatggatggtgtttcaaagattcctttagcaggtatatttggaaatctaaatgaattttccaatataagcaattccatagtgttttgggggttgaaatttgtcccgcagaaaattatgttgaagttc

SEQ ID NO: 689359 - DNA, 612 bp, Homo sapiens
gaagtcactcctgattgctattttcccctatgcctcgctacagtcaatccgttaagtagctcaaatccatctcttatttctagtgagcacttgtagccattctcatttcctaccttcccttccatgctgctgtcacagtgatatctataaaattcawatgtgattaagtcattcctctgcttaaaatcccaaaatgtctcccacatgaattttggataaattcaaatcatttatataaccatataagatctccttcataattttgcctctgtcctcctcctgctgaaggtttcttattttgtggcataacaaactacagtcatgtgttgcttactgatgaggatatgatctgagaaatgtgtcattcggcgattctgttgctgtatgaacatcacagagtttactgacacaaacctagatgatataacctactacacaccggggctatatggtatattattgctcctgggctacaaacctgtacagcttgctactgtcctgaatactgtaagcaattgtaacataatataagtatttatgtaccgaaacatatctaaacatagaaaacgtacagtaaaaacagagtattaaaatcttatgggacctccatca

SEQ ID NO: 689360 - DNA, 612 bp, Homo sapiens
gaagtcactcctgattgctattttcccctatgcctcgctacagtcaatccgttaagtagctcaaatccatctcttatttctagtgagcacttgtagccattctcatttcctaccttcccttccatgctgctgtcacagtgatatctataaaattcatatgtgattaagtcattcctctgcttaaaatcccaaaatgtctcccacatgaattttggataaattcaaatcatttatataaccatataagayctccttcataattttgcctctgtcctcctcctgctgaaggtttcttattttgtggcataacaaactacagtcatgtgttgcttactgatgaggatatgatctgagaaatgtgtcattcggcgattctgttgctgtatgaacatcacagagtttactgacacaaacctagatgatataacctactacacaccggggctatatggtatattattgctcctgggctacaaacctgtacagcttgctactgtcctgaatactgtaagcaattgtaacataatataagtatttatgtaccgaaacatatctaaacatagaaaacgtacagtaaaaacagagtattaaaatcttatgggacctccatca

SEQ ID NO: 689361 - DNA, 615 bp, Homo sapiens
tgaacaaatcagaatgggagttatttgttaagaagaaaaccttgactcttcagttccttttcttttttattttttgagacagggtctcgctctgttgcccaggctggagtgcagtggcaccatctcggctcactgcaacctcgacttgccagcttcaagagattctcgtgcctcagcctcccgaatagctgggattacaggtgccaccatgcccagctaatttttgtatttttagtatagacggggtttcgccatattggccaggctggtcttgaactcttggcctcaagggatccgcctgccttggcttcccaaaatgctgggattacaggtgtgggccactgcacctaggccagttctgtctgttaaaacactttttttttccttatttttagagaggaagtcttgctgtgttgtccaggctggtcttgaactcaagcttaagccatcttcctgcttcagcctatggagtcgctcagattataggcacatgccaytgcacctgtctttacaaccataattgtctaatctgcagactgatagtctatttcttgctgataaactgtgttccccttgcaattttccctttcattcattcatccatctgatatagga

SEQ ID NO: 689362 - DNA, 674 bp, Homo sapiens
ttcctaactaatagattgggtttcagataactttggaaagaatcaaacctagagaggaagaattctgtctggagattgtgacttgtggaagtccagcaggataatgactggaatttatgcccacattttgttatggtgattgatactgaagacagatgctgaagccattacttttgagactacttcaaagagagaagaggataaaggtcatattcactgctgaccaggatgttatggtggatttccaaaagtgacagagggaaatctataggaaaggttcagtttaaaatgcagggttttgcattctgacaaggtataaaagaaccaacatttttcagcatttactgtgctcaagcacyatgtcagaatttttaccgtatcagcccatttgaacttcccaatcgccttgcaatgcagaaattaacatctccactttgcagaggagtgaactgaggcctgggaaagcagtaaagcaaaatagctaagagctacagaatcaaagcaatcctacctaaaagcccagcaggattttttttttaaataaattgacaagttgatcctaaaatccatatggaaataggaaggacctagaatacccaaaaacaaccctgaagaagaggttagaagtcagaggactaacatctgatttcaaaaattattataaggctaccata

SEQ ID NO: 689363 - DNA, 656 bp, Homo sapiens
tgattcagataggcatagccagttgtatcccgctcaagcttcagggcctctgggagggccagtgttggggaagatggttagtacccaggctctctggagccctccagccttgacacctcacagcccttgccctaatggattcattcacttatccaaaggagtcatttttgttttgggttcttcccctgcctcctttgttttgggatcattaattcctgtgatgatagactaatttttgttgttgttgagacagggtctcactctgtcacacaggctggagggcagtggtgcgatctcagctcactgcaagcaccacctcccaggttcaagtgattctcatgcctcagcctcctgtgtagctgggactatgggtgcatgccaccacgcctggctaattttggtatttttagtagagatggggtttctctatgttggccaggctggtcttgactcctgcactcaagcaatccacccgcctyggcctctcaaagtgctgggattacaggcatgagtcactcggcctaacagactaaatttttaagtatacttttaagtagtgtttagggttttgatgctcatattgattgggttttcccccaacttttatgaaacaaaaccctcattttactcttctccctaccctcagggttctaaac

SEQ ID NO: 689364 - DNA, 600 bp, Homo sapiens
gcacataatcaataatctatatctatttatttaatggatcaaatatttgctgagcaaaagscatgggaagcaaacaaacgtgtgtgtcattcattccctgccattaggtagctcattttcaaatacaaatgtatttactgtgaatttctcagggtagtctctccacacacaccccaaaattagtttaggaacattttattatttttttaaaaaatgaacccttgtgttgagggttgactatcaatagatagcaatgaaagaactgctctgctacatacaaaaccccaaagggccattttaaatgagatttcctaccatctattttaagaatcttgcattgactgggtgtggtggctcacgtctataatcccagcacttcaggagaccagcctaggcaacatgggagactccatttcttaaaaaaaaaaaaaaaaatttaattaaccaggcataatggtgcatgcctgtggtcccagctacttgggaaactgaggcaggagaatcacttgagcctgggagttcaaggctgcagtgggccatgatcgtgccaccgtactccagcctggcctacagagcaagaccctgtctcaaaaaaaaaaa

SEQ ID NO: 689365 - DNA, 2268 bp, Homo sapiens
actaatctcactgggcttcctcaaggatttcagtaaaccatccagatagtgccttattttcagaagtctgggtctctgctgtgctgtgcctatctttagccttacaaatcaagtttaatggtaccaacatctttcctttgttctctggtcataggtgtggacgttgcttctcaagtggctatcttggtgatagctcattatgccttatatgtcttttcgctttactgtgattgatcaataagccatgcaggatgattcacattgcagagaaaattttatccttctcctgctactggtgagttagcaaagtttggggtgacagtcaatgagctagccacctccaggagatagtaaaattaattttgacatgatacataagattctcctctactacctgcttaacaattccttatgttacattctctcttggtattagtttgttctcgcattgctgtaaagaactacctgagattgggtaatttataaagaaaagaggtttaattggctcatggttctgcaggatgtacaggtaacacggctggggaggcctcaggaaacttacagtcatagcagaaggtgaagtggaagcaagcatctcttacatggctggagtaggagaaagagagtaaagagggaggtgctacacacttggaaacaaccagatctcatgagaactcacttgctatcacgagaacagcaagggggaaatccactcccacgatccaatcgcctcccacgaagccccacccccaccattggagattacaattcaacatgagattagggcgggaagagaaatccaaaccacatcactctcttaaaataactggtttgctatctgtctgtagcctggaccctgactgatagagacagttatgcaaaaatatatgtaacatgtggcaacatttactttctaatattaaatgggtaaaaacaggaagtaaaactgtaaggacaatatgactggaagcttgtttgtaatgtgtaggaaaaaagaataaaaacaaatgtaaaaaaagtgaccagtggcagcctccaataatcagtaaacacatccacaggatagaaagtccccaagatgctacttggctaaatccttctcctgctgtatctcatgagaagccagcatgtctggattgagacacttctgaatttttttctactaggtcttttcttttccttgcctgccccctttggagacatggtagggtcctgggtatcatctacaacacaaagaaacttggggaggctccctttgatgtgggcatggtcagggacggaatcgctttaggaagacagcctgatggatcttgggccccatttctatggcaacaaagctgcaaggcctgaacgtctgattttgttttgggatgtggcggctgctaattataggcagctccatgtccctttgctcttccctagaatggtctctatttgttgtcaaggtttatttactttcttttttggacttcagtcctcctacccttcttgcactttacccttaaatatgtgagtgaatatacgtgtgtgtgtgtgtgtgtgtgtatgtctgcattcattcatgtgtgtgctgtatatatgtgtgtgaatatatatagatgtgtgcactctttatctatatttatatatatatttatatatagatagagagagagagagagagagagagaaatctttgttgtatttagtgctgtgtgctttactagttgttatggaaaccaaaagccagatttgagcagaagggcccaaggtgtcccttagtccagctgtaaagcacaggaaacaattttgggccccagggatgatgaggagagatgaaaggaagagcataaaggagtggaagggggtgaggatgtgcgaagaagatgagttagacggggcccactaaggctcattcatcagaagacgtacatgtacgtgagttggccaggggcctcccttagcaactggcacatcttcaatgaagattctctgtgctrcactgtctgctttcttctttcctagaggttgatctgcaaacttctctgcttggaaggctgactccgcctttggggccctggtgagtccttaggaggaaaaacgtggcaggccttccacaggctccctcctgggactgatgcacacacagcggtgagggaggcaggagccttccttcttagtctcagtctaagtcacttctgtccaatatggtagccactagccacatatggctatttaaataaactaaaacaaaataaaataaaaaatactgtcttttctctgtacttt

SEQ ID NO: 689366 - DNA, 617 bp, Homo sapiens
tttctaatgtaaatatccaatacttagagggaaggcggaagcaacatttatttgaagacctactatgtgccactattttataaccatcgcctcctctgatcctcacaataaccakgtaaggttggcattttagctcctttttatagagatggaatctgaaagaacagtgactttcctttcttggagggttgataaatggcaggggaaggattccagctgagatttgggtcttctgagtatattttctttcctggacacaacccatcttcttgaggccagcttagtcctggcagccttaacttggcgccctgaagagcaggaagggagatgaataaaggaaaagagtcgtgtgttatcttaaatattactgtggtttttacaacacctttaaagaagaatcattctcagttccctaactcaccagtgtctggaaatggaattaaccagaccacaaactgagtcatgtgctccgtcccgtgaggaatttttgcaagggtggaacaataagagtattttgggttttcatcgggtgttgtacctaacaccacaatgtcacctgctattgacacagtgtcttcttgtcatgaattgggaaacatatttgttgtggattggca

SEQ ID NO: 689367 - DNA, 976 bp, Homo sapiens
ggttctgattcaagttctgtcccatttgttttgtgtcctggggcacaggcaagtccctgctcccactcagagccccatgtaaaagtagagacaacaatacttgccttgcctccctcataggataggtgtgagtgctgaggaaaattaaacccattgtcaatgagatataaatgtaaaaaaaaaattgtttttgttatttcaattactttagtctctgaggaaatcccagaagccactcagcagtgcagcacggtggtttctatattaaaatggaagctggaagccagttgtccttcctgggatcagagctactccacattttccagcaccttctgcaggtaaaatggagccatgtgaccgagtctggccaattatccattaaacctcacatgaagttctcctggcttgtctctctctttttcatttcctaggaggatgccgagtatgtggtagagtactccaagtctttgcagattacaaagtcaccagttgtaccaacactgggtatttgaatcaccatgtagaaatgcaccttctgaacatccagtaggtctatgatataagaaacagatagacccttactgtgttaagccactgaaatttggggctgtttgttacatcagctagtataatttattcttgctaattcaccagagtagacctatgagaaacttgagtgcaaatctacagtcaatgcatgttaaaactaagtgaatcattttttttctggggctatttcaaaaccatttttctaggataattggctcccaacttgtacaatataaaragaggtttatgttgggaaaactctgtccttgtggggtaactgctgtcataggcagatttagcaaggatttcttgataggaaactaccagggtgccatgtccttggtcacctcctgtagccaacacaaccatatcgccaccaagagatgcttgtgtggggtgagagcccgtgtacggtttatgattctga

SEQ ID NO: 689368 - DNA, 1385 bp, Homo sapiens
tatgttcaacaacaggggaaacttagaatattatacacttatgagtgactaactacataactatactgactaacctgtggaatactcatgatgtttaaatgagaataagatataaaactatacttagagaacattcccaattttttaattatgtgtggatatgctggtataaggtttaaattgaggtgaaattggaaaragagtgtagtttattgaaggaggatttgctttgctggtgtatttgtatttttctgattgaatattttgaaccaaaagtgtaattcctacttagatttttttctcacttatttccaattggtatcagcatgaatactgcattttacataaaatataaatatggttaaatagaaaagagtcagaattctattctagcaatggaattaattccttatgtcacaaccattttctatatgaccccgttttaatacatggattcagacaagtgtaatccacaaatatttactgagagcccgccctcaaaaaattgacactctagaaggaaacataagacacaaggatgcaatgtggaatcgtagaaaaaacacaacttggaatgaaaacaccagagttggagtctgggctatgtcataaccacaattaagcagttcataaaattttttgcagaggatatagtagaatgtaaattacaaagctcaattatgtaatcaaggaatcatgaaaagctttttaattagagtctaaatgctctgtggcatgcataatagcaagtatgtgtttactaagtcagagttaacattagtctgtcctttcaattcttctccaattcagaacagatatacacattgttcccattgcacaggcataattacaaaattttggaatattggttacattgaaaatgaatattcaaaaaccagagctgatgggctaaaacagaggtggcattattcttagagggaaagtcagaataccctgactcttaattatggtgggttttcataaagaagactggaaaggctgcttaggaatctagcttatgaaaagaaaatgtacaggacaacattgatgtgagccagagataaaatgataaagaaaaattatacagcagaaagatgacacaatagtggactaatggcatcaagctgatattgactgaagggttcaaataaaatttgaatgtaggagaaaatggaacagcaaattgaaggatatgagcaattaaaacgtgatgatagttccaattctgatattttctgtcttgattacagcatccttatattctaattatcccattctttcatgaccaccaaacctactatttgtacaaataataaattccaattctttacttttctctgttctttcagaatacctacctacccactgcaacccatttgccttcc

SEQ ID NO: 689369 - DNA, 640 bp, Homo sapiens
gtagaatttctgtggcatatttttataagattatggattaatttaatttcattcttaaagaattatgtaaaatgttaatactctttttttatagttaggtttatgtatgtgtgtttttgttaccttttctttttggaatctcatttttcatgtttttcaaatgctataaaacctgccgtggtttgtcaccaccatagacgcagtttgtactgtcaaaagcaaaacagagagagctttaaacaggatttttttyccccaaaaatgtaattttaaggtctatataaaagtcttaaagtactatttttaataatgcttattttttcaacataaaattaaataatattggctaggcacagtggctcatacctataatctcagcactttgggaggccagggcaggaggatcatgtgagcccaggtggtggagaccagactggggaacatagtgagatcttgtctctacaaaaaaaaaattttaaatagctaggtgtggtggcacatggctctgtagaccctctgtagtcccagctcctcgggaggctgagatgggaggattaccttgattgtaccactacactccagcctggatgacagagtgagagcctgtctcaaaaataagtaaataaattaaataacactc

SEQ ID NO: 689370 - DNA, 1253 bp, Homo sapiens
gttctccaaggaccctgcttcgcgtactctgcaggcagggttgtgggagaggcagaaaagcacgcagtccttccccatcgtaccgccacccccacaaggtcgtgtgtccgaggagggggtgcaaggggaaggttccgtggcattgagtggttgaacatattgacagccatgtgctcctgtctgtttacccacacacatctgcttcctgtgttctccaggcggggtggccccatcagcttctcttccagccgatctggccggcgccagctgcaccttgaaggagcttccctggagctctccgacgatgacacagaaagtaagaccagtgatgtcaacgagacgcagccaccccagtcagagtaaagttgcaggaagccagaggaggcaatacagtgggacagttaggaatgcacccggggcctcctgcagatttcggaaattggcaagctacgggattccttcctgaaagatcaactgtgtcttaaggctctccagcctatgcatactgtatcctgcttcagacttaggtacaattgctcccctttttatatatagacacacacaggacacatatattaaacagattgtttcatcattgcatctattttccatatagtcatcaagagaccattttataaaacatggtaagaccctttttaaaacaaactccaggcccttggttgcgggtcgctgggttattggggcagcgccgtggtcgtcactcagtcgctctgcatgctctctgtcatacagacaggtaacctagttctgtgttcacgtggcccccgactcctcagccacatcaagtctcctagaccactgtggactctaaactgcacttgtctctctcatttccttcaaataatgatcaatgctatttcagtgagcaaactgtgaaaggggctttggaaagagtaggaggggtgggctggatcggaagcaacacccatttggggttaccatgtccatcccccaaggggggccctgcccctcgagtcgatggtgtcccgcatctactcatgtgaactggccttggcgagggctggtctgtgcatagaagggatagtggccacactgcagctgaggccccaggtggcagccatggatcatgtagacttccagatggtctcccgaaccgcctggctctgccggcgccctcctcacgtcaggagcaagcagccgtggacccctaagccgagctggtggaaggcccctcccyatcgccagccgggccctcatgctgaccttgcaaa

SEQ ID NO: 689371 - DNA, 1253 bp, Homo sapiens
gttctccaaggaccctgcttcgcgtactctgcaggcagggttgtgggagaggcagaaaagcacgcagtccttccccatcgtaccgccacccccacaaggtcgtgtgtccgaggagggggtgcaaggggaaggttccgtggcattgagtggttgaacatattgacagccatgtgctcctgtctgtttacccacacacatctgcttcctgtgttctccaggcggggtggccccatcagcttctcttccagccgatctggccggcgccagctgcaccttgaaggagcttccctggagctctccgacgatgacacagaaagtaagaccagtgatgtcaacgagacgcagccaccccagtcagagtaaagttgcaggaagccagaggaggcaatacagtgggacagttaggaatgcacccggggcctcctgcagatttcggaaattggcaagctacgggattccttcctgaaagatcaactgtgtcttaaggctctccagcctatgcatactgtatcctgcttcagacttaggtacaattgctcccctttttatatatagacacacacaggacacatatattaaacagattgtttcatcattgcatctattttccatatagtcatcaagagaccattttataaaacatggtaagaccctttttaaaacaaactccaggcccttggttgcgggtcgctgggttattggggcagcgccgtggtcgtcactcagtcgctctgcatgctctctgtcatacagacaggtaacctagttctgtgttcacgtggcccccgactcctcagccacatcaagtctcctagaccactgtggactctaaactgcacttgtctctctcatttccttcaaataatgatcaatgctatttcagtgagcaaactgtgaaaggggctttggaaagagtaggaggggtgggctggatcggaagcaacacccatttggggttaccatgtccatcccccaaggggggccctgcccctcgagtcgatggtgtcccgcatctactcatgtgaactggccttggcgagggctggtctgtgcatagaagggatagtggccacactgcagctgaggccccaggtggcagccatggatcatgtagacttccagatggtctcccgaaccgcctggctctgccggcgccctcctcacgtcaggagcaagcagccgtggacccctaagccgagctggtggaaggcccctccccrtcgccagccgggccctcatgctgaccttgcaaa

SEQ ID NO: 689372 - DNA, 649 bp, Homo sapiens
cttttatgaatatttcatttatgcctctttacacgactttgtccactgacttgaactggaagcccttctccactcttgcatgccttcacagagaaaatcaaggccatttgttttaagcttctttgatttcttttctcatcttttgttattactctcctattattacctctatttgtagccattcctcctttttgtcccagtggtaaaagtgcaaattcctgtccgtggctaattttgtccatctgtgctttggatctcatttcttccaacccttaaatctttatttctcctgtatttcagccttttactatatatgcgttaatatttatgtataatgtttatgtattacacattatatgttatgtgttatacaggtatactttgatatttctgtattacatgttatccatataaatatatgtaatacttatgtggtacatattacatactttaaagcttcttgaaagcgtgtccccatttattgttagcattttgactgcatgcacacgccccagacactttagcctgggctctgtcccctgctyatgccgctaaaactgctcactggtgatctcagtgctgtcaaatcctgtggatgccgttctgtcctaattttacttgaagcattcaacactgaccgttttttttt

SEQ ID NO: 689373 - DNA, 1507 bp, Homo sapiens
taatcaagataaataggtattactatcaccactatatacataaggcaaaaaagatgcagaagggctggacttcaaggaccctaaaagtgccctgaaatagtctaatgtggaataccttgtcctgtcacccagagttggagcctcaaatacaggaacttatttttatatagtccaaggagttagcatagcccccagaaacttagcaggaatttgggaaaaaaaaaaaaagttgaaaattaagctcagcaattcaaaaatatctcagggactaggttgcttgcataatcagaaaataatattttgcattgtcaaatgaaactccagacttagggccttaaaaaaaaatagacaaagttttcctggagaagtaaactaactgtagaaatgtttttyagcactttaagtgacaatgatttgtgaggtgttttgaattttatggttttaaatcagcatggaaacttaatagagcacgctttctatttagaagctctacctcagaaataggtatgcatctttttctccacacctcaagttcatggttttacaccatgtacatcaaactaaagtttcaccatcatgctggcccagtattgtaaaagaaatagcttttcttaatctaaaattagagtgtaataactgcatagcaaagcaactgtgtaattaaaatagtcatataattttaaagatatatcattataaaaattattatgagaagaacagacttcagcattacaagtggagaaccaatatcggaaagagtctcccaaaatgacatagcagtgattacacagtgacagatcagtgtatctgcacagggaaaatcccctagttagagatcacagcaggatcccatccatcatattacacattagttcagagaactaaaactcttgaagcatttttggcagcagggagaacttctagcatcctaatgcttttacaaggctggatttttcttttctccccaatgtgcttcaagatttcataacacgagagacataggagcaaaagttaaaatgctttaatggtccccataggctatttaaataaacactgtgattgcaatttagacaatctggagtccattcaatattaaatccccaccccaatctacagctactacacaaatggggaattcatggtatactccacatagccatttactactgcacctattgcttcttgacaatcatggggaggagctagccaggcctaacattacaccagttaaatctgtcaacaaccggggagagcgctctgctgagcaaacatactgatccctctcacacagcccgtctttgtcctgagtttgccgcaacaacactaatcttctcatactatcttcagcagtgcaagcagaaacttctcctgcgaccagctgtaacaaaagatgcctttctttattttcacacactacatgtatatatttatgctgtcccttccgctccctccccctccatttccaccccttcctacagacccaattctaaataaagcttgattggaa

SEQ ID NO: 689374 - DNA, 605 bp, Homo sapiens
tgactcgggcacaacagttgagtattattaaaatatgtaggaatttgaatgtcagttctactttacatactagagttcagacctgcagatttgtgccaacattttgtcagctttgcatgggccaaaagtcattctcatcttcaacaagatttaataaaaataaatgtaatccagaagaatttaaagggatttttaaaaaatcattctaagaatacaagaaaataatctttcttgaatttgttgtgaataaattgataaacttacctgttggtccaaagtaatgatggaaattttgagacctttctctctaccagtaggaatgtagacaaaagctatcattagaagtatcmccttaaatatacatttttattagtttctcagtgttgtatggtttaaataggaaatttgaactttgagtaacttctatgaacttccattccctctcatagttctctggcaccctctttcctagctgtctgccttcacctggatccaacccttttgatgatccatttccagctgctgcattctgtatttacatatggagaggtaagaatgccataatattctacctagatcaaactgctcatcatttttctgacttt

SEQ ID NO: 689375 - DNA, 624 bp, Homo sapiens
agagtggttaaattcatagaaacctaaagcagagtgttggttgccaggggcttggagtagggaaaaatgtggagttgtttaattagcatagagtttcagttttgtaagatgaaaaagttctggttatacaacaatatgaatgcacttaacactattgaactgtacatttagaaatcgctagaagagtaaattttgcattacattttaccacaatcaaaccaaacaaaacaacaagctgtctatgcttacgtagttctattggttccaaaacaaactgcagagttaaaaattacaaaagatctattatagcttcaatgacacagagaggagaaatgagtcagaatggacatccaaattgaacttgaatcaacaatttccagctggtattttaaaatagtaacaaataaacaaatggacaaaaaagccagattagtggggtattcttctacacataacatataaagacaggwtatagaaaggcaagtactaatgtctctattctattatcagtggtaaattctttattggattttgaatcagtttaagttaacacagtatatgtgagaaaactgaactgcattcagaagaaaacattgtaagaacttaaaatatataagtagaaat

SEQ ID NO: 689376 - DNA, 928 bp, Homo sapiens
tgtgcatggtggctgatgcctgtaatcgcagcactttaaagagagtcactatatcatttggaagtctgagcttgagctgaggagtttgagaacagcctgggtaacatagggagactccgtctctacaaaaaataaacaaaattagccaggagtggtggcacatgcctatgatcccagctactcagcaggctgaagtgtgaggattgcttgagtcctggaggtcgaggctgcagtgagcccagatctgccactgcactccagcctgggtgccagagtaagaccctgcctcaaaagaaaaagattattttgcagttctaagtagaacacttcacctccattacccccgggtttacccagattcacacgtaccatgggatggacattgggcttctttttgttcagaacccagcatcaaaaacagcagaaaaaagaatgccagtgatctgcagaaaatgcacaagactgaggaaatttacaggacaagacctgactgggaacttaagaattccagagtgagccrtggcatgctcccaaaatagaagagtggaacactgggagaagagaaaagattttttaaaatctatgaagaaactgtatgaagaggaaaagagaggtaaagttagaaaaacaggaaccatttcagatgactgcccatggaggtctagaatacattcaaaagggaaccattatgtgtctgggcaatgagtccagttcttttctgcagagcaagaagataaagttgctacataaagcctttctttttctttctttcatagctcactactgccttgaactcctggccttaatgccatcctcccacctcagcctgcgtagtagctgggaccacaggtacacaccaccatggtgtgtgtacctcagaagcaatcttccccagcttctctcatcactttttattgccagaaaacca

SEQ ID NO: 689377 - DNA, 1695 bp, Homo sapiens
taaatgtctctacaagtattctggtaactgaaagtatgtccttgacttacataaatgcataggctacatttccacaattgctgaaactaacaaggtcatgtgagaaatttaaaatttgacttcgttttcatcctcagggcccggcttcttcgaatgttgcagtatgaagatgcrcctagcttttctcctcctcatacaactttccttaaaagcacagtggaatttaaaattttgtcacctacagagcagccaccctctcctctttcagtgtatagggcactgtctctgtcctgctgtgcatgacaacgacactgagccgctcccagcccaggaaaggagcaaggtttaggtggacatgtgatcagctccacaatgagatgtcatgggtgtgaaggaggggcaggacttctggagaaaatggtgatctctcataaaaagaggggtgatgaagagctttgcccttcatttcctctttgggcagttaccagaggacatgaagcttacagtctctgcagccttcttgagaccatgagatgttgagcccaagacagaaaaaccaatgtggtcaagtttaccaagcagtaatgtagaaagaatctggggcctttctcctgtcaccaagctgctgtattaaccctgaatgtgccaaacttcagatctcttctcattgcttaagccattgttattctttcacttgtttctaaaattattgtcgcttatccttaaatgatactgaagaaaaagagcctcgttggccatagacctgccccttaggagaagaaatgcattatcatgcgtgtgtatgtgtgtgtttgtgggtgtcaaaggcagtaaaagcaagaaccagaataagtgatgtcctttcctgacatcttggctctgctgtatttatagctaaggaaacccaaaccactgcaaagagttcataatttctgctctcttcctgtctcagtttcatgttttatatcttaaggatgaacatctttttgttgtccctaattcctccctcctttatgatcatgaaattaaaatagtggtcaagaaagagacaagaacacttgaagaagacataaaatctgtggactgtacacatctcctcaacagcaacatcatgctagcagttttctccttcttctcagtggtttttgatgggaagatgctaactcctccaaccaggtatctatcagaggttgcgtttggagggcttacaaagaaaagcttccaggcagttagtgctggattctggggagtgtagcaggagggtgagtctggattcccagcatggggaggccagagtgaattctgagaaaggctgtgcatgtgggaagaaaagaattagaactcagaactgtggtcacaaccttaggagccaaagaatgagacactaacacaaatgcagctcagagacaactcagactaaaagtgttatgatcaattgtcatcttgtttgtctttctaataccacacataaagagtaggtagaattgtttacagtggaagctatgcacatgaaaccccactgcccttagtgatgcacttgcttgttgtagaataaatattgaagaatttgaattgaaagtgatgtctggctagtaatatcttacatagcctttttattccagcatggtcaagggtacataaaaagaggactggatatatatatattagaaagataaacaggatgacaattgatca

SEQ ID NO: 689378 - DNA, 1695 bp, Homo sapiens
taaatgtctctacaagtattctggtaactgaaagtatgtccttgacttacataaatgcataggctacatttccacaattgctgaaactaacaaggtcatgtgagaaatttaaaatttgacttcgttttcatcctcagggcccggcttcttcgaatgttgcagtatgaagatgcgcctagcttttctcctcctcatacaactttccttaaaagcacagtggaatttaaaattttgtcacctacagagcagccaccctctcctctttyagtgtatagggcactgtctctgtcctgctgtgcatgacaacgacactgagccgctcccagcccaggaaaggagcaaggtttaggtggacatgtgatcagctccacaatgagatgtcatgggtgtgaaggaggggcaggacttctggagaaaatggtgatctctcataaaaagaggggtgatgaagagctttgcccttcatttcctctttgggcagttaccagaggacatgaagcttacagtctctgcagccttcttgagaccatgagatgttgagcccaagacagaaaaaccaatgtggtcaagtttaccaagcagtaatgtagaaagaatctggggcctttctcctgtcaccaagctgctgtattaaccctgaatgtgccaaacttcagatctcttctcattgcttaagccattgttattctttcacttgtttctaaaattattgtcgcttatccttaaatgatactgaagaaaaagagcctcgttggccatagacctgccccttaggagaagaaatgcattatcatgcgtgtgtatgtgtgtgtttgtgggtgtcaaaggcagtaaaagcaagaaccagaataagtgatgtcctttcctgacatcttggctctgctgtatttatagctaaggaaacccaaaccactgcaaagagttcataatttctgctctcttcctgtctcagtttcatgttttatatcttaaggatgaacatctttttgttgtccctaattcctccctcctttatgatcatgaaattaaaatagtggtcaagaaagagacaagaacacttgaagaagacataaaatctgtggactgtacacatctcctcaacagcaacatcatgctagcagttttctccttcttctcagtggtttttgatgggaagatgctaactcctccaaccaggtatctatcagaggttgcgtttggagggcttacaaagaaaagcttccaggcagttagtgctggattctggggagtgtagcaggagggtgagtctggattcccagcatggggaggccagagtgaattctgagaaaggctgtgcatgtgggaagaaaagaattagaactcagaactgtggtcacaaccttaggagccaaagaatgagacactaacacaaatgcagctcagagacaactcagactaaaagtgttatgatcaattgtcatcttgtttgtctttctaataccacacataaagagtaggtagaattgtttacagtggaagctatgcacatgaaaccccactgcccttagtgatgcacttgcttgttgtagaataaatattgaagaatttgaattgaaagtgatgtctggctagtaatatcttacatagcctttttattccagcatggtcaagggtacataaaaagaggactggatatatatatattagaaagataaacaggatgacaattgatca

SEQ ID NO: 689379 - DNA, 1695 bp, Homo sapiens
taaatgtctctacaagtattctggtaactgaaagtatgtccttgacttacataaatgcataggctacatttccacaattgctgaaactaacaaggtcatgtgagaaatttaaaatttgacttcgttttcatcctcagggcccggcttcttcgaatgttgcagtatgaagatgcgcctagcttttctcctcctcatacaactttccttaaaagcacagtggaatttaaaattttgtcacctacagagcagccaccctctcctctttcagtgtatagggcrctgtctctgtcctgctgtgcatgacaacgacactgagccgctcccagcccaggaaaggagcaaggtttaggtggacatgtgatcagctccacaatgagatgtcatgggtgtgaaggaggggcaggacttctggagaaaatggtgatctctcataaaaagaggggtgatgaagagctttgcccttcatttcctctttgggcagttaccagaggacatgaagcttacagtctctgcagccttcttgagaccatgagatgttgagcccaagacagaaaaaccaatgtggtcaagtttaccaagcagtaatgtagaaagaatctggggcctttctcctgtcaccaagctgctgtattaaccctgaatgtgccaaacttcagatctcttctcattgcttaagccattgttattctttcacttgtttctaaaattattgtcgcttatccttaaatgatactgaagaaaaagagcctcgttggccatagacctgccccttaggagaagaaatgcattatcatgcgtgtgtatgtgtgtgtttgtgggtgtcaaaggcagtaaaagcaagaaccagaataagtgatgtcctttcctgacatcttggctctgctgtatttatagctaaggaaacccaaaccactgcaaagagttcataatttctgctctcttcctgtctcagtttcatgttttatatcttaaggatgaacatctttttgttgtccctaattcctccctcctttatgatcatgaaattaaaatagtggtcaagaaagagacaagaacacttgaagaagacataaaatctgtggactgtacacatctcctcaacagcaacatcatgctagcagttttctccttcttctcagtggtttttgatgggaagatgctaactcctccaaccaggtatctatcagaggttgcgtttggagggcttacaaagaaaagcttccaggcagttagtgctggattctggggagtgtagcaggagggtgagtctggattcccagcatggggaggccagagtgaattctgagaaaggctgtgcatgtgggaagaaaagaattagaactcagaactgtggtcacaaccttaggagccaaagaatgagacactaacacaaatgcagctcagagacaactcagactaaaagtgttatgatcaattgtcatcttgtttgtctttctaataccacacataaagagtaggtagaattgtttacagtggaagctatgcacatgaaaccccactgcccttagtgatgcacttgcttgttgtagaataaatattgaagaatttgaattgaaagtgatgtctggctagtaatatcttacatagcctttttattccagcatggtcaagggtacataaaaagaggactggatatatatatattagaaagataaacaggatgacaattgatca

SEQ ID NO: 689380 - DNA, 1695 bp, Homo sapiens
taaatgtctctacaagtattctggtaactgaaagtatgtccttgacttacataaatgcataggctacatttccacaattgctgaaactaacaaggtcatgtgagaaatttaaaatttgacttcgttttcatcctcagggcccggcttcttcgaatgttgcagtatgaagatgcgcctagcttttctcctcctcatacaactttccttaaaagcacagtggaatttaaaattttgtcacctacagagcagccaccctctcctctttcagtgtatagggcactgtctctgtcctgctgtgcatgacaasgacactgagccgctcccagcccaggaaaggagcaaggtttaggtggacatgtgatcagctccacaatgagatgtcatgggtgtgaaggaggggcaggacttctggagaaaatggtgatctctcataaaaagaggggtgatgaagagctttgcccttcatttcctctttgggcagttaccagaggacatgaagcttacagtctctgcagccttcttgagaccatgagatgttgagcccaagacagaaaaaccaatgtggtcaagtttaccaagcagtaatgtagaaagaatctggggcctttctcctgtcaccaagctgctgtattaaccctgaatgtgccaaacttcagatctcttctcattgcttaagccattgttattctttcacttgtttctaaaattattgtcgcttatccttaaatgatactgaagaaaaagagcctcgttggccatagacctgccccttaggagaagaaatgcattatcatgcgtgtgtatgtgtgtgtttgtgggtgtcaaaggcagtaaaagcaagaaccagaataagtgatgtcctttcctgacatcttggctctgctgtatttatagctaaggaaacccaaaccactgcaaagagttcataatttctgctctcttcctgtctcagtttcatgttttatatcttaaggatgaacatctttttgttgtccctaattcctccctcctttatgatcatgaaattaaaatagtggtcaagaaagagacaagaacacttgaagaagacataaaatctgtggactgtacacatctcctcaacagcaacatcatgctagcagttttctccttcttctcagtggtttttgatgggaagatgctaactcctccaaccaggtatctatcagaggttgcgtttggagggcttacaaagaaaagcttccaggcagttagtgctggattctggggagtgtagcaggagggtgagtctggattcccagcatggggaggccagagtgaattctgagaaaggctgtgcatgtgggaagaaaagaattagaactcagaactgtggtcacaaccttaggagccaaagaatgagacactaacacaaatgcagctcagagacaactcagactaaaagtgttatgatcaattgtcatcttgtttgtctttctaataccacacataaagagtaggtagaattgtttacagtggaagctatgcacatgaaaccccactgcccttagtgatgcacttgcttgttgtagaataaatattgaagaatttgaattgaaagtgatgtctggctagtaatatcttacatagcctttttattccagcatggtcaagggtacataaaaagaggactggatatatatatattagaaagataaacaggatgacaattgatca

SEQ ID NO: 689381 - DNA, 1695 bp, Homo sapiens
taaatgtctctacaagtattctggtaactgaaagtatgtccttgacttacataaatgcataggctacatttccacaattgctgaaactaacaaggtcatgtgagaaatttaaaatttgacttcgttttcatcctcagggcccggcttcttcgaatgttgcagtatgaagatgcgcctagcttttctcctcctcatacaactttccttaaaagcacagtggaatttaaaattttgtcacctacagagcagccaccctctcctctttcagtgtatagggcactgtctctgtcctgctgtgcatgacaacgacactgagccgctcccagcccaggaaaggagcaaggtttaggtggacatgtgatcagctccacaatgagatgtcatgggtgtgaaggaggggcaggacttctggagaaaatggtgatcyctcataaaaagaggggtgatgaagagctttgcccttcatttcctctttgggcagttaccagaggacatgaagcttacagtctctgcagccttcttgagaccatgagatgttgagcccaagacagaaaaaccaatgtggtcaagtttaccaagcagtaatgtagaaagaatctggggcctttctcctgtcaccaagctgctgtattaaccctgaatgtgccaaacttcagatctcttctcattgcttaagccattgttattctttcacttgtttctaaaattattgtcgcttatccttaaatgatactgaagaaaaagagcctcgttggccatagacctgccccttaggagaagaaatgcattatcatgcgtgtgtatgtgtgtgtttgtgggtgtcaaaggcagtaaaagcaagaaccagaataagtgatgtcctttcctgacatcttggctctgctgtatttatagctaaggaaacccaaaccactgcaaagagttcataatttctgctctcttcctgtctcagtttcatgttttatatcttaaggatgaacatctttttgttgtccctaattcctccctcctttatgatcatgaaattaaaatagtggtcaagaaagagacaagaacacttgaagaagacataaaatctgtggactgtacacatctcctcaacagcaacatcatgctagcagttttctccttcttctcagtggtttttgatgggaagatgctaactcctccaaccaggtatctatcagaggttgcgtttggagggcttacaaagaaaagcttccaggcagttagtgctggattctggggagtgtagcaggagggtgagtctggattcccagcatggggaggccagagtgaattctgagaaaggctgtgcatgtgggaagaaaagaattagaactcagaactgtggtcacaaccttaggagccaaagaatgagacactaacacaaatgcagctcagagacaactcagactaaaagtgttatgatcaattgtcatcttgtttgtctttctaataccacacataaagagtaggtagaattgtttacagtggaagctatgcacatgaaaccccactgcccttagtgatgcacttgcttgttgtagaataaatattgaagaatttgaattgaaagtgatgtctggctagtaatatcttacatagcctttttattccagcatggtcaagggtacataaaaagaggactggatatatatatattagaaagataaacaggatgacaattgatca

SEQ ID NO: 689382 - DNA, 1695 bp, Homo sapiens
taaatgtctctacaagtattctggtaactgaaagtatgtccttgacttacataaatgcataggctacatttccacaattgctgaaactaacaaggtcatgtgagaaatttaaaatttgacttcgttttcatcctcagggcccggcttcttcgaatgttgcagtatgaagatgcgcctagcttttctcctcctcatacaactttccttaaaagcacagtggaatttaaaattttgtcacctacagagcagccaccctctcctctttcagtgtatagggcactgtctctgtcctgctgtgcatgacaacgacactgagccgctcccagcccaggaaaggagcaaggtttaggtggacatgtgatcagctccacaatgagatgtcatgggtgtgaaggaggggcaggacttctggagaaaatggtgatctctcataaaaagaggggtgatgaagagctttgcccttcatttcctctttgggcagttaccagaggacatgaagcttacagtcyctgcagccttcttgagaccatgagatgttgagcccaagacagaaaaaccaatgtggtcaagtttaccaagcagtaatgtagaaagaatctggggcctttctcctgtcaccaagctgctgtattaaccctgaatgtgccaaacttcagatctcttctcattgcttaagccattgttattctttcacttgtttctaaaattattgtcgcttatccttaaatgatactgaagaaaaagagcctcgttggccatagacctgccccttaggagaagaaatgcattatcatgcgtgtgtatgtgtgtgtttgtgggtgtcaaaggcagtaaaagcaagaaccagaataagtgatgtcctttcctgacatcttggctctgctgtatttatagctaaggaaacccaaaccactgcaaagagttcataatttctgctctcttcctgtctcagtttcatgttttatatcttaaggatgaacatctttttgttgtccctaattcctccctcctttatgatcatgaaattaaaatagtggtcaagaaagagacaagaacacttgaagaagacataaaatctgtggactgtacacatctcctcaacagcaacatcatgctagcagttttctccttcttctcagtggtttttgatgggaagatgctaactcctccaaccaggtatctatcagaggttgcgtttggagggcttacaaagaaaagcttccaggcagttagtgctggattctggggagtgtagcaggagggtgagtctggattcccagcatggggaggccagagtgaattctgagaaaggctgtgcatgtgggaagaaaagaattagaactcagaactgtggtcacaaccttaggagccaaagaatgagacactaacacaaatgcagctcagagacaactcagactaaaagtgttatgatcaattgtcatcttgtttgtctttctaataccacacataaagagtaggtagaattgtttacagtggaagctatgcacatgaaaccccactgcccttagtgatgcacttgcttgttgtagaataaatattgaagaatttgaattgaaagtgatgtctggctagtaatatcttacatagcctttttattccagcatggtcaagggtacataaaaagaggactggatatatatatattagaaagataaacaggatgacaattgatca

SEQ ID NO: 689383 - DNA, 1695 bp, Homo sapiens
taaatgtctctacaagtattctggtaactgaaagtatgtccttgacttacataaatgcataggctacatttccacaattgctgaaactaacaaggtcatgtgagaaatttaaaatttgacttcgttttcatcctcagggcccggcttcttcgaatgttgcagtatgaagatgcgcctagcttttctcctcctcatacaactttccttaaaagcacagtggaatttaaaattttgtcacctacagagcagccaccctctcctctttcagtgtatagggcactgtctctgtcctgctgtgcatgacaacgacactgagccgctcccagcccaggaaaggagcaaggtttaggtggacatgtgatcagctccacaatgagatgtcatgggtgtgaaggaggggcaggacttctggagaaaatggtgatctctcataaaaagaggggtgatgaagagctttgcccttcatttcctctttgggcagttaccagaggacatgaagcttacagtctctgcagccttcttgagaccatgagatgttgagcccaagacagaaaaaccaatgtggtcaagtttaccaagcagtaatgtagaaagaatctggggcctttctcctgtcaccaagctgctgtattaaccctgaatgtgccaaacttcagatctcttctcattgcttaagccattgttattctttcacttgtttctaaaattattgtcgcttatccttaaatgatactgaagaaaaagagcctcgttggccatagacctgccccttaggagaagaaatgcattatcatgcgtgtgtatgtgtgtgtttgtgggtgtcaaaggcagtaaaagcaagaaccagaataagtgatgtcctttcctgacatcttggctctgctgtatttatagctaaggaaacccaaaccactgcaaagagttcataatttctgctctcttcctgtctcagtttcatgttttatatcttaaggatgaacatctttttgttgtccctaattcctccctcctttatgatcatgaaattaaaatagtggtcaagaaagagacaagaacacttgaagaagacataaaatctgtggactgtacacatctcctcaacagcaacatcatgctagcagttttctccttcttctcagtggtttttgatgggaagatgctaactcctccaaccaggtatctatcagaggttgcgtttggagggcttacaaagaaaagcttccaggcagttagtgctggattctggggagtgtagcaggagggtgagtctggattcccagcatggggaggccagagtgaattctgagaaaggctgtgcatgtgggaagaaaagaattagaactcagaactgtggtcacaaccttaggagccaaagaatgagacactaacacaaatgcagctcagagacaactcagactaaaagtgttatgatcaattgtcatcttgtttgtctttctaataccacacataaagagtaggtagaattgtttacagtggaagctatgcacatgaaaccccactgcccttagtgatgcacttgcttgttgtagaataaatattgaagaatttgaattgaaagtgatgtctggctagtaatatcttacatagcctttttattccagcatggtcaagggtacataaaaagaggactggatatatatatattagaaagataaacargatgacaattgatca

SEQ ID NO: 689384 - DNA, 583 bp, Homo sapiens
taaatgttgctttatacctgagagtttaaaagtatttttataccaactgaaaccaaattcatggttgaaattactcttgaagtatctcttcaggatttaacatctgaaacattcattgacatgaatcaaccactgatagcgattggctattaagttttcttttttgcagtaactagggcttgactgactcaatggataagaagccccaagtacttgtagcagtcacacacacacacacacacacacacgcgcrcacacacacacacacacacaaacactaaattaggagaaaaataaaagctaaggatgaacaaaacatctcaatatcataagacctaagtggaatttgctaaagaatgctatttgttctccttattatgaattttattttcaaaaagcaacaaaaactgtaactgttctcaagtattgcagtatttaactagagccttttcatattaaagttgcagaatctatactttattattttttttattctgccagaaatgaaagtggcctctagcaatagtcaggggtgaccttgttttcggaccagattgcttagcccagtgtttgaatgaaaaca

SEQ ID NO: 689385 - DNA, 473 bp, Homo sapiens
atcccaactactcaggaggctgaggcaggagaatcacttgaacccgagaggcagaggttgcagtgagccagatcacagccagggcgacagagtgagattctgtctcaaaaaaaaaaaaaaaaaaaaaagaataggtgggaaagcaggagttaggaagtggytcacagttgtactttgtggtagattgtctcacactatcctctgagcaatcccatgaggcaggtggatgaggaactttagtatcattcccaatgcaagggtgagaagattgaggcccagggagacagagcgatgggcctacggtcacgcggctgtcactttgtgtcggagccgtggctggaatctaagcttttaaggtcctggttcaaggttgctcatcccacacggcctcatttcaaggggtgaattatcagtacctccactgtgaaaaaactgcaattcattctttgagatgatcatgtaaataccagtca

SEQ ID NO: 689386 - DNA, 609 bp, Homo sapiens
taaacataatcttattatagttggtcagggtaaatttttgatttaaggctatttaatactctaaggcttttaagcaaaggtagaatcttaaaatctaagaaaataatacaatcttttttatagatatgtaacagcatcagatggggtttttacataaagttagatgattttaaatcttaactagtgcctagaaaagattccagacaagggaatgtctacctataacatgattcagcttaatttagggaaaccatctatcatggcataagtgcaaagactgaaagctgctgccttaccaagtgttaatattcaaagaactaatattygtaagtttcaaatatattgaaattgcttctcttcaataaaaggattgatcatattaaaaccagagaacacaatactggtaatactatttaacatttattgaacagttagtatgtgccagacactatgctaagccctttgaaggagttacttcatttaatctttcaccattttaataaggtgctagtattagttccactttagagatgacagcattgaggtcttgttgacttcacagttttgcctcagttcagtcctatttggaaaaataggaaatgtattttt

SEQ ID NO: 689387 - DNA, 609 bp, Homo sapiens
taaacataatcttattatagttggtcagggtaaatttttgatttaaggctatttaatactctaaggcttttaagcaaaggtagaatcttaaaatctaagaaaataatacaatcttttttatagatatgtaacagcatcagatggggtttttacataaagttagatgattttaaatcttaactagtgcctagaaaagattccagacaagggaatgtctacctataacatgattcagcttaatttagggaaaccatctatcatggcataagtgcaaagactgaaagctgctgccttaccaagtgttaatattcaaagaactaatattcgtaagtttcaaatatattgaaattgcttctcttcaataaaaggattgatcataytaaaaccagagaacacaatactggtaatactatttaacatttattgaacagttagtatgtgccagacactatgctaagccctttgaaggagttacttcatttaatctttcaccattttaataaggtgctagtattagttccactttagagatgacagcattgaggtcttgttgacttcacagttttgcctcagttcagtcctatttggaaaaataggaaatgtattttt

SEQ ID NO: 689388 - DNA, 609 bp, Homo sapiens
tccatttgtccatctctccgtctgagcaccctgcattccaaatgtggcacagagaaggcgtacaataaatatgtgttgagtgaatgaatgagtgaatgaatggagtgaatgaatgagtgaatgtcagatggccttactggctgagggcctccctgagttgggtcccagcccacagaggccctggctgtgcaccctggagctagkgacagccactgccaggcccttcccagataccctggcacgaagaacccacctttctgggtacctggcagtgccgcctgaagcaagggccgaaccctgggagtggaggaagaaggggcttggctcagggggcctggcctgggcagcccagccgttcgggaaggctgcagccttggaaagacacagtgcttccgtgagggtctcctgatacaataaaagattatcagctaaataaaacaagaagtgactggggccactatgccctgttggattgaaatcgtgtgagcaaagtggttttctctgagagatttattttctgcactggcttcaggcagccagcccagccagagagcacgggcaagaacggggctggtctccctccactggcagggaggggatggggcttta

SEQ ID NO: 689389 - DNA, 1089 bp, Homo sapiens
atgtgccaccatgcctggcttatttaaattttttttttttttttttttttgtacagaccaggtctcattgtttcccaggctggcctcaaattcctgagctcaagtgatcctcccgccttggtttcccaaagtgctgggattacaggcatgagctaaaacactttctctgggcatgggtcttttttttttttttttttttttttwaatctatgggctatattttactaccctaagtggatggaaaggattcttctggaatgaaataagtgaagcaaaagctcttcgctgaatacttcaatccttaggataagaggacacatttatggccaagagagcttcagccctggtttctctctacaggatcaccacccattttgcagcagtatggcaggcaggctcgtgaaagctagtgtcagtagctcagcatcctgtgaggaaaagctacggagccctgtacttgcggaaagggttgagtgggtacaagcgtaacagcagtccaagcgacacaggtaaattccaagttggcaagaaaagctgaatgctatttttggttctaggcgtcataccactcgttttaatattgaagagtgggccgggtgcggtggcttacacctgtaatctcagcactttgggaggccgaggcaggtggatcacctgaggtcaggggttcgagaccagcctgaccaatatggcgaaaccccgtctctactaaaaatacaaaatcagctgggcgtggtggcgcatgcctgtattccagctactcaggaggctgaggcagaactgcttgaaacctgggaagcgaaggttgcagtgagccaaaatcgagccattgcactccagcctgggtaacaagagcaaaactctgcctcaaaaaaaaaaaaaaatactgaacagagcaaatggaaatgggccgtaagcaagtttttaactatttccttctaaatgaagtgcaatcaatataagaaaagcgccttctcaccagcaagggaagcctgaagaatgagttagtactccttgtcaaaagtaacttcccttggctggaaagattaataaaggcctaaatgaatattgtgattagatggcaacact

SEQ ID NO: 689390 - DNA, 679 bp, Homo sapiens
aaagacaaggaaaaagtgaggaactgtcacagaatggaggagactaaggacacataacaattaaatgtaatgtatgatcctggaccagaaaaaggacatcaatgggaaaacttggaaattcaagtaagatctatagaatagtctgttttattggctcaatgttaatttcctcctttcaattattatactatgtttttgtaagatgttaacagtaagggacactgggttaaaggaatgctctatttttgcaacatatttgtttacttaaaattatttcaaaacaagaatgaaaaaaaataacttcatgctctcctatcatttcatactgcatcatctggaagaatttactccatgaagcttattctatgttggtagtggaataagagacattactttgaacagaacaagtaatgaaagagaatggcatttgaaatgtgagggaatgaacaagaagacttaaagaaagaatcttggttctgcatatgtatagatgtcatatgtcataatatagatgacatattgtctcagtccaggctgcaattacaaaataccatagactggatggcttataaacacagtaatttatttctcacattctgtagtctggaagttcaagatcaaagtaccaccrtaggttatggtgagggccctcttccaggtttcaaactgctgacttgtc

SEQ ID NO: 689391 - DNA, 618 bp, Homo sapiens
agtgtccatcaacagatgactggataaagaaaatgtgatacatacacacaaggaaatactattcagtcatttaaaaaatgaaatcatgtatgtttgcagcaacatgagtggaactgaaggccattattttaagtgaaataattcagaaacagacaaatactgcatcttctttcttctaagtgggagctaaataatgtgtacacatggacatagagtgtggactgataaacaatgaagactcataactgcaggcgaggtggtgaatgatgagaatgacttaatgggtataatgtacattttatcagtgatggatacactaaaagcccagactacaccactatgaaatatatctttgtaacaaagttgcacttgtacctcaacccttaawtttatacaaattaaaaaaaagaaaaagaaaaatgcagggtccttcattcaaatgtattaacaatttcaagacagcaatagtcgacttaaaccagggtggaacccttccgagtgcaggctgcacgcccaggaggacagtttggttttctgccctgcaaaattacatatatacaatgtcatataaataaagttcttgtctgtggcaataacaaaaacaatggaaaggggaaa

SEQ ID NO: 689392 - DNA, 635 bp, Homo sapiens
catcatgcagtacaggagatagcctgtgagttggagggaatgttattgtacagaaatatggtctatagctatgagagatgagctactgggaaagagaaagaggcttccattggattaatctagtaggggcccagtgatcatttaaaggcatctcttttaacttcggtaatggtcagactattttaaagcaatcacatatgtaaatcaacagcaccaagcctgacacayagtagaatctcaatagatatgaattctcctcataggttataaaatacatcctgtgtgaaaagaaaaagtaatcacccattggaagccccatctgttcacaggtagcacacaccattatgtaagtgagacatctggttttgtttaatgttgattgaaggcctgtaaacagattggttcatagcttataaatctataaaactgatcaaactctggctggctccacagcaacaaggtctcactgagataggaagagagtgtggattttcaacacggtaagatgttttaaaaagggtgaggattttgttttcctattctagtctcttgggagctcatcccacatttccttcagactaaccccaccattaatagtataatcactgggcgtttggtactagggctaggcaaac

SEQ ID NO: 689393 - DNA, 635 bp, Homo sapiens
catcatgcagtacaggagatagcctgtgagttggagggaatgttattgtacagaaatatggtctatagctatgagagatgagctactgggaaagagaaagaggcttccattggattaatctagtaggggcccagtgatcatttaaaggcatctcttttaacttcggtaatggtcagactattttaaagcaatcacatatgtaaatcaacagcaccaagcctgacacatagtagaatctcaatagatatgaattctcctcataggttataaaatacatcctgtgtgaaaagaaaaagtaatcacccattggaagccccatctgttcacaggtagcacacaccattatgtaagtgagacatctggttttgtttaatgttgattgaaggcctgtaaacagattggttcatagcttataaatctataaaactgatcaaactctggctggctccacagcaacaaggtctcactgagataggaagakagtgtggattttcaacacggtaagatgttttaaaaagggtgaggattttgttttcctattctagtctcttgggagctcatcccacatttccttcagactaaccccaccattaatagtataatcactgggcgtttggtactagggctaggcaaac

SEQ ID NO: 689394 - DNA, 635 bp, Homo sapiens
catcatgcagtacaggagatagcctgtgagttggagggaatgttattgtacagaaatatggtctatagctatgagagatgagctactgggaaagagaaagaggcttccattggattaatctagtaggggcccagtgatcatttaaaggcatctcttttaacttcggtaatggtcagactattttaaagcaatcacatatgtaaatcaacagcaccaagcctgacacatagtagaatctcaatagatatgaattctcctcataggttataaaatacatcctgtgtgaaaagaaaaagtaatcacccattggaagccccatctgttcacaggtagcacacaccattatgtaagtgagacatctggttttgtttaatgttgattgaaggcctgtaaacagattggttcatagcttataaatctataaaactgatcaaactctggctggctccacagcaacaaggtctcactgagataggaagagagtgtggattttcaacacggtaagatgttttaaaaagggtgaggattttgttttcctattctagtctcttgggagctcatcccacatttccttcagactaaccccaccattaatagtataatcactgggcrtttggtactagggctaggcaaac

SEQ ID NO: 689395 - DNA, 589 bp, Homo sapiens
catttttttaaaagcggaaagtaaaatacaaagaaaaccttaggacacatcctttatcagggtgcttttacacatgtgctcatattccactgaatcacgtcatccttaccagtggacagacacacccaccaccaacaatagtgaacactggtgttgaagcaagtctctttcactgaaagttcctccagtggtctgtctccttggaagtcttctctctcctctattacaagggctaactacatgtaagtgctgactaggtgtggctgagcgaaggaaaaatagctggagctcattgaaataatattaccaagatattttccaagtgtgaaaatctcccagtgggtggtttggggcagccagtgataacagccctattccctgtttgtgtaaaacacagtaaagtgggacytaacagtcagcagagagaagtttcccttttaatcctatgatgctgatcatggagaatggggctcctgcgtgaaagctggacatgtcgattagacccatgaacagcctattccagggcaagctggaatctgcagcacagatactgcctcctggatcacgttctcgcccttgtcgggaagca

SEQ ID NO: 689396 - DNA, 660 bp, Homo sapiens
tatgtttattatttattttattttattaattttaatttcattttattttagatgaggtctttctctgtcatccaggttttagtgcaatggcattatcatagctcactgcagcctccaactcctgggctcaagcaatcttcctgcttcagcctcttaagtacctggaataacagtcctgagcagaatatctgcagtgcccrgcagaatttaatttttttaaggaaataattttaaaatatctttgcaagcacagtcttaatgtgcttgatgtcttattctttacagaactggatggacaaagtcatgagtgagagtcaggttactcacaagccttcagcaaaacactcaagcagcaagatttcccctttgaggatggtaattgaagactcactgccactctcagtgggaggcaacagcagtttgggttttctttgcttgatggaatttgctacaaaatagaaaagaaaagtcagaattttttcaaattaatatacataaaattctgtgacaccacatctttcttaaaacaaaaaatccgacacacgagtgtgtgtgtgtgtgtgtgtgtgttctataacacatttcacatatttccatttaaatagactcctcttctctcttaccatgaagcatgggttgtccctcatatgtttttactga

SEQ ID NO: 689397 - DNA, 657 bp, Homo sapiens
catgggactttccatcctcccctggtccaccaacctggatcccccatgtgtctgcactggtgctggctctactgggatggacagaggagatcagctccgggcctcgccccagccccagggtgcccagacctgtgcttcccagaacagggctccagggcagcctgcacaagctgttacagcaactgaacaactgtggacaggaccagcccaatgctccacgtgaagctgctgaaagcctgaggagtgggagatggagggcagaggacaagggttcgagggtttaaagttgaggaagacttcccagatgaagcggctaagagccaggaaacagggaggaggaggaggaaaaggcagcctgaggaggggacaccaggctggaggccggaacctggaggagacaggatggaccaggaagaagaaaggaacatgagagaggcggagggcatttgtggggtttggagaaaacaggcttctctcccatctgctcccacctctccctcagccagcactcaaattcaggctctaggcaggggcctctggcacacccttccctcctagccccacagactcccccsagcaagggcgctgccaagctccctctcctcctgccccagccggtctgcaggaaggacacacggaggccagtgcacacgctct

SEQ ID NO: 689398 - DNA, 775 bp, Homo sapiens
tattgtcctggggtagtagtcacttctctggcattggcagtccttgtttgtaaaataaaactctagacttgatctcacaggcctctcccaactctgaaactttgttctaaagaagaaaatatattctcttaaaatttcgtgggctagtctataagggaaaaaagatgctttagcaatggtttggggtatatgatgtcatgaaagtaatattctttttactgtccaagtcagtaatttactgtgtagagaattggaaatggaccagaggcagtttcccagaataggtcattatttggtgttagtaattggtcattcacgcatctgcataccctttgtttccttaagtaactctcctttctggtaaccaccttaggtttgtcaaggtggaagtcatgtggtcaaatcaaatggaaacacaagtgtgttaggtattagattcattttcctgtccccaaagyacccgtttggtaatgctggcagaagacatacatgcggccaacaatcataggaaaaaaagctccacatcactgatcattagagaaatgcaaatcaaaaccacaatgagatcgtatcccatactaggcagaatggctattaaaaagtcaaaaaataacagatgctggcaagtttgtggagaaaaaggaacacttatacactgtcggtgggagtgtaaattagttcagctattgtggaagatagtgtggtgattcctcaaagacctaaagacagaaataccatttgacccagcagtcctattactgggtatatattcaaa

SEQ ID NO: 689399 - DNA, 775 bp, Homo sapiens
tattgtcctggggtagtagtcacttctctggcattggcagtccttgtttgtaaaataaaactctagacttgatctcacaggcctctcccaactctgaaactttgttctaaagaagaaaatatattctcttaaaatttcgtgggctagtctataagggaaaaaagatgctttagcaatggtttggggtatatgatgtcatgaaagtaatattctttttactgtccaagtcagtaatttactgtgtagagaattggaaatggaccagaggcagtttcccagaataggtcattatttggtgttagtaattggtcattcacgcatctgcataccctttgtttccttaagtaactctcctttctggtaaccaccttaggtttgtcaaggtggaagtcatgtggtcaaatcaaatggaaacacaagtgtgttaggtattagattcattttcctgtccccaaagtacccgtttggtaatgctggcagaagacatacatgcggccaacaatcataggaaaaaaagctccacatcactgatcattagagaaatgcaaatcaaaaccacaatgagatcgtatcccatactaggcagaatggctattaaaaagtcaaaaaataacagatgctggcaagtttgtggagaaaaaggaacacttatacactgtcggtgggagtgtaaattagttcagcyattgtggaagatagtgtggtgattcctcaaagacctaaagacagaaataccatttgacccagcagtcctattactgggtatatattcaaa

SEQ ID NO: 689400 - DNA, 1417 bp, Homo sapiens
cggataagcaaaaatgaaagaggatggcaagtcctagaatgttccttgatattctatctcccttctcgtatttgtcattagtgattagtggtttctgctttgaatagcacagtaattgcagcttgactttcttaggcwtggagaataattttcaccccaatagaaaataaacaccaacatttaatggatacacttactatgtatcaggtcctgtgctaggaacagaacataaatcacataatcagatccttagacaaaccaccatgattacgtcctctctacagataagaaaactgaacagaggccaagaaccttgctccatatcacacaactggaaacagctgatagaagaatcaaccactgatgcttagaaagtttggaagagcagaagcagaccctccaattacctcacacatttttcattttgatgataacacagagtttacttgacagcaaaattttctgtggttaacctaagtttttgtctttacatcctatatctaagttttcagaagtctggatatgagaagatgagagaccatgctggaaattttcatttagcccttgatatggtttttctgtgtccccacccaaatctcatcttgaattgtagctcccattattcccacatgttgtggcagggacctagtggcagataactgcataatgcaggcagtttcccccttactgttctcctggaggtaaataagtcttacaagatctgatggttttataaggaatttccccttatgcttgactctcattctctcgtctgccaccatgtaagatgtgcctttcaccttctgccatgattgtgaggcctccccagtcatgtggaattgtgagtccattagacctctttttctgtataaattaccctgtctcaggtatatctttaccagcagcatgaaaacagactaatacagcccttcagatccactccccactcttcatcctgctccgtgccccaacaggtgatctgtggagcctgcagcagtgcatctgctctttagcttcccagagaggttatccagcagaatgcacccacaggcaatcaggaaggagagagagaggtcagggtccgtattctccggatacccaccctgctgggccacctcaggttggtgtcctgtactaaaggtggaggatctagaggatcctagtaaatctcgatttctctctctctctctctctctctctttctgtctctcctcccagcccctaccaattcccctgttctccaatgtaataatttttttcctttaacctttccaggcctaaaaatttgcctaccatcagcctctttcaccctttgcttctttttctatgctcaaacatgtatagagtccttttacaccataaaatgcagcaataccacttctggtatacattcaaagggattgaaatcagtatgttg

SEQ ID NO: 689401 - DNA, 1417 bp, Homo sapiens
cggataagcaaaaatgaaagaggatggcaagtcctagaatgttccttgatattctatctcccttctcgtatttgtcattagtgattagtggtttctgctttgaatagcacagtaattgcagcttgactttcttaggcatggagaataattttcaccccaatagaaaataaacaccaacatttaatggatacacttactatgtatcaggtcctgtgctaggaacagaacataaatcacrtaatcagatccttagacaaaccaccatgattacgtcctctctacagataagaaaactgaacagaggccaagaaccttgctccatatcacacaactggaaacagctgatagaagaatcaaccactgatgcttagaaagtttggaagagcagaagcagaccctccaattacctcacacatttttcattttgatgataacacagagtttacttgacagcaaaattttctgtggttaacctaagtttttgtctttacatcctatatctaagttttcagaagtctggatatgagaagatgagagaccatgctggaaattttcatttagcccttgatatggtttttctgtgtccccacccaaatctcatcttgaattgtagctcccattattcccacatgttgtggcagggacctagtggcagataactgcataatgcaggcagtttcccccttactgttctcctggaggtaaataagtcttacaagatctgatggttttataaggaatttccccttatgcttgactctcattctctcgtctgccaccatgtaagatgtgcctttcaccttctgccatgattgtgaggcctccccagtcatgtggaattgtgagtccattagacctctttttctgtataaattaccctgtctcaggtatatctttaccagcagcatgaaaacagactaatacagcccttcagatccactccccactcttcatcctgctccgtgccccaacaggtgatctgtggagcctgcagcagtgcatctgctctttagcttcccagagaggttatccagcagaatgcacccacaggcaatcaggaaggagagagagaggtcagggtccgtattctccggatacccaccctgctgggccacctcaggttggtgtcctgtactaaaggtggaggatctagaggatcctagtaaatctcgatttctctctctctctctctctctctctttctgtctctcctcccagcccctaccaattcccctgttctccaatgtaataatttttttcctttaacctttccaggcctaaaaatttgcctaccatcagcctctttcaccctttgcttctttttctatgctcaaacatgtatagagtccttttacaccataaaatgcagcaataccacttctggtatacattcaaagggattgaaatcagtatgttg

SEQ ID NO: 689402 - DNA, 1417 bp, Homo sapiens
cggataagcaaaaatgaaagaggatggcaagtcctagaatgttccttgatattctatctcccttctcgtatttgtcattagtgattagtggtttctgctttgaatagcacagtaattgcagcttgactttcttaggcatggagaataattttcaccccaatagaaaataaacaccaacatttaatggatacacttactatgtatcaggtcctgtgctaggaacagaacataaatcacataatcagatccttagacaaaccacyatgattacgtcctctctacagataagaaaactgaacagaggccaagaaccttgctccatatcacacaactggaaacagctgatagaagaatcaaccactgatgcttagaaagtttggaagagcagaagcagaccctccaattacctcacacatttttcattttgatgataacacagagtttacttgacagcaaaattttctgtggttaacctaagtttttgtctttacatcctatatctaagttttcagaagtctggatatgagaagatgagagaccatgctggaaattttcatttagcccttgatatggtttttctgtgtccccacccaaatctcatcttgaattgtagctcccattattcccacatgttgtggcagggacctagtggcagataactgcataatgcaggcagtttcccccttactgttctcctggaggtaaataagtcttacaagatctgatggttttataaggaatttccccttatgcttgactctcattctctcgtctgccaccatgtaagatgtgcctttcaccttctgccatgattgtgaggcctccccagtcatgtggaattgtgagtccattagacctctttttctgtataaattaccctgtctcaggtatatctttaccagcagcatgaaaacagactaatacagcccttcagatccactccccactcttcatcctgctccgtgccccaacaggtgatctgtggagcctgcagcagtgcatctgctctttagcttcccagagaggttatccagcagaatgcacccacaggcaatcaggaaggagagagagaggtcagggtccgtattctccggatacccaccctgctgggccacctcaggttggtgtcctgtactaaaggtggaggatctagaggatcctagtaaatctcgatttctctctctctctctctctctctctttctgtctctcctcccagcccctaccaattcccctgttctccaatgtaataatttttttcctttaacctttccaggcctaaaaatttgcctaccatcagcctctttcaccctttgcttctttttctatgctcaaacatgtatagagtccttttacaccataaaatgcagcaataccacttctggtatacattcaaagggattgaaatcagtatgttg

SEQ ID NO: 689403 - DNA, 1417 bp, Homo sapiens
cggataagcaaaaatgaaagaggatggcaagtcctagaatgttccttgatattctatctcccttctcgtatttgtcattagtgattagtggtttctgctttgaatagcacagtaattgcagcttgactttcttaggcatggagaataattttcaccccaatagaaaataaacaccaacatttaatggatacacttactatgtatcaggtcctgtgctaggaacagaacataaatcacataatcagatccttagacaaaccaccatgattacgtcctctctacagataagaaaactgaacagaggccaagaaccttgctccatatcacacaactggaaacagctgatagaagaatcaaccactgatgcttagaaagtttggaagagcagaagcagaccctccaattacctcacacatttttcattttgatgataacacagagtttacttgacagcaaaattttctgtggttaacctaagtttttgtctttacatcctatatctaagttttcagaagtctggatatgagaagatgagagaccatgctggaaattttcatttagcccttgatatggtttttctgtgtccccacccaaatctcatcttgaattgtagctcccattattcccacatgttgtggcagggacctagtggcagataactgcataatgcaggcagtttcccccttactgttctcctggaggtaaataagtcttacaagatctgatggttttataaggaatttccccttatgcttgactctcattctctcgtctgccaccatgtaagatgtgcctttcaccttctgccatgattgtgaggcctccccagtcatgtggaattgtgagtccattagacctctttttctgtataaattaccctgtctcaggtatatctttacsagcagcatgaaaacagactaatacagcccttcagatccactccccactcttcatcctgctccgtgccccaacaggtgatctgtggagcctgcagcagtgcatctgctctttagcttcccagagaggttatccagcagaatgcacccacaggcaatcaggaaggagagagagaggtcagggtccgtattctccggatacccaccctgctgggccacctcaggttggtgtcctgtactaaaggtggaggatctagaggatcctagtaaatctcgatttctctctctctctctctctctctctttctgtctctcctcccagcccctaccaattcccctgttctccaatgtaataatttttttcctttaacctttccaggcctaaaaatttgcctaccatcagcctctttcaccctttgcttctttttctatgctcaaacatgtatagagtccttttacaccataaaatgcagcaataccacttctggtatacattcaaagggattgaaatcagtatgttg

SEQ ID NO: 689404 - DNA, 619 bp, Homo sapiens
ttccagccttcatgttctttgaccccagaagtatcttggaatgtttccctaattgctgtgatggcaacacagcagagctagggaaatcaaagacctaggctatgccccttcatgtttgtgcattatggtgaatgagctctgaaagtgccagggaattttgccaccaagtcttcacattaacttttcagcaatattcctcagtttaggagggaggcctatccactccttgtcctttgaaaagtgatcatttgcttgattgctctcaacagaagtcttcccatagcctctgatattttcttttcatttcttctgagttgtttatttttaattacttaacatttttgaygataccttttccgaatgcatctcaaacttagggctaaaaagccaaatgcttcaactttgttttcccatctcttaggcaaacagccaaaataagttccatagttgagcgaggtttttccataactctggaattatacaagtagttcccatttcagggcgtggttgccatccttttctacatttcttagcatggctaaattctctttattctttatggtttagacgatcccctgagaaggtcccaaaatgccgtgtgttaactttatatgctgct

SEQ ID NO: 689405 - DNA, 619 bp, Homo sapiens
ttccagccttcatgttctttgaccccagaagtatcttggaatgtttccctaattgctgtgatggcaacacagcagagctagggaaatcaaagacctaggctatgccccttcatgtttgtgcattatggtgaatgagctctgaaagtgccagggaattttgccaccaagtcttcacattaacttttcagcaatattcctcagtttaggagggaggcctatccactccttgtcctttgaaaagtgatcatttgcttgattgctctcaacagaagtcttcccatagcctctgatattttcttttcatttcttctgagttgtttatttttaattacttaacatttttgacgataccttttccgaatgcatctcaaacttagggctaaaaagccaaatgcttcaactttgttttcccatctcttaggcaaacagccaaaataagttccatagttgagmgaggtttttccataactctggaattatacaagtagttcccatttcagggcgtggttgccatccttttctacatttcttagcatggctaaattctctttattctttatggtttagacgatcccctgagaaggtcccaaaatgccgtgtgttaactttatatgctgct

SEQ ID NO: 689406 - DNA, 647 bp, Homo sapiens
aaaaagactatataaattgaagttgaactcaggtttctctaataacaaagttctctccactatttcaagctgcttctctacaacatattatataaacataaacagtgttaaagctgttaggaacaaaatgctaaataatctgaattttttagatgtcttttcttgtttaacagtgaatgtattgagaataaaagtaaataaatgatgtgaaattctcgataaattcacatcacaatcacttacctaatttcaaattatttatgcaaatgcctctgcmttaaatcaaaacatgaaatgcaagacagtctgttgaaaaacagagttagctaaaaataaatgaaagaataatagattactcacattagtgtaaaactggtaatttaggccctttggcacatttttcagaaagtgccctttaaactttgttaattgcaaaataactagattgcccacctgccatcatgacagaggcttcttgttgcttttaattctggagaaggagggaaaagatgcagctggcccaccagtatttttggctgagattcaagctgacctgctctgctctgccctttgcagtttgttcatggagataaaacttcaccaaaatccaccctcaaagttaacagatttcatttgcagcaaggtac

SEQ ID NO: 689407 - DNA, 647 bp, Homo sapiens
aaaaagactatataaattgaagttgaactcaggtttctctaataacaaagttctctccactatttcaagctgcttctctacaacatattatataaacataaacagtgttaaagctgttaggaacaaaatgctaaataatctgaattttttagatgtcttttcttgtttaacagtgaatgtattgagaataaaagtaaataaatgatgtgaaattctcgataaattcacatcacaatcacttacctaatttcaaattatttatgcaaatgcctctgccttaaatcaaaacatgaaatgcaagacagtctgttgaaaaacagagttagctaaaaataaatsaaagaataatagattactcacattagtgtaaaactggtaatttaggccctttggcacatttttcagaaagtgccctttaaactttgttaattgcaaaataactagattgcccacctgccatcatgacagaggcttcttgttgcttttaattctggagaaggagggaaaagatgcagctggcccaccagtatttttggctgagattcaagctgacctgctctgctctgccctttgcagtttgttcatggagataaaacttcaccaaaatccaccctcaaagttaacagatttcatttgcagcaaggtac

SEQ ID NO: 689408 - DNA, 647 bp, Homo sapiens
aaaaagactatataaattgaagttgaactcaggtttctctaataacaaagttctctccactatttcaagctgcttctctacaacatattatataaacataaacagtgttaaagctgttaggaacaaaatgctaaataatctgaattttttagatgtcttttcttgtttaacagtgaatgtattgagaataaaagtaaataaatgatgtgaaattctcgataaattcacatcacaatcacttacctaatttcaaattatttatgcaaatgcctctgccttaaatcaaaacatgaaatgcaagacagtctgttgaaaaacagagttagctaaaaataaatgaaagaataatagattactcacattagtgtaaaactggtaatttaggcccwttggcacatttttcagaaagtgccctttaaactttgttaattgcaaaataactagattgcccacctgccatcatgacagaggcttcttgttgcttttaattctggagaaggagggaaaagatgcagctggcccaccagtatttttggctgagattcaagctgacctgctctgctctgccctttgcagtttgttcatggagataaaacttcaccaaaatccaccctcaaagttaacagatttcatttgcagcaaggtac

SEQ ID NO: 689409 - DNA, 1625 bp, Homo sapiens
tcaaatgtggcattatgttttaattcatataatggctcaatggagtttccattatttactcaatttttagcagatgaatatgatgttagtaagattaagtgacttgcacaaggttacatagctcatatttactaaaactcaaaatttatgccttattttccaactctctgttgagtattgcattcattacaccataaytgtggttatttctgacacagagaatttcctatattttgacatatatgtattttccaaaaccttaccaacatctatttatcatagaaatgtaagtttactcctgtctagaaagtaaaatagaaatgaaacaaatgaaaacagacagaaataatccagggcttttgaacttttttttttctcccagatgaagtaattacttctacaatggtacaaatatttaagtaagccatctggtgagataatctcatgaaaataactctcagatttatgtacgaatgtcctcaaaatttggggagggctaataaagtaataatctatgtcttacatcctagaaaaatcacttgaggaacactcttgttttagttgccctctgttgtgagtctttcatcaaaatagaccaatataagtgctgaaaactccccagtgacagaaacgagagtagatgaaattaagaagccagtaaccataaatgcttttgatttacttgtcaataaatatcaatggttttatctggctaagagagacactgtaaaattaatttgcgtttacaaaacagaaggtaaccaatataactcagctttctcttctgttatacactaagtaaatttaagggtacttaaataaatttgaatataattttaaagtccttaacagttttcagatcttgtcctttatttgttctgacttcccctcctgttttattctctaaaatattaaagtataataagatttgaatgtagagaatgcatatgtttctcttccttgtcccccaccactgcctcctgccttgccacactccagggttgatgttctctagagtcagagacttttattttgttcatttgctcatctcagtgtctggcatttagtaggagactcagaaatgcctttcaaaatgagctttgcagagagactgaaagagactcaaagtcaggtatcactaagaccatcctccaggtgaaccaatctaataagaggtcctaccccgtttaataaagtaaccttgtccaggcatggtggctcatgcatgtaatcccaacactttgggaggccgaggcagacagattacttgaggtcaggaattccagaccagcctgacaaacctggcgaaaccccgtctctactaaaaatacaaaaattagccaggtgtaatggtgggcacccataattccagctactcgggaggctgacacgagaatcacttgaacccgggaggcagaggctgcagtgagctgaaattgcaccactgcactccagtctgggtgacagagcaagactccgtctcaaaataagtaaatgaataaatgaatgaattaatgaataaataaataataaagtaacctcttgtccacacgggcatatcttttgctctttggcaggctcctgctttccgacccctcatcaatatggccctatcgttgggaaca

SEQ ID NO: 689410 - DNA, 1625 bp, Homo sapiens
tcaaatgtggcattatgttttaattcatataatggctcaatggagtttccattatttactcaatttttagcagatgaatatgatgttagtaagattaagtgacttgcacaaggttacatagctcatatttactaaaactcaaaatttatgccttattttccaactctctgttgagtattgcattcattacaccataactgtggttatttctgacacagagaatttcctatattttgacatatatgtattttccaaaaccttaccaacatctatttatcatagaaatgtaagtttactcctgtctagaaagtaaaatagaaatgaaacaaatgaaaacagacagaaataatccagggcttttgaacttttttttttctcccagatgaagtaattacttctacaatggtacaaatatttaagtaagccatctggtgagataatctcatgaaaataactctcagatttatgtacgaatgtcctcaaaatttggggagggctaataaagtaataatctatgtcttacatcctagaaaaatcacttgaggaacactcttgttttagttgccctctgttgtgagtctttcatcaaaatagaccaatataagtgctgaaaactccccagtgacagaaacragagtagatgaaattaagaagccagtaaccataaatgcttttgatttacttgtcaataaatatcaatggttttatctggctaagagagacactgtaaaattaatttgcgtttacaaaacagaaggtaaccaatataactcagctttctcttctgttatacactaagtaaatttaagggtacttaaataaatttgaatataattttaaagtccttaacagttttcagatcttgtcctttatttgttctgacttcccctcctgttttattctctaaaatattaaagtataataagatttgaatgtagagaatgcatatgtttctcttccttgtcccccaccactgcctcctgccttgccacactccagggttgatgttctctagagtcagagacttttattttgttcatttgctcatctcagtgtctggcatttagtaggagactcagaaatgcctttcaaaatgagctttgcagagagactgaaagagactcaaagtcaggtatcactaagaccatcctccaggtgaaccaatctaataagaggtcctaccccgtttaataaagtaaccttgtccaggcatggtggctcatgcatgtaatcccaacactttgggaggccgaggcagacagattacttgaggtcaggaattccagaccagcctgacaaacctggcgaaaccccgtctctactaaaaatacaaaaattagccaggtgtaatggtgggcacccataattccagctactcgggaggctgacacgagaatcacttgaacccgggaggcagaggctgcagtgagctgaaattgcaccactgcactccagtctgggtgacagagcaagactccgtctcaaaataagtaaatgaataaatgaatgaattaatgaataaataaataataaagtaacctcttgtccacacgggcatatcttttgctctttggcaggctcctgctttccgacccctcatcaatatggccctatcgttgggaaca

SEQ ID NO: 689411 - DNA, 1625 bp, Homo sapiens
tcaaatgtggcattatgttttaattcatataatggctcaatggagtttccattatttactcaatttttagcagatgaatatgatgttagtaagattaagtgacttgcacaaggttacatagctcatatttactaaaactcaaaatttatgccttattttccaactctctgttgagtattgcattcattacaccataactgtggttatttctgacacagagaatttcctatattttgacatatatgtattttccaaaaccttaccaacatctatttatcatagaaatgtaagtttactcctgtctagaaagtaaaatagaaatgaaacaaatgaaaacagacagaaataatccagggcttttgaacttttttttttctcccagatgaagtaattacttctacaatggtacaaatatttaagtaagccatctggtgagataatctcatgaaaataactctcagatttatgtacgaatgtcctcaaaatttggggagggctaataaagtaataatctatgtcttacatcctagaaaaatcacttgaggaacactcttgttttagttgccctctgttgtgagtctttcatcaaaatagaccaatataagtgctgaaaactccccagtgacagaaacgagagtagatgaaattaagaagccagtaaccataaatgcttttgatttacttgtcaataaatatcaatggttttatctggctaagagagacactgtaaaattaatttgcgtttacaaaacagaaggtaaccaatataactcagctttctcttctgttatacactaagtaaatttaagggtacttaaataaatttgaatataattttaaagtccttaacagttttcagatcttgtcctttatttgttctgacttcccctcctgttttattctctaaaatattaaagtataataagatttgaatgtagagaatgcatatgtttctcttccttgtcccccaccactgcctcctgccttgccacactccagggttgatgttctctagagtcagagacttttattttgttcatttgctcatctcagtgtctggcatttagtaggagactcagaaatgcctttcaaaatgagctttgcagagagactgaaagagactcaaagtcaggtatcactaagaccatcctccaggtgaaccaatctaataagaggtcctaccccgtttaataaagtaaccttgtccaggcatggtggctcatgcatgtaatcccaacactttgggaggccgaggcagacagattacttgaggtcaggaattccagaccagcctgacaaacctggcgaaaccccgtctctactaaaaatacaaaaattagccaggtgtaatgrtgggcacccataattccagctactcgggaggctgacacgagaatcacttgaacccgggaggcagaggctgcagtgagctgaaattgcaccactgcactccagtctgggtgacagagcaagactccgtctcaaaataagtaaatgaataaatgaatgaattaatgaataaataaataataaagtaacctcttgtccacacgggcatatcttttgctctttggcaggctcctgctttccgacccctcatcaatatggccctatcgttgggaaca

SEQ ID NO: 689412 - DNA, 2163 bp, Homo sapiens
ccctttcaaacatcagcttctactgcctggctatcctatctgttagttggtctatcagactacaaactatgaaatcattcttaattctttctttttatgcattacttagccctagacaaaatatggtaccaaacaccatgatttctttgtagaagtggctttatgattaactctttctttgctttctgttgtctgtgacctatttaaagttcttgtcatgtcacaattggatttttttcagtagcttctcaatggatctctctcacacaccatttttgcctccagtcacccttatgaacctttgccagaaaaatatttttaaatattattttcattctataactttcatgcttgagacataaactatctgcattgcctagtgtattactaggttgcaactctgtctgtcttggggacttctctttattttagtgctttctcccattgttcacccatatgggccctatgattcagaaaaatctaatgacaaccaaaaacatactttatgtccatatctgtcactccactccctataaagctctgtcccatatctagaatatcctctcatatagtgaagtatttcttcttttctacccgttctttgtggcctaactaaagttctaacctctccctagaattatttcttcccttatattttttcttacttctattagaaagacaggatgctatcactgtaagttatggaaattaaaatcaagcaaaaagaatctacttgtttatgtaattgtgaaaaaacagggatatagtaggggccactaaaaaaatataaccagggattttatactgacagatttacctccttacacctattaatttcccctcttttttatagaggcattgttctctcttttcatttcttcatgaggttggaaccatgactaatgactgctgttggctcacatttttgaagagaataaaaatatttttcaaggaataaagtgattctctattagcttgagtttgaaaaacataagcaaaaggcccgatgagcagtttaggtaacatctcagtcctttaagccaataactgaggttgggggttgaagagttataaatctaaaataaaattatactttattaatataaattattataacacttttaaaaatttatgccttacaatttattaagtaaagtggatcatgtacacacatcaaataaacagagaaacagggatctatttccaggaaaagggattatgaacagtcattgcattgctggagttcttggaaactggacaggtaccattttttgwatcaataataatgagtttttaattaaaattaaagcacatccatgattatttccttttttccatagctacctacacaatttcataaactcatgacccagtgtaatcctgagtccttgaaatgtttctaaaagtgattcaccctttcagtgaaataggaatagataggacttccatttccaggatttttcttagccagaagtgtcccctggaggcttgggcagaattacagatatcttgagattaaaggaaaaaaaggagccacattggctgcttccatctgcttcagagcaaaacttgctattcctgtgtgttaggtaatcccaagtggtttttacattctggtatctcaaaggtatgattaaaggattagtgtggaaggaaaacagcagacattagtgcagcagagttgaaaaaagccaatactttggtactatcgtgggatttcatcagcagcaaaatgaggacaggagaattagaccataagtgattttgttaaaacactaggggaatccaatcaaggtgctttagctattaagatccctgattacaggggttatatctgttccaatttgctttgtgaggtgcccacataggcaatagagacaaggaccatgtttttaagaagtactaagacgctgttactttggaaaaactactgaatactcagtgcatatctaatgagcagttttagttttaaatttctagaaagaatgcttggcaatagttgaattaacatttgccaggtatctaactgagaatataagttaggagccataggtattagtgaaacatggagaatagatggttttcattcaggaatgtgtcatagttgtgacaaacaccaacaactaagaagttagtagcaaaataagaactcataaaaatgtg

SEQ ID NO: 689413 - DNA, 1261 bp, Homo sapiens
aagtagaatgctcacttgcccactgctcacttcctgctgtgttgcctggttcctaacaggccacagacctgtactggcccttggcctggcggttggggacccctgctctaaataatttaccagtacctacatatgggtatgtgtgtgtgtgtagacgggtatgcatatgtatatggcaaactgaggtttcttaactaccatcatcttttatgagtcatatttcatattgcatgttcattttcagagtaacatatactacatgcatagtcatatttataaatctaaacatgttttaattttagatatataacacagatgagttaatatttatgagctcatgtgcaaaacttcactaagcacgaagtttgcaactaagtaccctgcacatttcttagtgccttggtctgccgtgttttcttttttttagtttttcatgtgcaagtctttatttttattacctatctgatggctatttaacttatgctaaggatcatctcagttatttcagttaacaggataaaatcaactacactggatcctgaacttttttttttttgagttaaggtttgttattttcttaagtactgctgaattttttctttgttgatgtatattgtttttgygaacacccctcaaataagattgaaacagttttgctatttcatccatattatcagttgccttcagtttttcctctaggggtactatatttacattagcccaatctgctcagaaataccagagacagtctttactttccttacttgccactctaccatcttcattatattgagaaatgagttatgtcttaaatcagcaaatcaacattttctatgacttttatcaagatgagggaatagatatttgacatacagtgtgggtgtctcttgtaaaagaaattgacaacacaaatcacaagtgggatgcaactaatgctagagagctgctttatgttttaaatatgaataaatctctcaaaatatgaaagtggaaagacaagctggactcaaatgattacagcttttagaattaaaataaattagggcaaatactggctctaaccacaagagagattatcactgtttgcctatttctgaaggaaccctcaaggaaattaaggtggcttgggttttagtgcaaataacactacatgttttctttaatatttccatttctccttaattcatttcacctgttaacacaaggcatgcccaaacattactctaaacattaaccaaactccatgttctaagtaagaaat

SEQ ID NO: 689414 - DNA, 599 bp, Homo sapiens
ctgagtgtaacgtagatttcttgaaaaaaaaaaaaaaaaagttstgcccttgttttattttgttttgaggcagagtcttgctatgttgctaggctggagtgcagtggctattcacaggtgtgattatagcacactacagcctcaaactcaaggctttgagccatcttccaccagctgccttaacccagttttgaggccctgtccaaaagccagacagttcccttctaggacagtcaattaaggccataccccaaccacctgctgtatcagactctcatgctccaggccactatatacccaccctaattaccccagggccaagtactctacaaccaaggacagcctctatactccagagccactgaaatcattcaaattagccactcctatgtctgcatgccctgccttaccctctccttcccacagaaaccacaatagtgcccacagttccctcatattcctctgcatcatgactgaccaaggtgcatcccccaagtggttcttcatggggtgctatgttctcccagggagctgtatttcttctcttgatttgcatctgctctcgtcaaacctcatccatggtaatagagttaaaacac

SEQ ID NO: 689415 - DNA, 599 bp, Homo sapiens
ctgagtgtaacgtagatttcttgaaaaaaaaaaaaaaaaagttgtgcccttgttttattttgttttgaggcagrgtcttgctatgttgctaggctggagtgcagtggctattcacaggtgtgattatagcacactacagcctcaaactcaaggctttgagccatcttccaccagctgccttaacccagttttgaggccctgtccaaaagccagacagttcccttctaggacagtcaattaaggccataccccaaccacctgctgtatcagactctcatgctccaggccactatatacccaccctaattaccccagggccaagtactctacaaccaaggacagcctctatactccagagccactgaaatcattcaaattagccactcctatgtctgcatgccctgccttaccctctccttcccacagaaaccacaatagtgcccacagttccctcatattcctctgcatcatgactgaccaaggtgcatcccccaagtggttcttcatggggtgctatgttctcccagggagctgtatttcttctcttgatttgcatctgctctcgtcaaacctcatccatggtaatagagttaaaacac

SEQ ID NO: 689416 - DNA, 599 bp, Homo sapiens
ctgagtgtaacgtagatttcttgaaaaaaaaaaaaaaaaagttgtgcccttgttttattttgttttgaggcagagtcttgctatgttgctaggctggagtgcagtggctattcacaggtgtgattatagcacactacagcctcaaactcaaggctttgagccatcttccaccagctgccttaacccagttttgaggccctgtccaaaagccagacagttcccttctaggacagtcaattaaggccataccccaaccacctgctgtatcagrctctcatgctccaggccactatatacccaccctaattaccccagggccaagtactctacaaccaaggacagcctctatactccagagccactgaaatcattcaaattagccactcctatgtctgcatgccctgccttaccctctccttcccacagaaaccacaatagtgcccacagttccctcatattcctctgcatcatgactgaccaaggtgcatcccccaagtggttcttcatggggtgctatgttctcccagggagctgtatttcttctcttgatttgcatctgctctcgtcaaacctcatccatggtaatagagttaaaacac

SEQ ID NO: 689417 - DNA, 599 bp, Homo sapiens
ctgagtgtaacgtagatttcttgaaaaaaaaaaaaaaaaagttgtgcccttgttttattttgttttgaggcagagtcttgctatgttgctaggctggagtgcagtggctattcacaggtgtgattatagcacactacagcctcaaactcaaggctttgagccatcttccaccagctgccttaacccagttttgaggccctgtccaaaagccagacagttcccttctaggacagtcaattaaggccataccccaaccacctgctgtatcagactctcatgctccaggccactatatacccaccctaattaccccagggccaagtactctacaaccaaggacagcctctatactccagagccactgaaatcattcaaattagccactcctatgtctgcatgccctgccttaccctctccttcccacagaaaccacaatagtgcccacagttccytcatattcctctgcatcatgactgaccaaggtgcatcccccaagtggttcttcatggggtgctatgttctcccagggagctgtatttcttctcttgatttgcatctgctctcgtcaaacctcatccatggtaatagagttaaaacac

SEQ ID NO: 689418 - DNA, 1239 bp, Homo sapiens
caattatttaatcatgttaaacattatttgcaagaaacttacaaaaatttcaccagataatattccaccaaacctgtgggggaagtgccccatgagataatatcccaggtccccaagtcctctaccattcctggagtgtatatggttccccaggagagtgcaggaaggacttggtgcctctacttctacagccttgagaccttcttttataatagtattggtccgcccccatggagtcagtttgtggctggaagtacagtttgcacgattagtgtgcggaacacagygtgggctgaacaggctggagggaaaaggctgcttcttggggaccaatttttagaagaaagtgcctcctctgtctctgtctcagcccttaccaattcttcttgccagctgtggtgtctgtgtttgcccactccagggggattacacattcattttatgtggcacaagaggctgagaagaaaaattgctggcaaatgagacacctgtgacatttggggtaaacacaattacataaagccctggtttatgggcttgtgtcatcactatgggaggatcaccttctccctcctccaatggatgggagacctggctataagcagcagaaggggactttataggctgttagacaggcttgacatgggctctgggggtcttccagtcaggatttgcctacccacgcaaagtgcaaaagagaaataaagcatttaaccagaaaattaagacccaaccaagtcacaagaagttgattgtagcaaaagcaatgtacattggttttttctaataactgttgacacataaatctttaattgctaataatgtattgcttatgcactctgctataccatatatatatatacatatatacatacataatctcatttatgcctcacaataatgctccaaggaaggcatttcttatactggttttacaaatgagaagctgaagctgagagtgaagacacggtttgcccaagttattacatacaggaagatagcagaccagaaattcagatcaggtcgagtcaactacaaaacccatgttctggaaccactaaggtatggactcttcctgttctgcatatcttccttgtgttcctccagatcgattctccacccttctctgcccctctttttgtcctaggaggatgatctgcatggattatttttataagttccattttctctggcttcttgttaaatgtgaccaatagaggtcactggcagggttggagg

SEQ ID NO: 689419 - DNA, 636 bp, Homo sapiens
ttttgaatgcttactaatacactttaattaatttgcacccccatacacatagtcaatgggktatacatcttgttttatgaacatcgtatagcagaggacactgaaatacagattttaagtacatttcctaatcatagcatgaagggaaatatagctgaatttgaactcaagtaattggactccagagccctacctagaaactaatctgaaaggcagtgggttgaattagtaataacagcctttagaggaaaatttaatttttttctgtttattgccaccaatcttggttgtttcctgatgggaattggaagggcacttttggaatgcataactgttctcttatagggtcaatcaaccaatgtataagtattttagaagctataagtatgtatgttggattaatcttgctgagagataaaatcagtagtcttgatattataaattttactatttatcctgttgactgcttgcacacaatcccaatagcttattggtagtaacttctcattttgctaacacaaaatattgaatcctacactatggacactgttgtacaatatagcatgactcttgctagtgagtgagtgagcctaaatttctatccaatttaggttcagcttgactgttttctattca

SEQ ID NO: 689420 - DNA, 1075 bp, Homo sapiens
tactaaaaataaataaaaacactcaatgcaatatattaatgaaacagcaacatgaataaccatgtaaatttggtcttcagcattcacatttaccaggtttactgatactagtgctgtaatgaaactattttgaacctaagtttgttaaaaatagaaatacaaccagagggtcagactcaagtttgcaaacagcaatccccagaaataaacatctttaaatgatttagcagaaaagaattaactttgaatatatttcctatgggtccagaacattgtactatgggttatacaatgtcataggttatgatcctaggaatagcataatgaaagcatatatattgttttgggaaacaactgagcatagaggaaacagagacataatttagagtaacaatgtataaaacatgtgttttgcaaattataaatgccagaaaagttcaaagggagagacatagttactatctcctgtaatcatatatttctttagctaaatataaaattagatttggtttcctaggtacatatcaactgtacctaggtgggggaggccaataataattctagaatttgagagttgtgaagggttttggggatcatcaatttacaccctctcacttttacagataatagagatctagagaaaatatataactagcaaggagcaggataaagacttaaatgcagtttctctgactttaatcaggtgactgggtgttaaaaaggaggggaaaagtcacttggagatttaaaaacatgttttttttaatctactattatctacttttttatctatttttaaaaaatatacaaagtaaataatctatagatagagaatatgttgacaatgttttagtacttcttattgaacagtatatgaaaayatcattagatttaaccttaagtaattgtcctattctaactgcttattattttaactgataccattacacatatgttcagtacatactccgaggggaaagcgatttccctattcttgatgttttgtttttgcagtggatgctcaagtagttttattcctggcttttctgcttcattacccatccactacaagata

SEQ ID NO: 689421 - DNA, 1742 bp, Homo sapiens
tttactcctttatgtgagaccatgtcacatatgtgtatatatttccacagaatgtagaaccctgctggttcttaactacattatagttaactaaaacagaaatctttatattaaaacaacagaaaagaattttctcaacttagataaaattttgatgtaaatccttaaatattctagttgttaatattgttaacaatagtcattagactgtcattagactgtcagatggttttctattttaattatgttccaagctaatctggtaggggttaaaaaaacctatgctaaattgtttggaaggatgttttagtatgatttctttaaaactttaaaatatccctaacaacatgaaaatatagaaaatcaattcccattcaggtttttttaaatcatgatttgagaagaaattgttatttgtaactacaccatcatttcacccaagacaaatcaagatgggactgtgggataagaaagagatctctaaaagagagtcagcactacactaaattaaggatcacaagagctgagtaggatacttttaataattatgactaaacagtcttgttactgtgggcaaaatatcctcttaggctaccaaccccttattaattacgaggagtttgaatatatcgttattgtaaggttcctttcaatttaaagatttttattatggaattagataaactaccattaagtgtcattttgctttatgtttggtgcttttcaatttgtggataagttgctctactgaacccaaggtggaggtcccattacgaggtctgaaattgcctttctgttgaaattgtggactttattttctgattagacctttagagtaagattttgtatccatgacattggttgaaaatgtatattttgtgagatactattaattagccaaaatgaatcacaaaagagtgaagaactcacaatgatgaaagagatatctagaactttcctgggtggtttattctttgagttcagctaggaaaatggcattttctctttccagattttggaagggtattcgatttggagcactgtttatttttaattttaaaaggtaacgtgattgaccaataaactatttcctcagtgtttgacacctgtaacacatgaaactgaatagatgtggggaacaatgctgcagatgacagcaaagattacctttagggaggagacctttgactgtgggttgattaggattcattgttttcaatgttcacagttgagtctgtgtgtagatggggtggtggtagtgatgtcctctcacacttactttgagaggtatatagcatttccctattaactgattaatcatcatcttggggcagcattcttctccatatgaagaaaacttggaataatccattatctactgtatcattaatacatttatttgttctccccgttgtcctttgtcttttcttaatkatttagagttctataaaatattcctattttgtcacagaattgctttccgttttgggataggtcaatagaagttttattttggcacatttctgatggtgatcatttctattttgctaataaaaaatatatcgaatattaaatatatgccaagcattggcacaaatatttaatcctcacaattatctttaagttttcagcctccgttgtatatagtagaaaacacaggtacaaagaggaaaattcatatgactagaatagagtagctactaaatggttaggtagtggacctattatttgaccctggactt

SEQ ID NO: 689422 - DNA, 645 bp, Homo sapiens
tgtttcgtattcatggattagccaaatctaaatccaagacctgcaggtattgactttcagccaaaccgttgagtcatttaagtttggcagtgatttgaaatgtgaaaaaaaggatcatgagaaattggattgagaatctgaattcttttaagaaggggcttaaacagaagagtccttatctatgacagtgactttaggtttctacatatttgacatatgtctaattgtgtaacttctattgcatgttaattactcactaagccttctttctctcacctctgtctcctggggaaatgtaactgtgtttttgcttttttctcaccrctaaaattttgactgtatacaaagtaacaaaataaaaattgcttaattattcttattgtttttacttaatgttcatctctaattattagaaggtagtttgagttacttttctggcaaaacacaggacagagtacatgagaaataaatgtgccactgtcaaagaaaataaaaacttcactgtttagaggttttgagggaaaggattgtgtccttctggctcattgaaattgttacatgccattaggcttactgtaaactatcccttgataaattatttgctggacaatgagcttaagaatctgaggtgtcttcttgctttta

SEQ ID NO: 689423 - DNA, 1331 bp, Homo sapiens
aagggctgcaaccctggctctgtctctttccctctctcagctctgcttccctctagttggctttttcctgtggagcctcttggcttgcagtggtctgacagctccaggcctgcggtgaaagaggacttctagctcggtaggttgagctcaagtctggagactgactctcacttgtgtggctttgccttttgcccacatggtagtttagagcatgaactttggagccagtgagcatggttcaaagctgggtttgcctcgtaagagctgtgtgactttggataagtcacctaacctttctgggccttggtttccccatctgtaaaatgaggattatagtagcacatctatattgttgggctttgttgtaagggttaaaagagttaatgagtgaaaagttcatacaacagtgcctggcacatatctgatgttgactatgactcttaccgtgatcctccctgcagtggtcacagtggcttggagtgcagggctctgatagctggtctgggatcacatgctgtcttggagtggaggagggtgctgtgctccatgtgaaccttgaggtgggcatgagcaggaggtggttcctggaggaaaatggtcaggagacagttctcagaagacagagaataggaatggggtaggataagcccacagatgcccacaacagggcatgaaaggagggacaactagaagcagtctcagtttcaggtcctaccagaggtctaaaggcagatgcacaggccaggcrtggctggcaacttctgaggcaaacagaatggctggagatgggaggcccaggcaggtcagtggtctgaatgtctgtgtcccccagaatccatgtgtcaaaatcctcacccccaaggtgatgatatcaggaaatggggcctctggggggtgatcaggtcttgggtggagaccacctcagtaggattagtgtccttataaaagaggttacacagaggcctcctgtcctttctgccatgggaggttagagtgagcaggtggctctccataagaaggtgggtcctcagcagacaccgagcctgcggcaccttgatcttggacttcccagcccccagaactgtgaaaaatcagtttctgttgtttataagctacccagtccctggtatttttatagcagcatgaatggactaagatagtcaggacccagaagagaagtttattatttagtgtataaatgtttattgagcacctactgtgtgctggccagcaccctaggtcctgggatacagcagtgaactagacaggagcagtcactgctttcatggaaaccccataccagtgggagagagggacaataaacaagttaa

SEQ ID NO: 689424 - DNA, 614 bp, Homo sapiens
catgaccatttgttggagccacacctgggcaaacgctattgcaccgagagcccccctcctctccaccttgcttctggtttactgcagtttaataacaatgctccacaagtcaaccagcccaakaatctacctccatctctgcctgtgggtggaccccaggctgcgatgtgtagtctggtccacagtatacactgtctttcccagaggtgagcctggcatggtccccgtcgttcctgaaggccccagggagttggaaaggtgtggtcaatccccgacccccacctcccagggcatctctgaggaacctgtgaaaaatgcacattctcgggtttacccagacctcccaagcagaaaccctgaggtggggcccagccatctgggatttaaccagccttggcgatgctggtgtgcgctcctttagggaagtgctggcttcgtggaaacagcagcaccgggggctgatggacagagctaagaacatttgagacatgtgtttcctacttaatgcatacccagcgcctcctcagaggccgagtcgcttcctgctcagtgataatcattgccactcccccctcctttcccagccatctggggccttttccgccactccatga

SEQ ID NO: 689425 - DNA, 614 bp, Homo sapiens
catgaccatttgttggagccacacctgggcaaacgctattgcaccgagagcccccctcctctccaccttgcttctggtttactgcagtttaataacaatgctccacaagtcaaccagcccaagaatctacctccatctctgcctgtgggtggaccccaggctgcgatgtgtagtctggtccacagtatacactgtctttcccagaggtgagcctggcatggtccccgtcgttcctgaaggccccagggagttggaaaggtgtggtcaatccccgacccccacctcccagggcatctctgaggaacctgtgaaaaatgcacattctcgggtytacccagacctcccaagcagaaaccctgaggtggggcccagccatctgggatttaaccagccttggcgatgctggtgtgcgctcctttagggaagtgctggcttcgtggaaacagcagcaccgggggctgatggacagagctaagaacatttgagacatgtgtttcctacttaatgcatacccagcgcctcctcagaggccgagtcgcttcctgctcagtgataatcattgccactcccccctcctttcccagccatctggggccttttccgccactccatga

SEQ ID NO: 689426 - DNA, 1788 bp, Homo sapiens
ggaggcagacacagcccctgccctcgtagggtggtaggcaacatggaataccggggagctcccaggggtaggaggcgcaccctctgggggtcaggcctccaaccttcccctgctctgaaatcacagctgccagccccgctcccctgccagccagacccccagtgcgtgctgcatgtgaagctcatcctgcaaattgcccaccccaatggcacactcggctctggctcttgccagctgctgcttggcctccctgattcttggttttcctcatggtgaagggcccagccccttcctcggggacaggtgtggatggcatccaggcagcacggccagctcttccagtgactgaggatggtgatcatacagctttaaacacacctgccactcccccgaggctggtggagctagtggtctgtggtccacagaggtggaggggagagggtgatctattggtgcctcgggtgtgttggcgggggcggttaattaaaaaggtggctgggagatgaatttctggaaacacaaattggaaaccagtggaagctattgatctgcttaatgggaagctgatgatatctgagcaagcagacagctctggcttagggaggtggcgagagttcgatgcaggccccttccctgaactgacctgcctggggccagccggggacaygggccagggaggggctggggcagagccctggggccctggctctacttcagagcatgggagcaagctgcatccctgcgcagaagtcagagtcccttccgacatccagcccacaggttgaggtaggggggcaccaagcacctgatctgagcccctctctgccacctctgacggggctgagctggacaaggtgccaattgtcttcagctctcagttttctcatctggaaacttccgagctcccagggtggttgtaaggactaaatgcagtaatatgtgggccgtggcaggcacagccctcagcaccaggggtgcagccgtgaacgagctgtgctcagtacccgcctcctggagcttacattttagtggcaagcaagcaagtctgctgacagtggagtgccaggtagggcatccaagcagggaaggctgcacatgcaaaggcctggagggtgggacctgtggcctgcagttgacagtgggagcatgtgacgtgaggggagctccgtggttaccaataaatatcttcaaatccccaatccccacccgaccggggaaggacagtgctgtggagaaccatgggctcacacctgctcctttcctcctgccagacccccgtgaagcacaggttttcacgcctattactcagatgagcaaacagaagctcagagaaggaaaccatgggcccaaaccacacgggtgaggaaatccagcctctaatccagccccccaccaacaccaaccccggcagccccaacatggggctgggcccaggcctccgctccccagcccatcccagtctcaggctctaggatgggtgtttgttcgcatggaaggcagaggttatttattattattattattattttgagacaagttcttgctccatcacccaggctggagtcagtggctccatcactgactcctgggctccatcattgatctcctgggctcaagcaatccttccacctcagcctcctgagtagccaggactacagatgcacatcaccatgcctgactaatttttgcattttttgtagagacagggtctcgccacattgcccaggctggtctcaaactcctgggctcaagcgatccacttgcctcagcctcccaaagtgctgagat

SEQ ID NO: 689427 - DNA, 1788 bp, Homo sapiens
ggaggcagacacagcccctgccctcgtagggtggtaggcaacatggaataccggggagctcccaggggtaggaggcgcaccctctgggggtcaggcctccaaccttcccctgctctgaaatcacagctgccagccccgctcccctgccagccagacccccagtgcgtgctgcatgtgaagctcatcctgcaaattgcccaccccaatggcacactcggctctggctcttgccagctgctgcttggcctccctgattcttggttttcctcatggtgaagggcccagccccttcctcggggacaggtgtggatggcatccaggcagcacggccagctcttccagtgactgaggatggtgatcatacagctttaaacacacctgccactcccccgaggctggtggagctagtggtctgtggtccacagaggtggaggggagagggtgatctattggtgcctcgggtgtgttggcgggggcggttaattaaaaaggtggctgggagatgaatttctggaaacacaaattggaaaccagtggaagctattgatctgcttaatgggaagctgatgatatctgagcaagcagacagctctggcttagggaggtggcgagagttcgatgcaggccccttccctgaactgacctgcctggggccagccggggacatgggccagggaggggctggggcagagccctggggccctggctctacttcagagcatgggagcaagctgcatccctgcgcagaagtcagagtcccttccgacatccagcccacaggttgaggtaggggggcaccaagcacctgatctgagcccctctctgccacctctgacggggctgagctggacaaggtgccaattgtcttcagctctcagttttctcatctggaaacttccgasctcccagggtggttgtaaggactaaatgcagtaatatgtgggccgtggcaggcacagccctcagcaccaggggtgcagccgtgaacgagctgtgctcagtacccgcctcctggagcttacattttagtggcaagcaagcaagtctgctgacagtggagtgccaggtagggcatccaagcagggaaggctgcacatgcaaaggcctggagggtgggacctgtggcctgcagttgacagtgggagcatgtgacgtgaggggagctccgtggttaccaataaatatcttcaaatccccaatccccacccgaccggggaaggacagtgctgtggagaaccatgggctcacacctgctcctttcctcctgccagacccccgtgaagcacaggttttcacgcctattactcagatgagcaaacagaagctcagagaaggaaaccatgggcccaaaccacacgggtgaggaaatccagcctctaatccagccccccaccaacaccaaccccggcagccccaacatggggctgggcccaggcctccgctccccagcccatcccagtctcaggctctaggatgggtgtttgttcgcatggaaggcagaggttatttattattattattattattttgagacaagttcttgctccatcacccaggctggagtcagtggctccatcactgactcctgggctccatcattgatctcctgggctcaagcaatccttccacctcagcctcctgagtagccaggactacagatgcacatcaccatgcctgactaatttttgcattttttgtagagacagggtctcgccacattgcccaggctggtctcaaactcctgggctcaagcgatccacttgcctcagcctcccaaagtgctgagat

SEQ ID NO: 689428 - DNA, 1788 bp, Homo sapiens
ggaggcagacacagcccctgccctcgtagggtggtaggcaacatggaataccggggagctcccaggggtaggaggcgcaccctctgggggtcaggcctccaaccttcccctgctctgaaatcacagctgccagccccgctcccctgccagccagacccccagtgcgtgctgcatgtgaagctcatcctgcaaattgcccaccccaatggcacactcggctctggctcttgccagctgctgcttggcctccctgattcttggttttcctcatggtgaagggcccagccccttcctcggggacaggtgtggatggcatccaggcagcacggccagctcttccagtgactgaggatggtgatcatacagctttaaacacacctgccactcccccgaggctggtggagctagtggtctgtggtccacagaggtggaggggagagggtgatctattggtgcctcgggtgtgttggcgggggcggttaattaaaaaggtggctgggagatgaatttctggaaacacaaattggaaaccagtggaagctattgatctgcttaatgggaagctgatgatatctgagcaagcagacagctctggcttagggaggtggcgagagttcgatgcaggccccttccctgaactgacctgcctggggccagccggggacatgggccagggaggggctggggcagagccctggggccctggctctacttcagagcatgggagcaagctgcatccctgcgcagaagtcagagtcccttccgacatccagcccacaggttgaggtaggggggcaccaagcacctgatctgagcccctctctgccacctctgacggggctgagctggacaaggtgccaattgtcttcagctctcagttttctcatctggaaacttccgagctcccagggtggttgtaaggactaaatgcagtartatgtgggccgtggcaggcacagccctcagcaccaggggtgcagccgtgaacgagctgtgctcagtacccgcctcctggagcttacattttagtggcaagcaagcaagtctgctgacagtggagtgccaggtagggcatccaagcagggaaggctgcacatgcaaaggcctggagggtgggacctgtggcctgcagttgacagtgggagcatgtgacgtgaggggagctccgtggttaccaataaatatcttcaaatccccaatccccacccgaccggggaaggacagtgctgtggagaaccatgggctcacacctgctcctttcctcctgccagacccccgtgaagcacaggttttcacgcctattactcagatgagcaaacagaagctcagagaaggaaaccatgggcccaaaccacacgggtgaggaaatccagcctctaatccagccccccaccaacaccaaccccggcagccccaacatggggctgggcccaggcctccgctccccagcccatcccagtctcaggctctaggatgggtgtttgttcgcatggaaggcagaggttatttattattattattattattttgagacaagttcttgctccatcacccaggctggagtcagtggctccatcactgactcctgggctccatcattgatctcctgggctcaagcaatccttccacctcagcctcctgagtagccaggactacagatgcacatcaccatgcctgactaatttttgcattttttgtagagacagggtctcgccacattgcccaggctggtctcaaactcctgggctcaagcgatccacttgcctcagcctcccaaagtgctgagat

SEQ ID NO: 689429 - DNA, 492 bp, Homo sapiens
gcaaaacaggatatagattctgggctgcagttcatacacatctttaatgttctccctaggcaagatagtcaatgactctataactccaggcctaaggatggcaccacaggagccctgggaacataagccttcccttggctagagcagctccccsctgctcaagcacacccagcctgactttgtagaaagtaatttctttcccagatagaatcatcatactttctttataaaaataagtgaaatgagtgatgattgggaaccttgaaaagtataactttttaattaaatgctgtttttaaatatccatattcctaaaatctctcaaactgagtcctatagtgctctaggtaatttgcagccaaataaggtttggaaatgccttacattctgttcattcttggagagtcaaaaatgcatatctcatatactaaggacgttgagaagtcccgaagaaaaataaacttgttaaaatatgtttcgaaataatatttc

SEQ ID NO: 689430 - DNA, 492 bp, Homo sapiens
gcaaaacaggatatagattctgggctgcagttcatacacatctttaatgttctccctaggcaagatagtcaatgactctataactccaggcctaaggatggcaccacaggagccctgggaacataagccttcccttggctagagcagctcccccctgctcaagcacacccagcctgactttgtagaaagtaatttctttcccagatagaatcatcatactttctttataaaaataagtgaaatgagtgatgattgggaaccttgaaaagtataactttttaattaaatgctgtttttaaatatccatattcctaaaatctctcaaactgagtcctatagtgctctaggtaatttgcagccaaataaggtttggaaatgccttacattctgttcattcttggagagtcaaaaatgcatatctcatatactaaggacsttgagaagtcccgaagaaaaataaacttgttaaaatatgtttcgaaataatatttc

SEQ ID NO: 689431 - DNA, 645 bp, Homo sapiens
gagtcatctcctagatgctagaataacagaaaatgctgctttaaaaaggagatactcagtttatggtacttagtgccccaggaaagtataagawtcaagaatcaattaaatgaagtctttcactttttaaaaataggtaccgagcttttttaccccaagagaattaaatctttaaaacagaaccaggagtgatggggaagatagtgcattggttttctatactgtgtaacaataccactaatttcacagcttaaaacaatactcttcctctctcatggtttccatgggttgggagttcagacctggcttagctaggtcctctgctcaggggctcatagggtctgagccaggtgtcagctgggtatgaggtctcctctgagcctcaggtcctcttccaagctcacgtggttgttggcagattcatttccttgcagatgtagaactcatggtggctacttcttcaaggtcagcaggacagaaggaaatatgactcctgtctctcacttctatactgtcttttagagggctcacccatctaggtcaggctcccttgggaaaaggtcccttttgattaccttattggggatcttaatcacatctgaaaaatcctttcacctttggcataagacacaacagtattctggg

SEQ ID NO: 689432 - DNA, 595 bp, Homo sapiens
ggtttgagctgagaagtctgctgtaagtctgttgggattccctttgtaggtgacctcacctttctccctagctgcttttaacatttttttctttcattttgaccctggagaatctgatgattaagtgtcttggggatgatcttctcatggcatatcttactggggttctctggatttcctgaatttgaatgttggcctgtctggctgggttgggaatattctcatgaatgatattctgaaatatttttccaagttggttccattctcatctttcagatatattaatcagtaatagatttggtctctttacataatcccatatttctcaaagattttgttcattccttttcattcttttttcccccattcttgtctgcatgttttatttcaaaaagccagttttcaagctctgagattcttttttcttcttgttctattctgctagttggtcttgcacatgagatggggctggtctgacctcagcactccttagtctgcttgcctctcccagggccccagcctggccacacctgcttacagggyactcttgggtgcccacacacactaaaagaattttcataatgcaatcacacac

SEQ ID NO: 689433 - DNA, 629 bp, Homo sapiens
gaaaatatatttccaggatatttatgaatgaagagattcagataattgtgttttaaatattcatctggcaacacattaaaatcatgaagataccttgctgcttatttaaaatactcagatatggaatgacagtcaaactgttttctctccattctgaaggacacagcaagaatgtttgtgaatggacatgacttctctatttaagccctttctggttgcagtggctgcacttcagccttttcaaatttgtcttgttagtatggcaatacatatcaaactaccctttcacagcagctgytcttagtagctggcatcattgactagccgttttgcaacaaaacatcacatagtcaggaaaagctaaatccaactggatgatcaatacacatgatactggaaaaaaacaaatcaatgttttctttatcaggtttctgctttgtacttacaaatggatttttcaatcccaacagtatgagaggtcatctaatttaattaatagaaactaatatagcctctaatgaaaaaaatcagaaaacaggagacttgtcaataatttattttactttcaatagaaacacaaggaagataagtaaaattttaagtagcaagttgtgtgataagtatttaag

SEQ ID NO: 689434 - DNA, 804 bp, Homo sapiens
atttattaaaaatttttgctatataacctaattaccaagcctgattttttttagaaaaagtaatcagaaacaaaaccagaattaaaataaatatgtaaatagctaatttgatcatgtttaaaaagatataaaacccagaaagctaaatttagcataaaacctataagatacattaatcaaattagtaaattcagagttaaatcaacctagatctaaacagttaatattttgtttaatatgttattaaaagaagataataaatcaacatttaattgtcattattttctaaacagaaaatgtaatatgtagctaaaattgcaaggtatttatgaagttcagagtatgaaaactttaaattccttgtatatatatatatgtgtgtgtgtatatacgtgtatgtgtatatatatgcatatgtaattatatatatagatgtatttrtgtgtatgtaagtatggaactatatgaatggatttggagaataaataaatagggaacaaatataatggtgtagactatatgcatatatagatatacttatacaagtattttgtattttttatatgtataaactaagaaaatgtttcaaactatctaagaaaatgtttaaaagttaatggaagggaaaattttagactcttttcatgtttgaatggacacacatggatacacacacatacatatatttctggtcttaacatttgattgaggaattaaatttcagtttgaaatagttaacatttgattgaggacattgagttttagtttgaaatgcttgttcttagaatactgaagacattttcc

SEQ ID NO: 689435 - DNA, 669 bp, Homo sapiens
cacatcatgtgcttgtatcaaaatatcacatgcatgtacttcataaatatgaacagctatcatgttttcataagaatttaaaaattttacccaatttgtcttattttggtattctgagattttcaatttgttcttttttcatttgcagtatgaacgtaattgtcatttaggtccatgttaaagtatcaatataatttgtcatctgtgtttaagattactcattaaattttatagtacaggtgatctgaatattccattagtcacacaaaaatgtatgtagggcttatgacatagaataatttccattttctgtcttggataatcctgtttgcttgcaactgtgttgtgtccaactatccaacaatgaccttttccccttatgcttaagaatggtcttattgcatacatctaggcaacrtaattcttgtattctggtagagcacttaataatgagctgattttgctgtcatatgactttttgttctgtgtttattccttattacctccttcaggaaattttgatatgctgggtagagctacagtagtttttatataataaaaatatgaggaccacagtcaggtatgatggaacattagaaaaaccttaagaatgtgactatatctagcgaaagcacagatttgttgaagtccataatttactttacattc

SEQ ID NO: 689436 - DNA, 814 bp, Homo sapiens
aataccatgaacacaccttatttagataagtggaaagtggatcaaatkctacaagtgattctctacaaaccaacttaatctgttatgagaaagaaaatattgagcaataggaacattgaaggatttcttttacatatgtgcagaatttaaaattccatggaataaagtatcaaattcaatttaaaaattaattttaggtgacatgcatcatgtcaatgatattaagaagacaaattcacttttaaaaatagaataatcatgctttgtatttgcaggaaaataacacattattacctgtagagctttaaatgggtacttttgttccaaaaagcagaggccaatataaacattcctaaatatacactctttttttcttacatattttctttctcgattattctgagcgtatgtaaacaaatttaaatatatgtaatacagccaagtcaaaccagatatactgagtacctaatgttcatctacctgttcaagtaaacatgtaaatgagtatgtttatgttcctggatataagtaggaaaaaaagtagatagattttacatttcaagtatagttattgatttaaaggatgtttaatattttcagtacttgcagatttattcaaccattagagatttgtacatatttaatactttcaaatatgtaacatattcaatattgaatatttgaaatattaaacatgaaatgttatattatttcggcaaatacaaatgaaatatttatttaaaataagcatatcaatctctgatatttaatgcagttccatcttacctggttaatgagctctgagttgatttca

SEQ ID NO: 689437 - DNA, 814 bp, Homo sapiens
aataccatgaacacaccttatttagataagtggaaagtggatcaaatgctacaagtgattctctacaaaccaacttaatctgttatgagaaagaaaatattgagcaataggaacattgaaggatttcttttacrtatgtgcagaatttaaaattccatggaataaagtatcaaattcaatttaaaaattaattttaggtgacatgcatcatgtcaatgatattaagaagacaaattcacttttaaaaatagaataatcatgctttgtatttgcaggaaaataacacattattacctgtagagctttaaatgggtacttttgttccaaaaagcagaggccaatataaacattcctaaatatacactctttttttcttacatattttctttctcgattattctgagcgtatgtaaacaaatttaaatatatgtaatacagccaagtcaaaccagatatactgagtacctaatgttcatctacctgttcaagtaaacatgtaaatgagtatgtttatgttcctggatataagtaggaaaaaaagtagatagattttacatttcaagtatagttattgatttaaaggatgtttaatattttcagtacttgcagatttattcaaccattagagatttgtacatatttaatactttcaaatatgtaacatattcaatattgaatatttgaaatattaaacatgaaatgttatattatttcggcaaatacaaatgaaatatttatttaaaataagcatatcaatctctgatatttaatgcagttccatcttacctggttaatgagctctgagttgatttca

SEQ ID NO: 689438 - DNA, 814 bp, Homo sapiens
aataccatgaacacaccttatttagataagtggaaagtggatcaaatgctacaagtgattctctacaaaccaacttaatctgttatgagaaagaaaatattgagcaataggaacattgaaggatttcttttacatatgtgcagaatttaaaattccatggaataaagtatcaaattcaatttaaaaattaattttaggtgacatgcatcatgtcaatgatattaagaagacaaattcacttttaaaaatagaataatcatgctttgtatttgcaggaaaataacacattattacctgtagagctttaaatgggtacttttgttccaaaaagcagaggccaatataaacattcctaaatatacactctttttttcttacatattttctttctcgattattctgagcgtatgtaaacaaatttaaatatatgtaatacagccaagtcaaaccagatatactgagtacctaatgttcatctacctgttcaagtaaacatgtaaatgagtatgtttatgttcctggatataagtargaaaaaaagtagatagattttacatttcaagtatagttattgatttaaaggatgtttaatattttcagtacttgcagatttattcaaccattagagatttgtacatatttaatactttcaaatatgtaacatattcaatattgaatatttgaaatattaaacatgaaatgttatattatttcggcaaatacaaatgaaatatttatttaaaataagcatatcaatctctgatatttaatgcagttccatcttacctggttaatgagctctgagttgatttca

SEQ ID NO: 689439 - DNA, 814 bp, Homo sapiens
aataccatgaacacaccttatttagataagtggaaagtggatcaaatgctacaagtgattctctacaaaccaacttaatctgttatgagaaagaaaatattgagcaataggaacattgaaggatttcttttacatatgtgcagaatttaaaattccatggaataaagtatcaaattcaatttaaaaattaattttaggtgacatgcatcatgtcaatgatattaagaagacaaattcacttttaaaaatagaataatcatgctttgtatttgcaggaaaataacacattattacctgtagagctttaaatgggtacttttgttccaaaaagcagaggccaatataaacattcctaaatatacactctttttttcttacatattttctttctcgattattctgagcgtatgtaaacaaatttaaatatatgtaatacagccaagtcaaaccagatatactgagtacctaatgttcatctacctgttcaagtaaacatgtaaatgagtatgtttatgttcctggatataagtaggaaaaaaagtagatagattttacatttcaagtatagttattgatttaaaggatgtttaatattttcagtacttgcagatttattcaaccattagagatttgtacatatttaatactttcaaatatgtaacatattcaatattgaatatttgaaatattaaacatgaaatgttatattatttcggcaaatacaaatgaaatatttatttaaaataagcatatcaatctctgatatttaatgcagttccatcttacctggttaakgagctctgagttgatttca

SEQ ID NO: 689440 - DNA, 1409 bp, Homo sapiens
tgcttgtctttagggggtaactcaaatggtttatttaataactacaaactttattgcaaatatcattaactggtcaagatgttgaataaaataaactgttcaggtggctggtgtgtttgaagaaagtagctctgggaggagaacagcagaaactcccttgctgcaatgaacatgggaggaggtgcctgaggaccctaacgggattgataggggctccagtacaataatgggagatttgctatcacgtggagaggaggccacatctggatttagcacctcaagagtcaaagacaatttttccaattgaagtcactttaaaaataaactttgggctgggcgcaatggctcacgcctctaatcccagcactttgggaggccaaggtgggtggattacgaggtcaggagatcgagaccatcctggctaacacggtgaaaccccgtctctactaaaaatacaaaaaattagccgggcgtggtggcaggcgcctgtagtcccagctacttgggaggctgaggcaggagaatggcgtgaacctgggaggcggagcttgcaatgagccgagatcgtgccactgcactccagcctgggcgacagagcaactttctttaaaaaaataaaaattaaataaactctgaagatgatggagcgtttgctggcactgtggctcatgccttaatcctagcacttctggaggccaaggtgggaggattgtttgagcccaggagtttgagaccagccctagcaatggagtgagaccttttctctacaaaaaaattaaaaaaaaaaaaaaaaatcagctggaagtggtggcatacgcctgtggtcccagctacctgggaggccaaggtgggaggatagcttgagcccaggaagttgaggccacagtgagctatgattgcatcactgcactccagcctgggcgatagagtgagatcccgtctcaaaaaaagaaaaaaaagttcctggcattcatacggtgtgactttgaaaaacacctgcttttccttaattgcagtgtggggaggggggtggtgggaagcagaattgaaaaagctacaagatgcagatgagtggacagtggttttatcttatgacttaaagaatgctctgtcccattgaaatatgtgtcttaagtctttgtccaggcagcaacgagtggcttatttggtttcaagctaactttatttgttggcttctgtatttttcatctctaaagaaagtggagtatatttcttctgttggtttatgaggtataggaaaagaatgaaagcagggatgactccagaaatacgtgcttacccagcatggtggagttctgaggtggctgggcagggccaatgatttgcttttgaaatgattgtgctaagartcacacattgaatttacgattagttgttatttcttggca

SEQ ID NO: 689441 - DNA, 2362 bp, Homo sapiens
tcatggcagtggaacttgtgtgacaatttgcattctgacagctgccaaagttttctttggagaggaatctgacagaatgtttcagattgctgtttaagccagtcccatttttcaattgaaaaatgattagctgaattagcttaggatgtgaaacttcaagttttgcaaaagattgatataacacctctcttgtccctgttacgataacaaaggaaattgagtatggtcattcgtctaggcacaatgactcgagattctgttggaaaagaattgtggtttctgggaccttggagatcatcataaaacctttatatatatatacacagagagagagagagagagagagagasagagagagagagagagagacagagagagagagagagagagagacagagagagagagagagtctctctgtcacccaggctggaacgcagtggctcgatctcagatccctgcaaccttcacctcccggttcaagcaattctcatgcctcagtctcccaagtagctgggactaaaggcgcacgccaccactcctggctagttttttttgttgttgttttttggttttttttttttttttgtattttggtagacacggggtttcactgtgttgcccagactgatctcaaacccctgagctcagataatccacctgcgtcagcctcccaaagtgctaggattacaggcatgagccactgcacccagtcccttatgatatttttaacactgcatgaaaatttttaacactgcatgaaaattcttctaagcaagtttgctaaatagcaaaaaaaaaaaaaaaaacattcttaatggggttttgccatgctagtgctccagatgaactggggtttgctgatactgagtgaaaatcaaaggaaaaacactcatttctggtgtgtgctctgtcatggaccatcagtggtacctttcaaaactctgtccagaaatcgataagaaaacttcaactaaagataatcaatgaaatgaaaaactgtgtgtcaacccccagatgttttgctttgctctggatgaagatctgaatgccaatcagaaagtgctgctccactgggtactggagtttattggttgtcaaaggaaaataagcatttttacctgctggttgagacaggtatcctatgtttggaatactagagaaaagaaactcctcaaaagatcttccagcaaagcttatcatattagacaactatgttcaaaagtttgaatatgaactttgccttattaaaacatttagagctcaaatcaagtcacagatgtcaggaatcattactaaaatggtctatttatttgtttcaacataaaactttcaaacacaatgttcttaagataatttcacagaaaaataaacttttacctagtgcatgcttaggctgaattgggggactattttctagatatcatggctgaaaaatcctatttcagagcttatcaagaaatcctctttcctcctaatattctatctgtaccaggaaacaccaccaagaatttctttcttttttttgagaccaagtctcattctgtcgcccaggctagagtgcagtggcgcagtcttggctcactgcaagctccacctcccgggttcaagtgattctcctgactcagcctcccgagtagctgggattacaggcgtgcatcaccatgcctggctaatttttgcatttttagtagagacaaggtttcaccatgttggccaggctggtctcgaaccactgacctcaggtaatccacccgccttggcctcccaaagtgctaagattacaggcgtgagccactgtacccggcttggctttgacatttacaagtctataaaggaaatgggtccctagataaaactgtgtctacaaaaggaacagaaaaaggacagacgggcttcctagattacataactgagtcattgcatcaacctgcccggaaatctgcccacctctggacttctataatgggaaccaatgaatctcctttgtcatctaagacagtttaagttgggtttctaattacttgccacataaagaatctttgctaaatctgaatttggtgccaggaggtaagtgttgcaaatcataaacactaacaagctaaattgcccagagaacagtgaggatacctctagcccagttttgaaacgaggaattcttattacatgtttgcaaaatagttaattaaattgtcttcaattatatcttaagaaataggtcatttatccattatgatagtttgaggggatgttttaggaaatgtttagaatgtgttggctaattcttgtgatcttctgtaaggttttagaagaaaaacagcttgggtcacaggtaacccaagtagaatgggagatgataatccc

SEQ ID NO: 689442 - DNA, 2362 bp, Homo sapiens
tcatggcagtggaacttgtgtgacaatttgcattctgacagctgccaaagttttctttggagaggaatctgacagaatgtttcagattgctgtttaagccagtcccatttttcaattgaaaaatgattagctgaattagcttaggatgtgaaacttcaagttttgcaaaagattgatataacacctctcttgtccctgttacgataacaaaggaaattgagtatggtcattcgtctaggcacaatgactcgagattctgttggaaaagaattgtggtttctgggaccttggagatcatcataaaacctttatatatatatacacagagagagagagagagagagagagacagagagagagagagagagasagagagagagagagagagagagacagagagagagagagagtctctctgtcacccaggctggaacgcagtggctcgatctcagatccctgcaaccttcacctcccggttcaagcaattctcatgcctcagtctcccaagtagctgggactaaaggcgcacgccaccactcctggctagttttttttgttgttgttttttggttttttttttttttttgtattttggtagacacggggtttcactgtgttgcccagactgatctcaaacccctgagctcagataatccacctgcgtcagcctcccaaagtgctaggattacaggcatgagccactgcacccagtcccttatgatatttttaacactgcatgaaaatttttaacactgcatgaaaattcttctaagcaagtttgctaaatagcaaaaaaaaaaaaaaaaacattcttaatggggttttgccatgctagtgctccagatgaactggggtttgctgatactgagtgaaaatcaaaggaaaaacactcatttctggtgtgtgctctgtcatggaccatcagtggtacctttcaaaactctgtccagaaatcgataagaaaacttcaactaaagataatcaatgaaatgaaaaactgtgtgtcaacccccagatgttttgctttgctctggatgaagatctgaatgccaatcagaaagtgctgctccactgggtactggagtttattggttgtcaaaggaaaataagcatttttacctgctggttgagacaggtatcctatgtttggaatactagagaaaagaaactcctcaaaagatcttccagcaaagcttatcatattagacaactatgttcaaaagtttgaatatgaactttgccttattaaaacatttagagctcaaatcaagtcacagatgtcaggaatcattactaaaatggtctatttatttgtttcaacataaaactttcaaacacaatgttcttaagataatttcacagaaaaataaacttttacctagtgcatgcttaggctgaattgggggactattttctagatatcatggctgaaaaatcctatttcagagcttatcaagaaatcctctttcctcctaatattctatctgtaccaggaaacaccaccaagaatttctttcttttttttgagaccaagtctcattctgtcgcccaggctagagtgcagtggcgcagtcttggctcactgcaagctccacctcccgggttcaagtgattctcctgactcagcctcccgagtagctgggattacaggcgtgcatcaccatgcctggctaatttttgcatttttagtagagacaaggtttcaccatgttggccaggctggtctcgaaccactgacctcaggtaatccacccgccttggcctcccaaagtgctaagattacaggcgtgagccactgtacccggcttggctttgacatttacaagtctataaaggaaatgggtccctagataaaactgtgtctacaaaaggaacagaaaaaggacagacgggcttcctagattacataactgagtcattgcatcaacctgcccggaaatctgcccacctctggacttctataatgggaaccaatgaatctcctttgtcatctaagacagtttaagttgggtttctaattacttgccacataaagaatctttgctaaatctgaatttggtgccaggaggtaagtgttgcaaatcataaacactaacaagctaaattgcccagagaacagtgaggatacctctagcccagttttgaaacgaggaattcttattacatgtttgcaaaatagttaattaaattgtcttcaattatatcttaagaaataggtcatttatccattatgatagtttgaggggatgttttaggaaatgtttagaatgtgttggctaattcttgtgatcttctgtaaggttttagaagaaaaacagcttgggtcacaggtaacccaagtagaatgggagatgataatccc

SEQ ID NO: 689443 - DNA, 2362 bp, Homo sapiens
tcatggcagtggaacttgtgtgacaatttgcattctgacagctgccaaagttttctttggagaggaatctgacagaatgtttcagattgctgtttaagccagtcccatttttcaattgaaaaatgattagctgaattagcttaggatgtgaaacttcaagttttgcaaaagattgatataacacctctcttgtccctgttacgataacaaaggaaattgagtatggtcattcgtctaggcacaatgactcgagattctgttggaaaagaattgtggtttctgggaccttggagatcatcataaaacctttatatatatatacacagagagagagagagagagagagagacagagagagagagagagagacagagagagagagagagagagagacagagagagagagagagtctctctgtcacccaggctggaacgcagtggctcgatctcagatccctgcaaccttcacctcccggttcaagcaattctcatgcctcagtctcccaagtagctgggactamaggcgcacgccaccactcctggctagttttttttgttgttgttttttggttttttttttttttttgtattttggtagacacggggtttcactgtgttgcccagactgatctcaaacccctgagctcagataatccacctgcgtcagcctcccaaagtgctaggattacaggcatgagccactgcacccagtcccttatgatatttttaacactgcatgaaaatttttaacactgcatgaaaattcttctaagcaagtttgctaaatagcaaaaaaaaaaaaaaaaacattcttaatggggttttgccatgctagtgctccagatgaactggggtttgctgatactgagtgaaaatcaaaggaaaaacactcatttctggtgtgtgctctgtcatggaccatcagtggtacctttcaaaactctgtccagaaatcgataagaaaacttcaactaaagataatcaatgaaatgaaaaactgtgtgtcaacccccagatgttttgctttgctctggatgaagatctgaatgccaatcagaaagtgctgctccactgggtactggagtttattggttgtcaaaggaaaataagcatttttacctgctggttgagacaggtatcctatgtttggaatactagagaaaagaaactcctcaaaagatcttccagcaaagcttatcatattagacaactatgttcaaaagtttgaatatgaactttgccttattaaaacatttagagctcaaatcaagtcacagatgtcaggaatcattactaaaatggtctatttatttgtttcaacataaaactttcaaacacaatgttcttaagataatttcacagaaaaataaacttttacctagtgcatgcttaggctgaattgggggactattttctagatatcatggctgaaaaatcctatttcagagcttatcaagaaatcctctttcctcctaatattctatctgtaccaggaaacaccaccaagaatttctttcttttttttgagaccaagtctcattctgtcgcccaggctagagtgcagtggcgcagtcttggctcactgcaagctccacctcccgggttcaagtgattctcctgactcagcctcccgagtagctgggattacaggcgtgcatcaccatgcctggctaatttttgcatttttagtagagacaaggtttcaccatgttggccaggctggtctcgaaccactgacctcaggtaatccacccgccttggcctcccaaagtgctaagattacaggcgtgagccactgtacccggcttggctttgacatttacaagtctataaaggaaatgggtccctagataaaactgtgtctacaaaaggaacagaaaaaggacagacgggcttcctagattacataactgagtcattgcatcaacctgcccggaaatctgcccacctctggacttctataatgggaaccaatgaatctcctttgtcatctaagacagtttaagttgggtttctaattacttgccacataaagaatctttgctaaatctgaatttggtgccaggaggtaagtgttgcaaatcataaacactaacaagctaaattgcccagagaacagtgaggatacctctagcccagttttgaaacgaggaattcttattacatgtttgcaaaatagttaattaaattgtcttcaattatatcttaagaaataggtcatttatccattatgatagtttgaggggatgttttaggaaatgtttagaatgtgttggctaattcttgtgatcttctgtaaggttttagaagaaaaacagcttgggtcacaggtaacccaagtagaatgggagatgataatccc

SEQ ID NO: 689444 - DNA, 2362 bp, Homo sapiens
tcatggcagtggaacttgtgtgacaatttgcattctgacagctgccaaagttttctttggagaggaatctgacagaatgtttcagattgctgtttaagccagtcccatttttcaattgaaaaatgattagctgaattagcttaggatgtgaaacttcaagttttgcaaaagattgatataacacctctcttgtccctgttacgataacaaaggaaattgagtatggtcattcgtctaggcacaatgactcgagattctgttggaaaagaattgtggtttctgggaccttggagatcatcataaaacctttatatatatatacacagagagagagagagagagagagagacagagagagagagagagagacagagagagagagagagagagagacagagagagagagagagtctctctgtcacccaggctggaacgcagtggctcgatctcagatccctgcaaccttcacctcccggttcaagcaattctcatgcctcagtctcccaagtagctgggactaaaggcgcacgccaccactcctggctagttttttttgttgttgttttttggktttttttttttttttgtattttggtagacacggggtttcactgtgttgcccagactgatctcaaacccctgagctcagataatccacctgcgtcagcctcccaaagtgctaggattacaggcatgagccactgcacccagtcccttatgatatttttaacactgcatgaaaatttttaacactgcatgaaaattcttctaagcaagtttgctaaatagcaaaaaaaaaaaaaaaaacattcttaatggggttttgccatgctagtgctccagatgaactggggtttgctgatactgagtgaaaatcaaaggaaaaacactcatttctggtgtgtgctctgtcatggaccatcagtggtacctttcaaaactctgtccagaaatcgataagaaaacttcaactaaagataatcaatgaaatgaaaaactgtgtgtcaacccccagatgttttgctttgctctggatgaagatctgaatgccaatcagaaagtgctgctccactgggtactggagtttattggttgtcaaaggaaaataagcatttttacctgctggttgagacaggtatcctatgtttggaatactagagaaaagaaactcctcaaaagatcttccagcaaagcttatcatattagacaactatgttcaaaagtttgaatatgaactttgccttattaaaacatttagagctcaaatcaagtcacagatgtcaggaatcattactaaaatggtctatttatttgtttcaacataaaactttcaaacacaatgttcttaagataatttcacagaaaaataaacttttacctagtgcatgcttaggctgaattgggggactattttctagatatcatggctgaaaaatcctatttcagagcttatcaagaaatcctctttcctcctaatattctatctgtaccaggaaacaccaccaagaatttctttcttttttttgagaccaagtctcattctgtcgcccaggctagagtgcagtggcgcagtcttggctcactgcaagctccacctcccgggttcaagtgattctcctgactcagcctcccgagtagctgggattacaggcgtgcatcaccatgcctggctaatttttgcatttttagtagagacaaggtttcaccatgttggccaggctggtctcgaaccactgacctcaggtaatccacccgccttggcctcccaaagtgctaagattacaggcgtgagccactgtacccggcttggctttgacatttacaagtctataaaggaaatgggtccctagataaaactgtgtctacaaaaggaacagaaaaaggacagacgggcttcctagattacataactgagtcattgcatcaacctgcccggaaatctgcccacctctggacttctataatgggaaccaatgaatctcctttgtcatctaagacagtttaagttgggtttctaattacttgccacataaagaatctttgctaaatctgaatttggtgccaggaggtaagtgttgcaaatcataaacactaacaagctaaattgcccagagaacagtgaggatacctctagcccagttttgaaacgaggaattcttattacatgtttgcaaaatagttaattaaattgtcttcaattatatcttaagaaataggtcatttatccattatgatagtttgaggggatgttttaggaaatgtttagaatgtgttggctaattcttgtgatcttctgtaaggttttagaagaaaaacagcttgggtcacaggtaacccaagtagaatgggagatgataatccc

SEQ ID NO: 689445 - DNA, 995 bp, Homo sapiens
tccagtctggatgttatcagtctaactttcaaatgacttgttttacatgtttggatgtgttacaggaacgaaggggggaacggagtaatcctacagcgaatgtttacagtgactccttggaggtagcacaacataagaaatcatgaggaagaacatgaattagcctgccatgccatggaggtgtgggtcgggttgctccctgcatctgcgcttctgcgacagcaatcagtcatctctttccctgccagagccccacgcatgtgggaggcgtggggaggttctatttgttccttttccaccttgcacagcatgttcttctagcaaggaatttattcccagcttagaatcagcatttcatagcrggcgtggcatggagtcggcgcccactgcccactctcgctccatgctgctccccctaggtggctgcctacagagagcacaccaagccaaggatcaaaggctgcaaaggggacgccaagcccaggctcgggggctgcagagaggacaccaagcataggctcgaaggctgcagagaggatgccaagcccagcctcagaggctgcagagaatacgccaagcccaggctcagaggctgaagagaagacgccaagcccaggctcggaggctgcagagaggatgccaagcccaggctcagaagcccagaaaagtgtcaggaagaagactggttcttccaggtggaggtggggacagccagagatcctgacccctgatcaaggcaccaggagcccccaaaacactcacaatccattcagaagtgtgggttcctgcccactgtgtgttcacacacccatcctgactcacgcaccctcacacccacacaccctcacagtcactcacgcacacactcagcctcgctcatgcaggcacacactctgacacactcacatccagtctctctcacactgtctcctacatgcacaacataacagggcaccgagagggtccccaagagggtccccaagagcctccctcca

SEQ ID NO: 689446 - DNA, 661 bp, Homo sapiens
gttttcttgtgatgctgaatagaggggcgtgatgatagactcttggtagacattcattcatttggctyacctgaacagacatgaattctatggctttcactgaggaggcctctactgttgtatttggatatcagtttccagccagatgttaggaaaaccagactgtaacttctagaggtgcagaggagttatgacccaatgagtcctgagcaatggaggattggtagcagtagataagctcttatttttgtctccataattcatggactatttcaaaaagcaatatgcctccttgaagacctccaatgagaccaaacacacttgttacaaagctatattctgtgttcaccatttcctggctttactttcttcatcttcccctcctgcttctttgggattttattattcaatgaagtgctagcagatatgattttgcttcaagctctcttttctagggaaactggaaaaatatattaatcaaaattaatattgcgttagtgaaccctaatgtaataatgtgaactgtagatttggggatataatgaattatcagggtaggttcatcagttgcaatgaatacaccactctggtgggaaatattgatattgtgggaggatatgcatgtgtaggggcaggtggtatatataaaatttctgtgtct

SEQ ID NO: 689447 - DNA, 1164 bp, Homo sapiens
catttcattaaacattggcttctgttcttagcataaatgcatacactatacttgatcatttatattgtaaatagaaacttatttcacagcacagtggtctatctgcatataataagtagagtcctcctttattttaattttatttctatattgcttttaaagtctttcgaggatcactttggttaaatgaataactattattttacaatgatgtgtgattttgttttgatcaaatgttttgatgcttcgaacatctctaatacgtgtcctattaactaayccttatgctgttaagttacagggctttgattcctgggtctgaaaaaggtcctgacttctgctatatcttaaacattgacaacagttagatcctcttgttcagaacagggagaaggtgacaatcaaaatgaactgcttttgtgagacacagggccagaaattaaaaccactcaatccctctaggtccagggactatcatgaaagaggtgggcgtgtaagattgtaagggccaactttgagaaataacactagttattgttgttgttttctggtggttatatgtacccttatgtagaccttagaaagggcttaccattctaggccaacgttgaagatacagcttagcttgagagaccaggccagattgtggcctcttaaatggcaaaggaaacttcttggagtcagaagcaattctgtaaccttacttttgggcttttagttttcagctttcatgttgcttaaaagggttttgccactttcattcgtatctgacttagaacatttaattggctaaaaatcctttaattctaatttccttggccacgggacaggttggacctagggcaggtagccatactaacccagcaacagtaggaaacaaaatacagccctaagaccctcactgactaaactgacccacctgtggccaagagaagcttagttctcaagagaggaatcttacctggaaaagggtcttgcccctttccctgctgagaatatggctatcccccaaaaatgagttggctcgtagcctctttgaaatgttgggtggaagactattttcttagcttgagactccctgacacttgaggatgtttcctcccccaaaataaaaggtagattatttataaaacaattaaaaatatattagtatctctgagtttg

SEQ ID NO: 689448 - DNA, 1164 bp, Homo sapiens
catttcattaaacattggcttctgttcttagcataaatgcatacactatacttgatcatttatattgtaaatagaaacttatttcacagcacagtggtctatctgcatataataagtagagtcctcctttattttaattttatttctatattgcttttaaagtctttcgaggatcactttggttaaatgaataactattattttacaatgatgtgtgattttgttttgatcaaatgttttgatgcttcgaacatctctaatacgtgtcctattaactaacccttatgctgttaagttacagggctttgattcctgggtctgaaaaaggtcctgacttctgctatatcttaaacattgacaacagttagatcctcttgttcagaacagggagaaggtgacaatcaaaatgaactgcttttgtgagacacagggccagaaattaaaaccactcaatccctctaggtccagggactatcatgaaagaggtgggygtgtaagattgtaagggccaactttgagaaataacactagttattgttgttgttttctggtggttatatgtacccttatgtagaccttagaaagggcttaccattctaggccaacgttgaagatacagcttagcttgagagaccaggccagattgtggcctcttaaatggcaaaggaaacttcttggagtcagaagcaattctgtaaccttacttttgggcttttagttttcagctttcatgttgcttaaaagggttttgccactttcattcgtatctgacttagaacatttaattggctaaaaatcctttaattctaatttccttggccacgggacaggttggacctagggcaggtagccatactaacccagcaacagtaggaaacaaaatacagccctaagaccctcactgactaaactgacccacctgtggccaagagaagcttagttctcaagagaggaatcttacctggaaaagggtcttgcccctttccctgctgagaatatggctatcccccaaaaatgagttggctcgtagcctctttgaaatgttgggtggaagactattttcttagcttgagactccctgacacttgaggatgtttcctcccccaaaataaaaggtagattatttataaaacaattaaaaatatattagtatctctgagtttg

SEQ ID NO: 689449 - DNA, 612 bp, Homo sapiens
ctgcacttaggttattatgtatgaggtattaagtgaaaggaggattcaggcaaattcttaaaaatttatgttttaatttaaaaaattttaatttggcacagccagatttgaagtcatactgatagggtctctagatcctgaacaatattactttttacagtttgtgaagcattcacctacaaataatcgaactttaattaaaagttaacttctgtttttgatttcagaatcaactggtttatataaaacatttgaattttaactctttacttgaaaaaaaaaacagatgaatcttaaattcagctgattagtaaataaaacaaaacagcagaaattaagcatataccccaaattgttttaattaacttagscttttgtagttttagcatctattgtattctaaagataataggaatgtaagttatgctacatcttagtgtatgttaaattgctttaatcataccacttaaggggtactcacagaatacaggttaccttccagcatctagacctctcccactcctcccccccagccccatccccaataataaaatagaagaatttcattccaagtaaggattattgtacttgggagacaatgatgttcccatc

SEQ ID NO: 689450 - DNA, 1746 bp, Homo sapiens
gccttttacatttatatagaattaaaaacaaatagaacattctaactgcctttctatcttgaaattcgaagtacttctgacttaataaaaaatatttcaaagggggctaaaagtactstaacacattaataattttaactttatagagtcatgcatatattaatagaaaataatatacataaaattaatgatcttgtgtgtcaaaagagaaaaggtatttgtgatttctatcctttggttacctgtaaatacatgtttcagagagagatgctgagtctctcctagaaatttgaaaccacaaatttcttccaatgtgattgatttattgttcaacaatttgaggataaaatcaatttttgttgtatatctataatttcatttacaaaaaatgctagacagatatagaaaattacaccaaactaaattcagttatgtagaaatattgataatgcattcctttattggaaagtagaatcactctttctttaattaattcacaatgtaactacctcatctgttggttgacaaatctggaaaccgaaattattactttcaactcaagcaaagttacctgcctattccagaatgcataggtgcatgtttagctgaaataatggattaaagtggatcagttagttcatttatcatgggtttgactacacaactaaataagtgaaatcaatctaaaattcattaagtagtgccatgttttagttttgtagataaaaccctagatgtgaaggctgttactccccaccgccaaaatattctctagtctgtggataatcccaaaccccacaaatttgtggcactgccctgctggatgctcgtggcaactatagaagatcattctgttcgataatgactcaattagtatttcatatatgaaaaatagaaatctcctcttctataaccagactctaaactggccctgataattccaaactccttgcattaattcttagcctaatttcctccccttgacctatgacttgattctaaacaaaacatatgggaaaactgatgagatgtcactcctgtaattatgctgcataagactgccatgtctgtttttctggaagactgtctccttgttggctttgacgaagcaagtggtcatgttggggaaggtcacatagcaaagaattgagagtagtttccagccaactaagaagtagaactaagggtgacctttagctaacagccaggaagaaattggggccacagtctgacagctgacaaggaatttaatgctgcgaacaaccacatcatcttggaagtggatccatctccagttcagcctgtacatgagaaaccacatctggctggcatgattgtagctttgtaaaggagccacctaagtggtgcttagacttatgattccacatatggaaaaactatgagataataaatgtgtgttttttaaagctgctaagtatgctaaatgtaaggtaatgttatggaacaacagataatacaccaaacattcaaaaatgcttgacaatttgacaatgatttagccttaccaaatacatttctcaatattgtctttaacctaaattcaggaaaaggaagacagtcagtcctgctgtaccacttgtgttgaaaccgcacatttcttccagtgtgaatgatttattattgaacaatttgaggatgaaatgaattttttgttgtgtatctaatttcgtttgcaaaaattactagataggtatagaaaattacaccaaactaaattcagttata

SEQ ID NO: 689451 - DNA, 1746 bp, Homo sapiens
gccttttacatttatatagaattaaaaacaaatagaacattctaactgcctttctatcttgaaattcgaagtacttctgacttaataaaaaatatttcaaagggggctaaaagtactgtaacacattaataattttaactttatagagtcatgcatatattaatagaaaataatatacataaaattaatgatcttgtgtgtcaaaagagaaaaggtatttgtgatttctatcctttggttacctgtaaatacatgtttcagagagagatgctgagtctctcctagaaatttgaaaccacaaatttcttccaatgtgattgatttattgttsaacaatttgaggataaaatcaatttttgttgtatatctataatttcatttacaaaaaatgctagacagatatagaaaattacaccaaactaaattcagttatgtagaaatattgataatgcattcctttattggaaagtagaatcactctttctttaattaattcacaatgtaactacctcatctgttggttgacaaatctggaaaccgaaattattactttcaactcaagcaaagttacctgcctattccagaatgcataggtgcatgtttagctgaaataatggattaaagtggatcagttagttcatttatcatgggtttgactacacaactaaataagtgaaatcaatctaaaattcattaagtagtgccatgttttagttttgtagataaaaccctagatgtgaaggctgttactccccaccgccaaaatattctctagtctgtggataatcccaaaccccacaaatttgtggcactgccctgctggatgctcgtggcaactatagaagatcattctgttcgataatgactcaattagtatttcatatatgaaaaatagaaatctcctcttctataaccagactctaaactggccctgataattccaaactccttgcattaattcttagcctaatttcctccccttgacctatgacttgattctaaacaaaacatatgggaaaactgatgagatgtcactcctgtaattatgctgcataagactgccatgtctgtttttctggaagactgtctccttgttggctttgacgaagcaagtggtcatgttggggaaggtcacatagcaaagaattgagagtagtttccagccaactaagaagtagaactaagggtgacctttagctaacagccaggaagaaattggggccacagtctgacagctgacaaggaatttaatgctgcgaacaaccacatcatcttggaagtggatccatctccagttcagcctgtacatgagaaaccacatctggctggcatgattgtagctttgtaaaggagccacctaagtggtgcttagacttatgattccacatatggaaaaactatgagataataaatgtgtgttttttaaagctgctaagtatgctaaatgtaaggtaatgttatggaacaacagataatacaccaaacattcaaaaatgcttgacaatttgacaatgatttagccttaccaaatacatttctcaatattgtctttaacctaaattcaggaaaaggaagacagtcagtcctgctgtaccacttgtgttgaaaccgcacatttcttccagtgtgaatgatttattattgaacaatttgaggatgaaatgaattttttgttgtgtatctaatttcgtttgcaaaaattactagataggtatagaaaattacaccaaactaaattcagttata

SEQ ID NO: 689452 - DNA, 1746 bp, Homo sapiens
gccttttacatttatatagaattaaaaacaaatagaacattctaactgcctttctatcttgaaattcgaagtacttctgacttaataaaaaatatttcaaagggggctaaaagtactgtaacacattaataattttaactttatagagtcatgcatatattaatagaaaataatatacataaaattaatgatcttgtgtgtcaaaagagaaaaggtatttgtgatttctatcctttggttacctgtaaatacatgtttcagagagagatgctgagtctctcctagaaatttgaaaccacaaatttcttccaatgtgattgatttattgttcaacaatttgaggataaaatcaatttttgttgtatatctataatttcatttacaaaaaatgctagacagatatagaaaattacaccaaactaaattcagttatgtagaaatattgataatgcattcctttattggaaagtagaatcactctttctttaattaattcacaatgtaactacctcatctgttggttgacaaatctggaaacygaaattattactttcaactcaagcaaagttacctgcctattccagaatgcataggtgcatgtttagctgaaataatggattaaagtggatcagttagttcatttatcatgggtttgactacacaactaaataagtgaaatcaatctaaaattcattaagtagtgccatgttttagttttgtagataaaaccctagatgtgaaggctgttactccccaccgccaaaatattctctagtctgtggataatcccaaaccccacaaatttgtggcactgccctgctggatgctcgtggcaactatagaagatcattctgttcgataatgactcaattagtatttcatatatgaaaaatagaaatctcctcttctataaccagactctaaactggccctgataattccaaactccttgcattaattcttagcctaatttcctccccttgacctatgacttgattctaaacaaaacatatgggaaaactgatgagatgtcactcctgtaattatgctgcataagactgccatgtctgtttttctggaagactgtctccttgttggctttgacgaagcaagtggtcatgttggggaaggtcacatagcaaagaattgagagtagtttccagccaactaagaagtagaactaagggtgacctttagctaacagccaggaagaaattggggccacagtctgacagctgacaaggaatttaatgctgcgaacaaccacatcatcttggaagtggatccatctccagttcagcctgtacatgagaaaccacatctggctggcatgattgtagctttgtaaaggagccacctaagtggtgcttagacttatgattccacatatggaaaaactatgagataataaatgtgtgttttttaaagctgctaagtatgctaaatgtaaggtaatgttatggaacaacagataatacaccaaacattcaaaaatgcttgacaatttgacaatgatttagccttaccaaatacatttctcaatattgtctttaacctaaattcaggaaaaggaagacagtcagtcctgctgtaccacttgtgttgaaaccgcacatttcttccagtgtgaatgatttattattgaacaatttgaggatgaaatgaattttttgttgtgtatctaatttcgtttgcaaaaattactagataggtatagaaaattacaccaaactaaattcagttata

SEQ ID NO: 689453 - DNA, 642 bp, Homo sapiens
gatgtaacaaataagagtgtccttgtttatgggagatacatttcagtgtgcttgtgaacaaatggacaatatatttacagctcaataatgggaatgaggggagagagacggtaacatattaacaattagggaacttagagacatatgggaaaatgtgtgcagttcttaaaattattctgaatctttgaaattatttcaaaataaattataaaaacaagttaatacaataacctactgctttattaaaaataacttctgtggtatttcattacttttgtattttttgggataaagtattcataagayagattggataaaccaggcaattttttataacaaaatgataaaataaatcagcaaatattgctttccatggggcagatttctaggcagtaaaataaagataaatgtgtatatgtatgaactatcttgttttagcttctgggctttgtgattaaaaactatattttgaaatagttgttactagaatcaaagagttaacatttaaaatgtagaagtcatagcttgaagtttaccctagacaactggaaatgaaaacatgtttcaatgatttagcactggaataaggttttgccttcttatgcacaattttacttgcaaatggattggccaattcaatcc

SEQ ID NO: 689454 - DNA, 601 bp, Homo sapiens
caccctgggtgacagagtaagactctctcaaacgatgataataatagtagttactaataactattttaaactaatacagttttttattaaaactaatagaatagctaataatatattgttatagctagctatatagctagctataacaatataataaaagtaaaataaggattccttgaacataagcactaggatactgtcccamctgatctgatcagctactaagtggctaacagggaagtggcgtatacagcatgggtccgatggacaatgggaggattcacgttccagggagaatctagtaaaatgactcaaggttcattacactactcagaaccacatgcagtttaaaacttatgaattgtttatttctgaaaatttccattggatattttcagaccacagttgaccgtgtataactgacaccacggaaagcaaaaccatggattggcgcgggggagggcaggcgctactataaatcacaacctccaaggtaagagcctggtttttgcattttaagtctctctcagggagtctcatgcacaccaaagtaggagaaatagggcatttgagtttggaaaactggttactcataaggctg

SEQ ID NO: 689455 - DNA, 674 bp, Homo sapiens
tcaaaaggatgtgcctggaatggctttcaagcactagtttatctgaagcctctgataggaatgtgcattcagtatgcatgcgtaytcccacacaccctcaaacacacagaaacataacaacccatattcatttttctgccaggaaacaccacaaatcaatttccactagtgtctttttggtttttaaaacaatttactggactgataatgatgctaataatattttctgggcactggtcatcgtgtgagggacattactacattatcttaatttaatgctcccacaaatcctaggaggttagtataattactatccccattgtaccactgcaaaaaccagtgcttggaattgttaatgagcttgcaaaggtcatacacccagtaaactgagatattgggatctgaacctggaaagcccaaatctgaaccctttgtttctaacagccatgcctacttgcctcttccagggaaggtgaacagggcagtgataagggtgtctggctgtagggccacacattattttcacatttactgttaaggtctcaggaaaatcccagtgatagtggggagaaacgatggaaaacttaattactgttcattattttgcatcggttaagaaataatctactctcaactgttatcaatagacattctgaaaacttcaggaaacctct

SEQ ID NO: 689456 - DNA, 1952 bp, Homo sapiens
ggacatgtgagtcatcagaagtctaccaggagagcttatccagcaagaatccgggtcacttgtagtttcagaataatctcartgagatgagaaaacttgtatacttttttttcttccccagcggaaatatgcattaatatcacaacttgagtaggaataaagagcaccttcttggaccacaaagtcacctttgactccctccatcttccatatctttcacaacatatcaactgcccagttcttctaattccacctcctgtacagctcttgaatgagcccactcttttccaacacacctttcactactagaccattacagaagcctcctaatcagtcgcttaccttccactttggccccttccaccagacataaagcaatctttctaaaagacgaatctgattgcctttctccagtttgcattctttcatgggctttccgatgtgcttagaataaattacagacacctgcaagcttccgtgttatcaggaccatgacttaatataaggtgtcatggatgtggggcacagaacacaatgtcatgtgcaatgaaatcacacttatgcaggattttgtactacaggagtttataaaacccgaatcattgatagcacaaattgcatttaacaattccctaaacttccagaatctggacttttgggagctcaaaagccaagaatcaacccctctaagtttctctttgcatttctattgtacccttcctaaggcagtgaaagggagttaggccaaggttattttaaatctagcagggttgtgagttggggaagaagaggcataattaacaaaatttcactctctctttctttttataaagagtttttgttacactggtggagtctcactgcacttaccatgtgactccagtatataaaacacaactccaactatgttcaaaatatgcatacacataggcgttatatttccatggtgaggaggaggggattgctacacacagtgaaatatgcaaggcaaatgaactagaaagaaatacagccatatgtgaacaggaatatctctggatggtgagattagagatgattaatttgattctcaatactttcatgtatgttccactatcaataatggaatttttttaaactctaaatggttactttaagtctttatattaatatatggacctagatatagaatacatggcaaaggtaacattaaattgttttagaatgaaaagatttatcacctgccctgattcttctcagtttgcagatctttatgcccagataacagccccagaatggaaactgttgtcatttgatgctttcacacgtcatccccaaaatcaatcatctctaaggtttttaacgtacacacggagatatacaaaactgagggcgtaaaaatgtccagtgaatctgttaagtgttgcagttgaatattagtgcctgtgtgccgttttgtggaatggtgacctatcatgactgtaaacaaagagagaaaaacagttatgaagtatggcagccttataataatcagtgaaaagctttctctgccagcactttcaaatagaagattccatgaatattaaaagcttcaaattcaaatctccattcaacacacaccattgagtctctttctgtgtgctagtgacatatgagtaatgactttttttttttacattgaagaatatccttttcattatgggtataacatgatgagtgtgattagatacccatgtgctaaatgttacatactctctcctctactcacccagaagctgcagtatgggtcttggtcagggcatgaagtgaacatctgtgtggggcccaccaattgctctgtcaactgcccactgcatttctttttctaaatttctgagtgctgggctcaaatgtaagaatacaagctacattgactttattgcccagttgttataaaaatgtaaaagtttaagcatagattgcctatggagcga

SEQ ID NO: 689457 - DNA, 1952 bp, Homo sapiens
ggacatgtgagtcatcagaagtctaccaggagagcttatccagcaagaatccgggtcacttgtagtttcagaataatctcaatgagatgagaaaacttgtatacttttttttcttccccagcggaawtatgcattaatatcacaacttgagtaggaataaagagcaccttcttggaccacaaagtcacctttgactccctccatcttccatatctttcacaacatatcaactgcccagttcttctaattccacctcctgtacagctcttgaatgagcccactcttttccaacacacctttcactactagaccattacagaagcctcctaatcagtcgcttaccttccactttggccccttccaccagacataaagcaatctttctaaaagacgaatctgattgcctttctccagtttgcattctttcatgggctttccgatgtgcttagaataaattacagacacctgcaagcttccgtgttatcaggaccatgacttaatataaggtgtcatggatgtggggcacagaacacaatgtcatgtgcaatgaaatcacacttatgcaggattttgtactacaggagtttataaaacccgaatcattgatagcacaaattgcatttaacaattccctaaacttccagaatctggacttttgggagctcaaaagccaagaatcaacccctctaagtttctctttgcatttctattgtacccttcctaaggcagtgaaagggagttaggccaaggttattttaaatctagcagggttgtgagttggggaagaagaggcataattaacaaaatttcactctctctttctttttataaagagtttttgttacactggtggagtctcactgcacttaccatgtgactccagtatataaaacacaactccaactatgttcaaaatatgcatacacataggcgttatatttccatggtgaggaggaggggattgctacacacagtgaaatatgcaaggcaaatgaactagaaagaaatacagccatatgtgaacaggaatatctctggatggtgagattagagatgattaatttgattctcaatactttcatgtatgttccactatcaataatggaatttttttaaactctaaatggttactttaagtctttatattaatatatggacctagatatagaatacatggcaaaggtaacattaaattgttttagaatgaaaagatttatcacctgccctgattcttctcagtttgcagatctttatgcccagataacagccccagaatggaaactgttgtcatttgatgctttcacacgtcatccccaaaatcaatcatctctaaggtttttaacgtacacacggagatatacaaaactgagggcgtaaaaatgtccagtgaatctgttaagtgttgcagttgaatattagtgcctgtgtgccgttttgtggaatggtgacctatcatgactgtaaacaaagagagaaaaacagttatgaagtatggcagccttataataatcagtgaaaagctttctctgccagcactttcaaatagaagattccatgaatattaaaagcttcaaattcaaatctccattcaacacacaccattgagtctctttctgtgtgctagtgacatatgagtaatgactttttttttttacattgaagaatatccttttcattatgggtataacatgatgagtgtgattagatacccatgtgctaaatgttacatactctctcctctactcacccagaagctgcagtatgggtcttggtcagggcatgaagtgaacatctgtgtggggcccaccaattgctctgtcaactgcccactgcatttctttttctaaatttctgagtgctgggctcaaatgtaagaatacaagctacattgactttattgcccagttgttataaaaatgtaaaagtttaagcatagattgcctatggagcga

SEQ ID NO: 689458 - DNA, 1952 bp, Homo sapiens
ggacatgtgagtcatcagaagtctaccaggagagcttatccagcaagaatccgggtcacttgtagtttcagaataatctcaatgagatgagaaaacttgtatacttttttttcttccccagcggaaatatgcattaatatcacaacttgagtaggaataaagagcaccttcttggaccacaaagtcacctttgactccctccatcttccatatcyttcacaacatatcaactgcccagttcttctaattccacctcctgtacagctcttgaatgagcccactcttttccaacacacctttcactactagaccattacagaagcctcctaatcagtcgcttaccttccactttggccccttccaccagacataaagcaatctttctaaaagacgaatctgattgcctttctccagtttgcattctttcatgggctttccgatgtgcttagaataaattacagacacctgcaagcttccgtgttatcaggaccatgacttaatataaggtgtcatggatgtggggcacagaacacaatgtcatgtgcaatgaaatcacacttatgcaggattttgtactacaggagtttataaaacccgaatcattgatagcacaaattgcatttaacaattccctaaacttccagaatctggacttttgggagctcaaaagccaagaatcaacccctctaagtttctctttgcatttctattgtacccttcctaaggcagtgaaagggagttaggccaaggttattttaaatctagcagggttgtgagttggggaagaagaggcataattaacaaaatttcactctctctttctttttataaagagtttttgttacactggtggagtctcactgcacttaccatgtgactccagtatataaaacacaactccaactatgttcaaaatatgcatacacataggcgttatatttccatggtgaggaggaggggattgctacacacagtgaaatatgcaaggcaaatgaactagaaagaaatacagccatatgtgaacaggaatatctctggatggtgagattagagatgattaatttgattctcaatactttcatgtatgttccactatcaataatggaatttttttaaactctaaatggttactttaagtctttatattaatatatggacctagatatagaatacatggcaaaggtaacattaaattgttttagaatgaaaagatttatcacctgccctgattcttctcagtttgcagatctttatgcccagataacagccccagaatggaaactgttgtcatttgatgctttcacacgtcatccccaaaatcaatcatctctaaggtttttaacgtacacacggagatatacaaaactgagggcgtaaaaatgtccagtgaatctgttaagtgttgcagttgaatattagtgcctgtgtgccgttttgtggaatggtgacctatcatgactgtaaacaaagagagaaaaacagttatgaagtatggcagccttataataatcagtgaaaagctttctctgccagcactttcaaatagaagattccatgaatattaaaagcttcaaattcaaatctccattcaacacacaccattgagtctctttctgtgtgctagtgacatatgagtaatgactttttttttttacattgaagaatatccttttcattatgggtataacatgatgagtgtgattagatacccatgtgctaaatgttacatactctctcctctactcacccagaagctgcagtatgggtcttggtcagggcatgaagtgaacatctgtgtggggcccaccaattgctctgtcaactgcccactgcatttctttttctaaatttctgagtgctgggctcaaatgtaagaatacaagctacattgactttattgcccagttgttataaaaatgtaaaagtttaagcatagattgcctatggagcga

SEQ ID NO: 689459 - DNA, 1952 bp, Homo sapiens
ggacatgtgagtcatcagaagtctaccaggagagcttatccagcaagaatccgggtcacttgtagtttcagaataatctcaatgagatgagaaaacttgtatacttttttttcttccccagcggaaatatgcattaatatcacaacttgagtaggaataaagagcaccttcttggaccacaaagtcacctttgactccctccatcttccatatctttcacaacatatcaactgcccagttcttctaattccacctcctgtacagctcttgaatgagcccactcttttycaacacacctttcactactagaccattacagaagcctcctaatcagtcgcttaccttccactttggccccttccaccagacataaagcaatctttctaaaagacgaatctgattgcctttctccagtttgcattctttcatgggctttccgatgtgcttagaataaattacagacacctgcaagcttccgtgttatcaggaccatgacttaatataaggtgtcatggatgtggggcacagaacacaatgtcatgtgcaatgaaatcacacttatgcaggattttgtactacaggagtttataaaacccgaatcattgatagcacaaattgcatttaacaattccctaaacttccagaatctggacttttgggagctcaaaagccaagaatcaacccctctaagtttctctttgcatttctattgtacccttcctaaggcagtgaaagggagttaggccaaggttattttaaatctagcagggttgtgagttggggaagaagaggcataattaacaaaatttcactctctctttctttttataaagagtttttgttacactggtggagtctcactgcacttaccatgtgactccagtatataaaacacaactccaactatgttcaaaatatgcatacacataggcgttatatttccatggtgaggaggaggggattgctacacacagtgaaatatgcaaggcaaatgaactagaaagaaatacagccatatgtgaacaggaatatctctggatggtgagattagagatgattaatttgattctcaatactttcatgtatgttccactatcaataatggaatttttttaaactctaaatggttactttaagtctttatattaatatatggacctagatatagaatacatggcaaaggtaacattaaattgttttagaatgaaaagatttatcacctgccctgattcttctcagtttgcagatctttatgcccagataacagccccagaatggaaactgttgtcatttgatgctttcacacgtcatccccaaaatcaatcatctctaaggtttttaacgtacacacggagatatacaaaactgagggcgtaaaaatgtccagtgaatctgttaagtgttgcagttgaatattagtgcctgtgtgccgttttgtggaatggtgacctatcatgactgtaaacaaagagagaaaaacagttatgaagtatggcagccttataataatcagtgaaaagctttctctgccagcactttcaaatagaagattccatgaatattaaaagcttcaaattcaaatctccattcaacacacaccattgagtctctttctgtgtgctagtgacatatgagtaatgactttttttttttacattgaagaatatccttttcattatgggtataacatgatgagtgtgattagatacccatgtgctaaatgttacatactctctcctctactcacccagaagctgcagtatgggtcttggtcagggcatgaagtgaacatctgtgtggggcccaccaattgctctgtcaactgcccactgcatttctttttctaaatttctgagtgctgggctcaaatgtaagaatacaagctacattgactttattgcccagttgttataaaaatgtaaaagtttaagcatagattgcctatggagcga

SEQ ID NO: 689460 - DNA, 1952 bp, Homo sapiens
ggacatgtgagtcatcagaagtctaccaggagagcttatccagcaagaatccgggtcacttgtagtttcagaataatctcaatgagatgagaaaacttgtatacttttttttcttccccagcggaaatatgcattaatatcacaacttgagtaggaataaagagcaccttcttggaccacaaagtcacctttgactccctccatcttccatatctttcacaacatatcaactgcccagttcttctaattccacctcctgtacagctcttgaatgagcccactcttttccaacacacctttcactactagaccattacagaagcctcctaatcagtcgcttaccttccactttggccccttccaccagacataaagcaatctttctaaaagacgaatctgattgcctttctccagtttgcattctttcatgggctttccgatgtgcttagaataaattacagacacctgcaagcttccgtgttatcaggaccatgacttaatataaggtgtcatggatgtggggcacagaacacaatgtcatgtgcaatgaaatcacacttatgcaggattttgtactacaggagtttataaaacccgaatcattgatagcacaaattgcatttaacaattccctaaacttccagaatctggacttttgggagctcaaaagccaagaatcaacccctctaagtttctctttgcatttctattgtacccttcctaaggcagtgaaagggagttaggccaaggttattttaaatctagcagggttgtgagttggggaagaagaggcataattaacaaaatttcactctctctttctttttataaagagtttttgttacactggtggagtctcactgcacttaccatgtgactccagtatataaaacacaactccaactatgttcaaaatatgcatacacataggcgttatatttccatggtgaggaggaggggattgctacacacagtgaaatatgcaaggcaaatgaactagaaagaaatacagccatatgtgaacaggaatatctctggatggtgagattagagatgattaatttgattctcaatactttcatgtatgttccactatcaataatggaatttttttaaactctaaatggttactttaagtctttatattaatatatggacctagatatagaatacatggcaaaggtaacattaaattgttttagaatgaaaagatttatcacctgccctgattcttctcagtttgcagatctttatgcccagataacagccccagaatggaaactgttgtcatttgatgctttcacacgtcatccccaaaatcaatcatctctaaggtttttaacgtacacacggagatatacaaaactgagggcgtaaaaatgtccagtgaatctgttaagtgttgcagttgaatattagtgcctgtgtgccgttttgtggaatggtgacctatcatgactgtaaacaaagagagaaaaacagttatgaagtatggcagccttataataatcagtgaaaagctttctctgccagcactttcaaatagaagattccatgaatattaaaagcttcaaattcaaatctccattcaacacacaccattgagtctctttctgtgtgctagtgacatatgagtaatgactttttttttttacattgaagaatatccttttcattatgggtataacatgatgagtgtgattagatacccatgtgctaaatgttacatactctctcctmtactcacccagaagctgcagtatgggtcttggtcagggcatgaagtgaacatctgtgtggggcccaccaattgctctgtcaactgcccactgcatttctttttctaaatttctgagtgctgggctcaaatgtaagaatacaagctacattgactttattgcccagttgttataaaaatgtaaaagtttaagcatagattgcctatggagcga

SEQ ID NO: 689461 - DNA, 801 bp, Homo sapiens
gaaatccatgtatagttgtatcctattgtgtactttccaggaactttttgaagactcctcatatatatgcatatacatacatatgtatacatacacacatatataacacatatgccatgtgtgtatatatatatatayacataagtgcttggcttcattattgccaacattgaagttttttttaatatggctcaagcagaatctgagttatttgaattcctggcttttatgtaggtttcatgaaaatttagaggttgctctcaaatcctcaaccccaaaataattatttatagagtaccatcaatatgtctgacatagccatagacattatggactacagaagaattataacaaaggtctttacctgcaatgagtttacaatcttgctaagattttttgcaaagctaatgaaccacatagttggtacgtgtttctttctctgggatcatgtttggtacccatggagcttatccactgttcatctcttccccgggaacctcagtggtctccatagttaatgcagataaatatagcccttgccctgaaactgggcaaatttgctacttatcactcttactagatataaacagaaaaatagccaaggtaaacaggcacatatacaaccacattcatattctttaattaagtaaaaaccaacaagcatgtattaagcctctagaatgtaccaaagtgctttatgtaactttctcctgttgggagctattcattcactgtttttagctgttttatgatgtaaaataactgaaactcatgaattgtaatgatgttaatatttatcat

SEQ ID NO: 689462 - DNA, 981 bp, Homo sapiens
caaaattagatattatggtttaggagtcatgcagctggaggctacaagattctgactctccctaaattactcctcaggataacctcactattgtaaaacctaagatcagtgcttgagatattctgcagaccctgcacttaatggatcagccggcatcatccagataaataaactggtgcatctggtcttgtggccccacaagaggacacagcacaagaggacagcttcaactccttatgattcatcttcaacccaaccaatccacactccctactcactggcctcccacccaccaaattatccttaaaaactctgatccccaaatacgtggggagactgatttgagtaataataaaactccgttctcctgtacagccagttttgtgtgattaaatgctttcgctattgcaattcccctgtgttgataaccggctctgtctaggcagtgggcaaattgaactgttgagcagttacagggtcaaatagtaaataggagaaatttcgtaaaaaatacagtatttaaaaattgtggcagccagaaatagaaaagacattacatgatcttgcctcttgttgatkcacgtaattgatggctatatcaattttatggccaataattattattggtgtttatggaaaacaaagatcatttcagattgaaatgatcatacaactagttcataagatataaagtgagtcttaaaggaaatttaagaagaattgaggggttgaattctcagggtggagtaggatgaataaatacatgaaaaagggacagttagagctgataaaataaaaacttcagccaaattaaatgtaaaggagtttaattgagcaatgaatgatttgtgaatcaggcaacccctagaatcacagcagattcacagagactccagcgcacgcacgtggtggaagaagatttatagacaaaaaaagggaaatgacgtacagaaatcggaagtgaggtacagaacggctgga

SEQ ID NO: 689463 - DNA, 636 bp, Homo sapiens
ttttctatgtattaaattcaaatattattaatttgtatcaagtgatttactcttaaaatttgcaaattattgaatatatgtatcagaaaaaaagcagtcaagaaataaacatttacatctctaattgtctaaaaaacactatcacattaaatgtttyctatgatttacaaataattgtttttattaatttgtggctccagttatagcaactactgcagatgtgtctttttcctggagcaaactgataccactggcacatgacatgcagctattggggcggtaaatactttcattctatgctaatcaaaaaacacagtttctttcacctgaaaggacagcaggataccttttctatcttgttccagagtggtgacaactcactggttctgtgccacaattgagctcatggagacatttattgtattgtcatttcacaggagctcatgctggtcccttacattgatgtcaatgtagtggcagatatgcatgatgccttgataaaattcttgtgtgccagagcattggatactaattccaccaaaatacagggatctgccacttccataaaattcctgaagagccagtgaaatttagtatgtcaagataccttctccaaaggaaaggagaaattcttgt

SEQ ID NO: 689464 - DNA, 636 bp, Homo sapiens
ttttctatgtattaaattcaaatattattaatttgtatcaagtgatttactcttaaaatttgcaaattattgaatatatgtatcagaaaaaaagcagtcaagaaataaacatttacatctctaattgtctaaaaaacactatcacattaaatgtttcctatgatttacaaataattgtttttattaatttgtggctccagttatagcaactactgcagatgtgtctttttcctggagcaaactgataccactggcacatgacatgcagctattggggcggtaaatactttcattctatgctaatcaaaaaacacagtttctttcacctgaaaggacagcaggataccttttctatcttgttccagagtggtgacaactcactggttctgtgccacaattgagctcatggagacatttattgtattgtcatttcacaggagctcatgctggtcccttacattgatgtcaatgtagtggcagatatgcatgatgccttgataaaattcttgygtgccagagcattggatactaattccaccaaaatacagggatctgccacttccataaaattcctgaagagccagtgaaatttagtatgtcaagataccttctccaaaggaaaggagaaattcttgt

SEQ ID NO: 689465 - DNA, 598 bp, Homo sapiens
ttgctctgccatcctccttcaatctctatttatgactcatggggagtttcttattattaattgaccagaaggggaaaagttcaagccttatttacaggtattactgtataatttactcaccagacagaaattcacaactgacactttacagccccatcctgggttgaccctttaaaaagcatgtgtgggagagtatgaagacaaaaccttttaatggtttatcttgtcccctctgccttgaaggagagatagccttaggcaaatatctatgcttttctttccttgagtaatcaccttccctcctgggacttctctgggtcctgtcctagcatctgcggtggtgctcaaagctgggaacctagttggagcctccgtgtgatgaactagaggtttgtaggtgacatactttctgtaatggtgaatctgggatctaaygttttggaaacatcaacccttagggaagaaatggttcctctaggtacacaaaaatggtactattaaattggaagccaagactaccacttggatatttcagattcttcatgtctttaagcaaatagaccaaaagtgagctgatctttattattggtttggatga

SEQ ID NO: 689466 - DNA, 954 bp, Homo sapiens
atgctgcccactagtatttctgtcctccttctaggagcatggagtgattgtccttccatctccttcaaattaggcaaggctatgtgatttgatttggccagtatgaagtgaatagaagtgtcatcgattatttctgagtgaacatgttaaaaactgaagtcattctccatggttcctctggttgatgtaagaagactttgattggagtcttggttttgctacttattaactgtgtgattttaagtttcagagaggctattaacttactcagttttcacctttagagaccagaaacaaaataatatttttcatacacagtggttatttcatttgctcccaccatcccaatatgtcaaccacattakaacccttacttttgcctggagatgccctgcattttacacaaccaatatttcctgaattctttgttttaaacatgagtttttgatgaattacaataccataggacaaattattaggaccctgtcagaaagcagcctggagtttatatacgtcaaagaagctgattttggcttgtaaactgaaaaaagtaagcattcctgaaagtcagaaagatgaatggattaaaagtatgaaaataggaaaataaatgccttaaaaccaagctctcttacatgtatagaatgctaatatttaatgaaaagaaaacacttcagtggtttttactttcaatacgttaatagaatgcttgatttagtcattcattaaaaaatatttaccaagttactaccatgtgccggggagtgcatgaggcactggggataaagcaatgaacatgacagggaaggtccctatctttaaagtatttgtgttttaggaaagagagatagatagtaaacaagtaggtaacaaatacacatgctgctttcaggtgatgaaaactattatggaggaagtagaccctgactgccagagaggaatggtgccgtccta

SEQ ID NO: 689467 - DNA, 1240 bp, Homo sapiens
tttaactgagcaaataacagtgggttgaatgtgatagaaagcttatttcactgcgcatataccccaaaagttaaaacataataatagtaataatttaaaaaaaagtttagactggcaggtggtccagggaggaagggcagctctgtaccacaaattgtctggggccctcgttcttcttttcttgttattccactgccctttagcgtgttggtttagtcatcttagcttcaattagccctcatctacctcatctgcatttcagtgagctggaagggaaagaggaaaaaggaggcaagctgcttcctcttcagggcatgacctgatgtttgatacattgcttcttctcacatcttgctagacagagttttgtcacatggttatctctcactgtaagaaaggtttagaaatggaatctctagtttcctggccatcagagcagctataacttatagctatgggactataagaaacaggaatcaagatagaatggatattggggacaatcagtaaccatgatacagagacctccatagaagggcaagtatttccctgttatatcagtcagggtttgatcaaggaagtagaccattgtgagtattacggagtagggggtttattatagatataagaccacatatgattgtgggagaagctgtggaaataagagtctgaatggggcagtggaaggatcagagaaaatctctacccaccccttttgagatttgtgaaggtagacaagtgaggagaatgagagcatgctagaatctgtagcatgtctgcaactgtcactcatctctcctaaatacaacagccgtaagagagcagtggtgctgctttactttttctaaatcttgcattaagtcttttgaccaactccaacctgaaattgtacaggaagtgaatttagggaaatatrgtcctagcttagccaagtagacacagttacaaactactacatccatgttgcagagagtggtagacattgagatgggacagatctgggagccacaaggctgggtgaggagacaccagcagcaggctctgcatgggctgctcagataacactgcaatggatgctgctgctgaggatgagatgagagacacagatgttcttccccatccccgtccctctccccagtgcattgctaccatacatcagcctttccattccaacactcctatccccatcagaactaaggtgcaatcttgggatggaggaagccctggcatgatgagaaaa

SEQ ID NO: 689468 - DNA, 775 bp, Homo sapiens
ataaataaataaataaataaagtcctttaggcacttgtttataatttattggtctaataaagtttatgaaaattctgcatttttcctatccaattatcagccatgaagatttcaatggaatcttccaactccaaatggacagacacaatgaaatagttaaaagccaaacagaagactatatttcaatatgtgccaatttattgctttttttttttttcccttgagacagagtttttcactcttgttgcccaggctggagtgcaatggcgcaagctcggctcactgcaacctccatctcctggattcaagtgattctactgcctcagcctcctgagtagctgggattataagcgcacrtcaccacgcctggcgaatttttgtatttttagtagagacagggtttcaccatgttggttaggctggtctcgaactcctgacctcaggtgatccacctgcctcagcccccgtgagccaccacacctggctgttctttttttttagatggggtctcgctctgtcaaccaggctggagtgcaatggcatgatctcggtttcctgcaacttctgcctcctgggctcaagcaatcctctcatctcagcctcctgagcagctgggacgataggcatgtgtcaccatgcccagctaattactgtattttttgtagagacagggttttgccatgttgcccaggctggtctcgaactcctagactgaagccatctgtccacctcagcctcccaaagtgctgggattacaggcgtgagccactgcgcc

SEQ ID NO: 689469 - DNA, 775 bp, Homo sapiens
ataaataaataaataaataaagtcctttaggcacttgtttataatttattggtctaataaagtttatgaaaattctgcatttttcctatccaattatcagccatgaagatttcaatggaatcttccaactccaaatggacagacacaatgaaatagttaaaagccaaacagaagactatatttcaatatgtgccaatttattgctttttttttttttcccttgagacagagtttttcactcttgttgcccaggctggagtgcaatggcgcaagctcggctcactgcaacctccatctcctggattcaagtgattctactgcctcagcctcctgagtagctgggattataagcgcacaycaccacgcctggcgaatttttgtatttttagtagagacagggtttcaccatgttggttaggctggtctcgaactcctgacctcaggtgatccacctgcctcagcccccgtgagccaccacacctggctgttctttttttttagatggggtctcgctctgtcaaccaggctggagtgcaatggcatgatctcggtttcctgcaacttctgcctcctgggctcaagcaatcctctcatctcagcctcctgagcagctgggacgataggcatgtgtcaccatgcccagctaattactgtattttttgtagagacagggttttgccatgttgcccaggctggtctcgaactcctagactgaagccatctgtccacctcagcctcccaaagtgctgggattacaggcgtgagccactgcgcc

SEQ ID NO: 689470 - DNA, 621 bp, Homo sapiens
tgggcatgttgctggtagtggtgatagcagggagccaccragagagcttccaagtgtgccatctaagccctcctctggggaagggaagctcctctggggaagggaaactggacccccgggaaaatttattctcccagggacgaacatccagacatttccctgtaggagcctcagtgtgttcagatgttcactgtccagtagaaacaagacatctaggcaactctcccatctcaccaagcctctgctctcttctgtggccactgtggggttgtgagagtaatgtcaagacccaacccaattagaacacagggaattttgcctgggaaagggagcccttctaccctacacccctgctttctctcttccaaggatcaggtctgattcatgtctgcatcctaaaggctacaaataaactgtgtccggaaaggaaaatattatgtgtattgccttcttcaaggctaaaaaccagtctcaacagagaggggcagttttaaatatttttttgtaacaatagttctaactttagttagtaactgaagccatctgaaacactttttcataataatttatttattccccacaaagaacctataaaatgggtagtaaaattattccgaattc

SEQ ID NO: 689471 - DNA, 631 bp, Homo sapiens
tttaccagtcatggtctgaaccacatggcagggccagagggacagggcttggcttccctgagccgctgacctagcctttgttataacccaggtcctagtgatctgcagctccaagactttggcctttcatacccttgtaccattaaagtcaacagaaagacccagtgttttattttgccaggtaaggacattaagaaatacatttactcctactgtcagcttatgaaaggatattttaatacccctaaagcagaaaggtaggttttatattggaattaacacaaccactcactcaaaagtctatattgaatagcccaaaaggtggaaacaatccagatgtccaccaactgataaatggataagcaaaatgtgatgtatcccccattccaatggaataatatttgtcaataaaaaggaatcaagtactgacatatgctacaacacaaatgagccttgaaaatattatgctaagagaaaaaaagccagtcacraaaggccacttattataggactgaatgtacatgaaatgtccagaataggcaaatctatagagacatgaagttggctagtggtttccagggatggggaaatagggagaagtagggagtgaccactaatgaaacctactaaa

SEQ ID NO: 689472 - DNA, 1339 bp, Homo sapiens
attgaatcaatgtcattgttaaaaagatcttggagattgggtttgcatcacatccataatgaatattctggatttaatgtgaattcattcataaatttgatgtgtactcggtgcttcagaaataagacccaccagcaggtggcattctgaggcaaaaattcactgagtgccaccagacagggtcaatcattattgccttttctgagtctaccctgaatccattacgcctctaaattataattaatagcaatagcattttggttgtgtctactcaatcataggtaaatgaatttacaacttcaaacttaaaggggagattatgagagtttcaaagctctgcctagattacacctctttcattaggagcatatttgttattttgaaatggatgtctaaaggagatacatagctcagaccatattttcaacaagaagaaaagaaaaatgacaatctctttcttgccacctgtagttctttaacagtggctacttattagaatataaccctctcccttctctcacccctatatttatattatgataaatacaaccacataaatacattagaaagctgtcagtagtgaagggaaagaagagacaacacctatacactcatctaggaataaaactatattactctagcacaaaaggaataggctaccgacatgagttgtccgtttctaaatggctttgaaaacttagacattctataaaagaaaaaaaaaatttcttctaccaactcaacaaataagaaagatctcagatccatctaaaaatctaagcagtgcactagaggaagaaggctgataaatgaaagttcaattacatattttagcgagaacacaacctctactggaaaaaaaaatcaatatgaaagaaccatcatagctgcttacattgagggtgtaatacgcaggcttgttcctcctctagatgaccggaatccggtgttgagtcgccagaagctggctccccatgggtggtagccaaggatgtaccgctctccgtggtgctgaagtatagagctggtcaagtgagttaagttgcaacgatgtgaaagcgcgctcckctgttctttgtgttgcagtggtaaaaactcgccttccgaggcagaaccgtgttaccgtccttttcctaatcggggggaaatttcccagagaacatgacggagaagcatctgtgtgagagtggcatgcggcgtggtgatgggttggtatagtccccaccccctctccccgacgtagcttgaaagggaggtagcaactctttcttcctgccatagctcctcaggatttctacctgccctttcctctgccccagaatagtacatcacacacaca

SEQ ID NO: 689473 - DNA, 625 bp, Homo sapiens
atatctactacttagatactataatgaacactttgctatgtttgtgtatcacatatatatccatctccccatttttaaaatttttttgaacagtgtcttgctctgttcagaaaaataaaaaaatatggggagatggtatatatatatgtgatatatatacgtccaggctgcagtgcggtggccgatcttggctcactgtagcctctacctccccagctcaagtgattctcccaccgcagcctcccaagtagtagccgggactaacaggcgtgcaccaccacacccggctaatttttgtgtttttgtagagacaagttcttgccttgttgctcactctgtycttgaattcctggacttaagtgatcacctgccttggcctcccaaagtgctgggattacaggtgtcagccaccatgcctggcctccccatattcctgatatcttttcataggtcagaaatattttgtaattaaactttttttttttaaaggggaagaaacacatagagaaaagcttatacttttaatagttaaactagtacaggtcagaaaacaaatgacgcctacatatattacgtgaagtgctgcatttacgcatgattacttttcatagtaatgatagctaag

SEQ ID NO: 689474 - DNA, 654 bp, Homo sapiens
tcctttattttgtattatttctttagaaatgatttccagaaatgaagaagtatgggcaattttaatgttcctagtgttgccaaaataattccgaaggcacgtggagaaggagcttttatctccaattgcttctctgagccccttctttctttcctcgtttccaagtgaaggaagaggaagaggaggaatatgattgaccagaggcccaggcgcttgttgggttacctttaccgtgggcggggtcactgggcagaaagaagtctggagacggatacagtgtctcctttctctgccaatctgttgartgcattcccagatgaaaactgacccagaacatggacccttaaaggaagcctgggcctttccttggctctcttttctcccatgcagcaagcgggtctgactcctgcccgggtagatccttgctaagctcagaggcaaatgcattttctgctgaggtctctttctctgtggcttcgtcgcatacagctctgatagatgtgcaccgtgtcatctttctctgcaaaatggcccacccaagattcaggttggggagaagttgaacctttacgtgtctagccttggctgtgcagaacagtttcacacaccagaattctgctttggggtttggggcctaaagcccagctaacaata

SEQ ID NO: 689475 - DNA, 2454 bp, Homo sapiens
gccctctggaaatccagtttctatggcggcctaaacaaggagtgtcttggttccttaccagaggaatgtgagggatgaatcctataaactatgggctggccccaaatgtccttgttgtacattctcttgccaccctgaatttgtaatttcttatgtaacgggatgttaaatttgacttttggtgttttggcaaagtatccaagggttgagaccatctgtgcagtacatgctaagagattgtgaaatcagttcttgttttaaaaagtttttaggttgtcatccacatggaggacattaatgggagaggccaggggacagattgagagagagcggagagcaggtgagtagttctgctgtgaaagttgtcgcagcattgtgtgcgtgtgtgtttgtgtgtgcgtttgtgtgtgtgtgtgtgtgcttccctttcccacctcatgggggaagagaggggtgtatttctctgcccttcctccaagccagatgaggaaggcttctgagaatcatttggaaaaatgcctggcactgaagtgcttagtgactggtgcacgactcatgcctgaaggatctgaaggagagagactgaaaattctcctggcagccttgcgctttctcaggcagacactttatggggggctaagatcatcctaggactcagccttgagctgttagaaactatgttggtgtttaagccttttaatgtgggtggggggaaagaggggtgtccaaaatcatttgtgctgagaatctgtagttcaatgggccaaggctgaggtctaattgaagagaggattcagaggagcttggttaaagtttggccaaggagggaatcttcgttgaggggcaaggtgaccccaacagtgtctaggacagactgctgggtctcttcctggccttctggctgagatcaagtgtaggatagaatgctggaagggaggggctaggtcagctggaggaggcatggcctatgtcagggaatcgcaggtggccaatttcatcaatggcagaagggagtggagaggaagccttcatgggagagagaaccagcacattgacaacttccatgactggggacattcagtgagtacagatggccctggctctgtatracttctcaccttctttacctctccaatcactcctttctgctccttgggcctcttgccctgggcccagaggagcctaaagaaacacagtaaatgagggaggaggataagaaccggtaaagaaacccacgcaatccccttctcccctgcagcttctgagcaagagccagtcccaagctaaaaagtggggaagacgttttaattggttgagattgcagccttaccattagaatgaatgagactttatacattatccaaaactgaggcattctttaatgcctgagtgaccacaatagctataggatccatctaagatatgtaagatatgtggggaatagaaagagagagaagatttgaaggagcagtgatgagaaaatacaattgctttcgctgatcccagttcattcagtaagctggttacagtctttaaaatgttcttcttttctgctggactttaagctctatgagggtaagaaaccatgattctcagcaccaagcaccgtgtgtagctcatagtagctgctcaatagatatttgtttaattgcactgagttgagttgaagggtttgggcaagaattgggtgaatgcgatgccatgtctagcaatttagtgtgagagagagagaaaccacacctttaccccatttaggattccagtggaagatgcatgatccgatggcgagagcaccacacagcaagccccaggttctagtccaggctctgctgccaataggctggttacgttgggcacgttaatagaattgcctgtgcttcagtgttttggtctggaaaactgaagaggtcagttggattggtaagtggattccaaacagagctgtatatgagaatcatatgggaaactctgtaaacaccgattcctgggcgtactcccatccatctgattcagtgtctagagtaggtcccaaaatctgtagtatttagggtttcctagataaatctgatgcacaagtcaggtgaggaaccactggttaagatgcttgctaagggctgctcaaactttgaagggtccaaattgctttccttgtctgaaaaatgagaatagtgttagtatctgccccatagggttagtgtcaggattaggtttggaagatgcttgtgaagggttgagggcagcttctggcacctgctacccactcaggaaataatatcccataaattatagaaataaatgtttgccaatagagtagaactgtcaactttaaaattggttttaaacccacaaatagaatgtcaaatcttttcttatttttgttttatttttttacacatttctagtctgggccatgctctttttccttctcatgtgtttgtaattattttctttcaa

SEQ ID NO: 689476 - DNA, 656 bp, Homo sapiens
tccagatgctgggcaggtagtgtttaccaacactcccctcaatagctgcctcttattctcagactacctgatggctgagaccacgatgtctcttttgggcaaagtcgttctcatacttgctccataaaaggggaaaatacaggtatgggagttcctcttctggagtacagatctgaggcacatgcagctatgccctaacccaaatacacctcttggtcatgggtgacgagaataggagatacttctgcctgtgcattggagcctgcagtgagcaatgcttgctcgtgtttgccccaaaacctttttcagacaataactctttatatccatctttgtttctttattttttatttatttatttttttaatttgagacggagtcttgctctgttgtgcccaggctagagtgcagtggcacgatctcggctcactgcaacctccacttcccgggttcaagcaattctcctgcctcagcctccagagtagctgcrattacaggtgcccacaaccacacctggctaattttttgtatttttagtacagatggggtttcactatattggccaggctggtctcgaactcccgacctcaggtgatcctcccaccttggcctcccaaagtgctgggattacaggtgtgagccacggtgctgggcct

SEQ ID NO: 689477 - DNA, 921 bp, Homo sapiens
tttaatgtccagtcagggttgagaaccagtgtctcagaccatctgagtgaccttcagccctagtgcacacctgggcttgtttccttctctggattgccttccaccctccacccaataaaaaccacatgctgtttattgagtacctgtgtgccaggtcttgtgctcagcatgcataataacctgttattccttcttayagtcccccgaggtaggcagtatcatttcccatttcacagaggaacagcaggctgagaagcttcatacaaggtcattcattacgaagtggcagggctaagctttggacctcatccttgctctaactgggacagcatcctctaccgtccactgacaccagtgcaggtccatttggcctgtggaatatctgtcctgttccagagcccaaggctgcaagagatttcttctttcccacctagggagtagagggtggctaggacctgaggtcctgtggcttgatgtccccctttctggctgaaaggcccctcatctctgaattgctgtcagtcactctgggtccctcaaagcttcacaactcagagctggaagttttttccaaagcagttagcaaatcaggacaggctctgtaaataatttctatttttatttcaaaaccattttactttttattttaaagtcttaagtattgacatgtatgctttaaatggctactttcacccacttggggagggtgcggaacagcataaagtcgcaggcatggaaaaaattaaattcatttccttttcaggccaattggttgcattgagtatgttcttgctgtttctcctgtcatttctgcagttgctcatctctgactatggagtggtttaatagattctcattaatattataaaagaaaatattgacaagtgtctgataaatataaattcaagtggtgaaaataaa

SEQ ID NO: 689478 - DNA, 921 bp, Homo sapiens
tttaatgtccagtcagggttgagaaccagtgtctcagaccatctgagtgaccttcagccctagtgcacacctgggcttgtttccttctctggattgccttccaccctccacccaataaaaaccacatgctgtttattgagtacctgtgtgccaggtcttgtgctcagcatgcataataacctgttattccttcttacagtcccccgaggtaggcagtatcatttcccatttcacagaggaacagcaggctgagaagcttcatacaagrtcattcattacgaagtggcagggctaagctttggacctcatccttgctctaactgggacagcatcctctaccgtccactgacaccagtgcaggtccatttggcctgtggaatatctgtcctgttccagagcccaaggctgcaagagatttcttctttcccacctagggagtagagggtggctaggacctgaggtcctgtggcttgatgtccccctttctggctgaaaggcccctcatctctgaattgctgtcagtcactctgggtccctcaaagcttcacaactcagagctggaagttttttccaaagcagttagcaaatcaggacaggctctgtaaataatttctatttttatttcaaaaccattttactttttattttaaagtcttaagtattgacatgtatgctttaaatggctactttcacccacttggggagggtgcggaacagcataaagtcgcaggcatggaaaaaattaaattcatttccttttcaggccaattggttgcattgagtatgttcttgctgtttctcctgtcatttctgcagttgctcatctctgactatggagtggtttaatagattctcattaatattataaaagaaaatattgacaagtgtctgataaatataaattcaagtggtgaaaataaa

SEQ ID NO: 689479 - DNA, 2638 bp, Homo sapiens
tgatctttgttttctacaacagatactgtgtcatttaattaatttagactaaagaaaagcagtcaacattcagtaacaacatccccttaggggatataaatgaaaaattttccataccctacatagcagttagagcaaaggaagtgctgatatttatttatgaacttcagtgctcatagttgtaagcagcagaactctggctgatttcagccgagaagcatcatgtatgaaaagaatattggctatttcacagattataatgagggctggagaaagatacttcaggctaagcagtcacaatcatgccaaaagcaggcctgatgagaaaaaccctcactacattcaccaagcgtgagatgatgccgcttaagccacagccactgcagcatctggaacttggtcacctgcaactatcaagtactatcagcacctgagaaagtgactacatagtgtctgcttctttggcttctgattctgtccgctgtggttgagtttgatttttgcaggccatgtcataagttcatgccctctccaccagagaagctggaaagcaaaaacatggcagtttccacttttgtagttggggtggggtctacctgtttctgaaactcaaaggcatggatgtccccaagtgtatgaagcactgcacagaatttttgtaaaaagacaaatgccccctcaaatcagcattgccaggaataggacctccaacaccctcaacttcccaatcacacctacttcraagcctgtcaggcccttcctttgagctaaacaggtaacccagcatcctggccttccttggagaaaagaatgaattaccactgataagaatgaatgcaagaagacatatttttcccccagtactgtactttcccccaatactgcagcaaacttagccgcataaaatctgttgctctcatgttagaattcttttttgagttggccttgatcagattttaaattgggtgaaatgtcctattttgtgcctttgtctttacttactgagaacaacatgttctttttgatgggcccataagactaaagacttggatttgaaaccacggtttgaaagaaaactatgaaaatgtgatcccttttgggatattcatttgaccatgagaaccccaacaacaactggtttggaacaacagtggtataaaaaatcagtacagggtaaagaaaaatactggtagtggataaaagaaccagataccttaccagacatttatagagctcaagtccaagattccaagataggagataatcaaataaatagctgcctcttctgtaattgcattttaaaatctcattctatccacacaaattttccccctactgtctgatgcatgcttgggttgatacttttttttattaagacagatttattggtcaaagatttaattttaattcccaggtttgtttaaaagaaggcagtttcacaacccagttgttctggatatttatggaagacgaccaaagaagctgagatagccagaagaaaaaaaaaaacaaaaaacaaaaaactctgcagtttagcattcttgtccctgtaggatccttccttatattatggaaatttctgcagaccttaggccatgagtattgaacagatctcaccttccacagtttctcattgacctacagcacaatatagggttttttgaacataaaagaatcattgacaacctctctattactctaagaaattgtttacccatgtgataaagaagcctctcaaacttccttaattaaaagtatgttccatcgatgacccaccttcctggtggagaaactgaaatccacccagcctctttctcccctaccaattagatcactttctctgtttgcatcttctatcctattagctctggggtatcacaaagatgatttacttctgcattccatgctgccgagttaaagaacagattgcccggggtcttgaacatctctgggtaattgaagcttttgcctttggggttattactttgtaatcacactatttgaggagtttgggtgaggaaagcgctgaaggtttgtccgcctgatttgtctgtcctgctcatttcagcctactaagctgggtggtgactaatttcagaaaaaaaaaaaaaaggcagacctaagttacccctccttttatgatgctgtctggatagatgtgcccacaagatttcaatgttcttgcatctgataacattaatgtatttaagatggagagaagcaagaaaagaggtcaaaggaacaagaaaagaagaagacatcctgctgagtctgtccttacagtagtaatgatcattttgcagagatgtgtgggtttttcagaagagtcagccagagcagaactttgatactgctcaaaatttacatggttgctttaatttgaaaacaattaaaaaacaaaagagagaaagaaggcaagcaaggaagtagaagttctgtggataacactacgtttctagctactactactatccctgttgtttctcttttttaaaagggcattcaaaattcagtaaactacaatttaatgtattacagcttttaaagggaaatttctttacacatggcaacatataaggaacaaaaattgattgaattattgtatacgttaactaataaagttagttaacaagggtac

SEQ ID NO: 689480 - DNA, 1311 bp, Homo sapiens
gtaatctcggctcactgcaacctccacctcccgggttcaagtgattctcctgcctcagccttccgagtagctgggattacaggcatgcgccaccacgcccggctagttttgtatttttagtagagatggggtttcgtcatgatggccaggctggtcttgaactcctgacctcaggtgatctgccggctttggcctcccaaagtgctgggattacaggcgtgagccactgcacccggctaaaaataawtttttttcaataaaaaataaataaataaattaaataaataaataaatagcgagccttaaggggagacagacgtgtaactgaactgcacagtgggaacaggccacttcctggggatgtcatgacgctgacttttttcagatccacattgacatgagtctgcccaaatattactagtcctattttaattcatatatatatgtatatatatatattttttttttagatagagcttcactcttgtttcctggggctggagtgcaatggcacgatctctgctcactgcaacttctgcctcctgggctcaagcgattctgctgcctcagccacccgagtagctgggattacaggtgcctgccaccacgtccagcaatttttttgtattttttaatagagacacggtttcaccatgttgaccaggcttatctcaaactcctgacatcaggcgatccacctgccttggcctcccaaagtgctgggattacaggtgtaagtcaccgtgcccggccttaattcatatttttctaaaaaacaagaagttcacatatcaatgaaaatataaaagagaggaacataaggagtggaagaggcattttataatttatctagatatgacattttaattgtaattagctttattgatatatagttaaaattcaataaaattcacctattttaagtgcaaagtttaatgagttttgtcaatatgtacagttatgtattcaccaccagaatctagacacagaatgcttccaccccttcagaaagcttcccatgccccatactaatcctctttcccattctcagcccatggcaaccgctcatctgctctccgttaaaagttttgccttttctagaatttcgtatatatagaaacatgtgagtagtcttttgtttctggcttcttccacttaacacaatgcttttgagattcatccatgttatatgtagcagaaatttacgcattttattacctaatagaactcatttgtatggataacacaatttgtcttgattcacctattgattactgataaggatttgagtaatcacaaattttttaattg

SEQ ID NO: 689481 - DNA, 1311 bp, Homo sapiens
gtaatctcggctcactgcaacctccacctcccgggttcaagtgattctcctgcctcagccttccgagtagctgggattacaggcatgcgccaccacgcccggctagttttgtatttttagtagagatggggtttcgtcatgatggccaggctggtcttgaactcctgacctcaggtgatctgccggctttggcctcccaaagtgctgggattacaggcgtgagccactgcacccggctaaaaataaatttttttcaataaaaaataaataaataaattaaataaataaataaatagcgagccttaaggggagacagacgtgtaactgaactgcacagtgggaacaggccacttcctggggatgtcatgacgctgacttttttcagatccacattgacatgagtctgcccaaatattactagtcctattttaattcatatatatatgtatatatatatattttttttttagatagagcttcactcttgtttcctggggctggagtgcaatggcacgatctctgctcactgcaacttctgcctcctgggctcaagcgattctgctgcctcagccacccgagtagctgggattacaggtgcctgccaccacgtccagcaatttttttgtattttttaatagagacacggtttcaccatgttgaccaggcttatctcaaactcctgacatcaggcgatccacctgccttggcctcccaaagtgctgggattacaggtgtaagtcaccgtgcccggccttaattcatatttttctaaaaaacaagaagttcacatatcaatgaaaatataaaagagaggaacataaggagtggaagaggcattttataatttatctagatatgacattttaattgtaattagctttattgatatatagttaaaattcaataaaattcacctattttaagtgcaaagtttaatgagttttgtcaatatgtacagttatgtattcaccaccagaatctagacacagaatgcttccamcccttcagaaagcttcccatgccccatactaatcctctttcccattctcagcccatggcaaccgctcatctgctctccgttaaaagttttgccttttctagaatttcgtatatatagaaacatgtgagtagtcttttgtttctggcttcttccacttaacacaatgcttttgagattcatccatgttatatgtagcagaaatttacgcattttattacctaatagaactcatttgtatggataacacaatttgtcttgattcacctattgattactgataaggatttgagtaatcacaaattttttaattg

SEQ ID NO: 689482 - DNA, 654 bp, Homo sapiens
ttgaaatgtggaatagcatatgtaattgcaacttgctactacaagagctcacccttagtcgcagttttactttccgtggtttcagttacccacagtcagccacggtcagaaaataggtgagtatgatgtagtaagatattttgagagtgagagagaacagccacattcagataacatttattacagtatattgttataattgttttattattagttattcctgttaatctcttactgtgcttaatttataaataaaactttatcatagctctgtgtatatagggagaaaacaaagtagagtcagcccttcgtggccatgggctccacatccgcmgattcagccaaacttggatcgaaaatattcagaaaaaaaaaaaaaaaaaaccattaaaaataccaatacaacaataaaaaacagtacaaataaaaaaccaatattgtataataactggttacatagtatttacattgtattaggtgttgtaagtaatgtagagaagattgaaagtatatagggggtatagattatatgcaaattcgacaccgttttatatatataagggacttttgagcatctgtggattttggcatctgcaggagatcctggaaccagtgccctgcagattctgagggacaactgtccatatagggtcc

SEQ ID NO: 689483 - DNA, 719 bp, Homo sapiens
tgaagacaaagcctgtgaccttgtggcagttatctggagaggcagataacaagtgaacaatttatttactatggaaacagaagtgaggatgatggaaacatgaggaaagcttttgtctaaagcaagaatcacaggcatcagcctatagaaacaggacaaatggagaaaatcactggagagaatgacagcaaagaaacccctccagagagaagagrtctcagtccagcctcacaccaagtagagcctcatcaaaacgttctgttctcatagggagttgggggcctgtaccagaggccatgaagtctcttggagtccatgctatgtgagtggtgcacatctccactgcccaacccatagaaaactcacctaagttttctcttttctcttctatagatatttttggaaatgagttggggacaaggaaaaagctatcattgcacagacatctaccccaattctgcctcctgctgcactctcactgagagacaatggtccaagaagcactctcccctctccatggctggctagctaggttcacattggtgcaaagagcactcgacattgccagaagtgtgcatcatcatgtccccatggtaaggccctctcaccacctctcctcagtgactcagctctgcattttcttccatccgatactcttatctcaacccaaggggtgtcttccatttatgatgtgcaaaagaaaggtacagtctttagca

SEQ ID NO: 689484 - DNA, 719 bp, Homo sapiens
tgaagacaaagcctgtgaccttgtggcagttatctggagaggcagataacaagtgaacaatttatttactatggaaacagaagtgaggatgatggaaacatgaggaaagcttttgtctaaagcaagaatcacaggcatcagcctatagaaacaggacaaatggagaaaatcactggagagaatgacagcaaagaaacccctccagagagaagaggtctcagtccagcctcacaccaagtagagcctcatcaaaacgttctgttctcatagggagttgggggcctgtaccagaggccatgaagtctcttggagtccatgctatgtgagtggtgcacatctccactgcccaacccatagaaaactcacctaagttttctctyttctcttctatagatatttttggaaatgagttggggacaaggaaaaagctatcattgcacagacatctaccccaattctgcctcctgctgcactctcactgagagacaatggtccaagaagcactctcccctctccatggctggctagctaggttcacattggtgcaaagagcactcgacattgccagaagtgtgcatcatcatgtccccatggtaaggccctctcaccacctctcctcagtgactcagctctgcattttcttccatccgatactcttatctcaacccaaggggtgtcttccatttatgatgtgcaaaagaaaggtacagtctttagca

SEQ ID NO: 689485 - DNA, 1540 bp, Homo sapiens
tgtaggctatatatatatattttgtttgtttgtttgtttttgtttttgttttttgagacagagaaaagtatatcaaaaacaaagatggtctataaaatctaccatttttattccctaaattatcaatatcatttttacacatgccttattacatatgtgctgtgaatacatccaccataactcatgttttgatgtgtaaatacatgagtgtaaacaggcaattcccctaaataaaacctaatatacagaaatctaaattaacaaataaaaaagattatttatggccaggcattgtggcttatgcctgtgacccagcattttgggaggccgaggtgggagggttgcacaagcccaggagttggagatcagtctgggcaacacagggagatcccatctctacaaaaaatgacgaaattagttgggcctgatggcatgcaagccgatagtctcaggtacttgagaggctaagaggatcacttgagtctgagagatcaaggctgaaagtgatacctaattgatggtgccactgcacttcagtctgggcaacagaacaagactctgtctcaaaaaaaagaaaaagaaaggaaaagattatttaaatttgagttgatatttttctttgcaaagaattcttcaggctaggcttggtggctcacgcctgcaatcccagcactttgggaggtggattgcatgaggccaggagttcgagaccagcctggctaacatggtgataaccccatctctactaaaaatacaaaattagctgggcgtgatggcacatgcctgtaatctcagctactcaggaggctgaggcaggagaatcacttgaacctgggaggcagagattgcagtgagctgagatcgtgccactgcactccagcctgggtgacagagcgagaccctgtctcaaaaaacagaaaagaaattgcaatattctaattttgctttttaaaaaatccttgctaagatgacagcaagagaaggaaaaagaaaaataaaataaaaattccttgcaagtagagacctaatcttgaattcacctttggatgtccaatgcatggcacagtctccagcacactgtgagagagctcaatgtgtgagaaactgatgagtcaagtttccttccctctctgaaccgccaggatgtgagatcattaggacactctgtgtcaattgtctgatgacaattgacagtgactcaaacaggcagaagagcagcactaggcataaaaagaagaagctaaaacctccaygaggagggagggtaggagatagacttatagaaaaaataatattacatcttacatttgtatttgtacagttttcaacgtgctttgtttctcactgtttgaagtatgagctatttactatataaaccccgcaattcagatagaaaagaagaaaatgcaacactttcactgtagagtgttatgtgctactgaaagagaaaaatcacagtttaactttttctacaagtagactgaaggtttgtacgtattatggaatctgataaacaactagtttaatatttacgcattga

SEQ ID NO: 689486 - DNA, 642 bp, Homo sapiens
gagtttaactcttgtcacccaggctggagtgcagtggtgcgatcttggctcactgcaacctctgctcccaggttcaagcaattttcctgcctcagcctcccaagtagctgggactataggtgcacaccaccacgcccagctaatttttgtatttttagtagagacagggtttcaccatattggccaggctggtctcgaactcctgacctcaggtgatccacctgtttcagcctcccaaagtgctgggattacaggggkatacaaatttttcctccttggctatcagttgtaccacttgccacatctcagttttttccacattttgataccagctgctctggttcttccagttttagggtctcttgatcaagatattgtggttgcctctctagaaacaggctccataacattcttcttcttctctctctctctaattaagctattgctgtattagcacttgtaagctacccagtgactgcaggacatgactgcctcaccttctagtctgtgcccaaggtgaaatggatgtggtagtgattcttccacagaccaagtggatccagtgagttgcctataggacatccagaagactcactgacggagtgttgtgggaaagagcagaaagctagaaaccacctctca

SEQ ID NO: 689487 - DNA, 702 bp, Homo sapiens
ccagggctttggttgaaaccacccggaagagaggcattctcccccttggctgggagatgtggggctgcaagctgggggccagcttctctccacgaagggaaattctgcctgggaaggaagccagtgtaggggaaagccaggcttgagaggaaagagatcaaggaaaagtccagatgacacccagtgagtccctggatgcagtcagaccccaaagccaggtcttccccagacgtaatgtgccagcagattctttttctgctaaagttaattagagttggttttctgttgctgaaggagtgatagaaggcctaatgcaagcagcaactacgaaatcagaagcttgtgtctgatgctaaatagtgcatcactgctgtctgtttagcactcggcgactgtttgggatcctctttagcttcttataatttgagctggacacttgctctttttcccttatttcacagcttgacccatggtaacagcctgcagakttgaatgcttgtgtggagaaggcatgtggcttttggctaagtgactgtcttttttaattggctgcctggagtgggttaagaaatcagtggggaagaatgctgggattgattagtgatgtctgccacaggagcggaaaatgagtgcaggtgtgcaggctacatccttgccagcgtgaattagtcttcgatgttgtttattccaagtcaataaaag

SEQ ID NO: 689488 - DNA, 665 bp, Homo sapiens
aaagcatggccgctctaatttgcatgggttaaactgcccatggcacacagcatgcaaatggggaaaaagcaatttgacatcagtcttaccatttctccctatattagtgacccatgtgggaatcagagcattcagtgagagacaggggattagggagaaagaaactcattgaaaaatactaaatcccacagttttctatggccatattctctctttatttcaatccagaaatgtatgcatccaattcacctgatgtaggattagagcaacctgggtgatgacattgggtaatccatcctaatcggttaaaagaaaagctgtgataaatgtgtatagttaaattataattttattttgagaatacaacaaaacattgtttctctactgccacctgtatgtcaggcattactattttggttcacactaggaaaggaaacactttaggtgttttacgtggtctagaaatttaggcaattcatagtgttaactgaagggtcatttctttytaatttcatagaaatcaaagggaaagcaaaatggcttttaaatttgtcttgatgacacctgatttgaaacccttagaatatggaagctgctaaaaattcaacctttgcattacatacagaaacacacttggctagggcttttgcacacatgcacatttg

SEQ ID NO: 689489 - DNA, 665 bp, Homo sapiens
aaagcatggccgctctaatttgcatgggttaaactgcccatggcacacagcatgcaaatggggaaaaagcaatttgacatcagtcttaccatttctccctatattagtgacccatgtgggaatcagagcattcagtgagagacaggggattagggagaaagaaactcattgaaaaatactaaatcccacagttttctatggccatattctctctttatttcaatccagaaatgtatgcatccaattcacctgatgtaggattagagcaacctgggtgatgacattgggtaatccatcctaatcggttaaaagaaaagctgtgataaatgtgtatagttaaattataattttattttgagaatacaacaaaacattgtttctctactgccacctgtatgtcaggcattactattttggttcacactaggaaaggaaacactttaggtgttttacgtggtctagaaatttaggcaattcatagtgttaactgaagggtcatttctttctaatttcatagaaatcaaagggaaagcaaaatggcttttaaatttgtcttgatgacacctgatttgaaacccttaraatatggaagctgctaaaaattcaacctttgcattacatacagaaacacacttggctagggcttttgcacacatgcacatttg

SEQ ID NO: 689490 - DNA, 643 bp, Homo sapiens
ttatgtagatattgatgctttgatatggttttaggttcatgtgaaatggattttggacactgatattttcaatgaatggatgaatgaggaggattatgaggtggatgaaaataggaagcctgtgagttttcgtcagcggatttcaaccaagaatgaagaggtattttctttggcacagtttctcatcattaagtctgtcttcttggcctaaatgttattaaatcttcatcagtaagctgtcatatacaaaccacttaggaactttcacatctgcctgatggctgatgtgccatcaggtgaaaattccaaagtggctgtaatagccatctcagaarcaataacctcccaaaaagtggtatgaaaatcttaaaaggttattaagatttaaagtggcccatgcagaagggtagtggtatagctgattttgcccactagatctgaagtgtaatatcacagcagaatttaatgtagctgttggttttcctatgcaaaactcattttgtttagtatgtatatatattttttgagacagagtcttgctctgtagcccaggctggagtacagtggcactatctcggctcactgcaacctctgcctcttgggttgaagcgattctcctgcctcaagcctcccaagtagctgg

SEQ ID NO: 689491 - DNA, 636 bp, Homo sapiens
tgagacagggtcatgagccaccgtgcctggcctacattctttttatatatatttaacatttcatctttttttttgagacagggtcttgctctgttgcccagactggagcacagtggtgcgatcttggcccattgcagcctccatctcctgggctcaggcgattctcctacctcagcctctggagtagctgagactacaggtgcgcaataccccacccagctaatttttgtattttttgtagagatagtgtcttgtcttgttacccacactggtctccaactcctggtctcaagcarttcttccacctcggcctcccaacgtgttgggattattttcgtgagccaccacacctggcctgtttcttacatttctaatctgatttttgttgttgctgttcagagattttggaactacctgagatctttgcggggagcgcactgtcaactataatgagataaaaggggtgccaggacaccagtggttattgaaccaagatgtgatctctaggaggcatgaggctcacagtggtgacatataccctctactctgaatataacgcataccagattgagttctctaaaatatatgtatgcatgtactttaatggaatacatttgccttgtaatgaccacgcct

SEQ ID NO: 689492 - DNA, 614 bp, Homo sapiens
gctgtagggtygacgaagagagcaggagggatgaaacgcacaggggcgcaacagcaagcagctcaagagtgttttgtgggccatacttggagtagatccttaacgttgttttcgcattattgtttttatttccctcacagcatgcaatgtctttttggactaccaggctagtaatcccagaagtcatctgacctgaaccatgttgcaatccattccatagtcctctttaggacaattttaacctatgtattgatcacattgttttggcatggacctttgagcccatatttaagttaattaaatttttcccttcctggaagttgaggtttatcttcaccttagaaacagagaggaaagagaaagagaaaaagagagagagagaaagagagatgaacttcagctatttcacagtaagggggaaaaaaatacatcctatctgtattttttaacacttcccacaaaagaaattcaggaaatgctatcttttttacagtaagtacaatattgtgccacagccaaaagatgttcctgtttgctgtgttcaaccacatgttgaaccgacagaggccagaggaatgctaagcctagaaggtatgtgcagggggcatgcacaa

SEQ ID NO: 689493 - DNA, 592 bp, Homo sapiens
tgcagtttgtctcttttattatataaagtttctctggatgctctatttagcaagctccaatacagtcttttgatccagacttaccatatagccacctcttctagctgcaaagatatctaaaatgggaattctgattggatacattgccacttttacaaaattgggggtctggccaggtgccatggtttatgcctgtaatcccagcgctttgggaggctgaggcgggtggacaacgtgaggtcatgagttcacaaccagcacggccaacatagtgaaaccctgcctctactaaaaatacaaaartcagctgggtgtggtggcatgtgcctgtaatttcagctacttgggaggctgagacaggagactcgcttgaatctgggaggcggaggttgcagtgagctgagatagcaccactgcacttcaacctgggtgatagattgagactctgtctcaaaaagaaaaaaaaaaggtggttggaggggttctgttagtaaagtaaaaaggagagaaccatgctaggtagacaaccatcagactctgccaaaatatatttctcatcttgtgtactttaacgtttggtcattttttaaaa

SEQ ID NO: 689494 - DNA, 956 bp, Homo sapiens
tggctttaagaagttaacacttctttttattctttttatactgtgtccttgaaatctaagtgagatgtatgtgttcttatggctttaacccaatgacctctactaaatccctccttcagggaggcagggaggcagggagggcagtctgtcttctccagtgatcccaggtgtgcaggctgtgctcagcatcagaaagttcacttggcaggcagcaaggcccatggtagtactctagttcttcaggagaagaaaaccagaatgacgcaagtgccagaccctaaggaaatacagctgtggcaaatcagtttcctcttgagtgtagtggcttcctagagaaagatcctgaagtcacttctggagtctgcaggaaagaatgctgtgatcaactggtgacatctgctgagatgttttctattcctgcattttgtagtaagccaactactmagattgtatcttaggcccaataaagaaaaagacatggtccaggattgggttatgtgtgaaagcttgttctcaaaaacaagaaagaagcccagttcctagaactaggttagcaaaggactagacatatatattggtttaatactcagtcacctgaatactgaattgggacttcttaataataatatgttctgattgttgtggggcctggaatagggctgaggctatactttgtggtctcctggctcaagcttgagggaggaaaaggcttgggagaaccaggcaatttggtagtaataatgtcagctagtagacactttgtggtttgccaactggtgccccttaagggtattttggatacaaagggacctcccttggagtgtacctcttgagtctcctccagctctcctgtgaccaggacaattttcccactcccctaatcatcaacatcccatgaccagaaaaagaacagtttcaagatagaagagatgtaagcatttattaaagtaatccct

SEQ ID NO: 689495 - DNA, 956 bp, Homo sapiens
tggctttaagaagttaacacttctttttattctttttatactgtgtccttgaaatctaagtgagatgtatgtgttcttatggctttaacccaatgacctctactaaatccctccttcagggaggcagggaggcagggagggcagtctgtcttctccagtgatcccaggtgtgcaggctgtgctcagcatcagaaagttcacttggcaggcagcaaggcccatggtagtactctagttcttcaggagaagaaaaccagaatgacgcaagtgccagaccctaaggaaatacagctgtggcaaatcagtttcctcttgagtgtagtggcttcctagagaaagatcctgaagtcacttctggagtctgcaggaaagaatgctgtgatcaactggtgacatctgctgagatgttttctattcctgcattttgtagtaagccaactactcagattgtatcttaggcccaataaagaaaaagacatggtccaggattgggttatgtgtgaragcttgttctcaaaaacaagaaagaagcccagttcctagaactaggttagcaaaggactagacatatatattggtttaatactcagtcacctgaatactgaattgggacttcttaataataatatgttctgattgttgtggggcctggaatagggctgaggctatactttgtggtctcctggctcaagcttgagggaggaaaaggcttgggagaaccaggcaatttggtagtaataatgtcagctagtagacactttgtggtttgccaactggtgccccttaagggtattttggatacaaagggacctcccttggagtgtacctcttgagtctcctccagctctcctgtgaccaggacaattttcccactcccctaatcatcaacatcccatgaccagaaaaagaacagtttcaagatagaagagatgtaagcatttattaaagtaatccct

SEQ ID NO: 689496 - DNA, 956 bp, Homo sapiens
tggctttaagaagttaacacttctttttattctttttatactgtgtccttgaaatctaagtgagatgtatgtgttcttatggctttaacccaatgacctctactaaatccctccttcagggaggcagggaggcagggagggcagtctgtcttctccagtgatcccaggtgtgcaggctgtgctcagcatcagaaagttcacttggcaggcagcaaggcccatggtagtactctagttcttcaggagaagaaaaccagaatgacgcaagtgccagaccctaaggaaatacagctgtggcaaatcagtttcctcttgagtgtagtggcttcctagagaaagatcctgaagtcacttctggagtctgcaggaaagaatgctgtgatcaactggtgacatctgctgagatgttttctattcctgcattttgtagtaagccaactactcagattgtatcttaggcccaataaagaaaaagacatggtccaggattgggttatgtgtgaaagctygttctcaaaaacaagaaagaagcccagttcctagaactaggttagcaaaggactagacatatatattggtttaatactcagtcacctgaatactgaattgggacttcttaataataatatgttctgattgttgtggggcctggaatagggctgaggctatactttgtggtctcctggctcaagcttgagggaggaaaaggcttgggagaaccaggcaatttggtagtaataatgtcagctagtagacactttgtggtttgccaactggtgccccttaagggtattttggatacaaagggacctcccttggagtgtacctcttgagtctcctccagctctcctgtgaccaggacaattttcccactcccctaatcatcaacatcccatgaccagaaaaagaacagtttcaagatagaagagatgtaagcatttattaaagtaatccct

SEQ ID NO: 689497 - DNA, 607 bp, Homo sapiens
gcctgttcagcactaggacttgcagtacttgtagcctagactgtctttcaaatttatttagggccccaaagcacttcagcccattgtggtgaggcttgctaaaactcaagttccagccactggggtagatgattcccctctggctagggctggtttaaatactccctccacggccaggcatcagctgagttcagacaggttttgctttccactgtgacaggacagcactgaattcaatgcatagtctcatgattactgcagtctccttctttcaagcacacaggtttatccatgccatgcagccattacaggatggggtagsggtggtgtcaatgattcaatagggtctttcccactctcttcagtgcctctttcaaagttatgaagttaaaaccaagtactgtgagtaatcacctgatttctggtaagtcttacaaaggagctttttatagctgttgaatttggtgttcctgggaggagggagggtagggagatgattggtggggccttctattccacgttcttgctctgcccctttgtccccaaaagcacactttgaaaaatcaataacatctttaatgttaaggtttttccagagatggacgga

SEQ ID NO: 689498 - DNA, 655 bp, Homo sapiens
gaagcattggcagctgggcgcggtggctcacacctgtaattccagcactttgggaggccgaggcaggtggatcacgaggtcaggagtttgagaccagcctgtgcaatatggtgaaaccccatctctactaaaaaaaaaaaacaacacacaaaaattagccaagtgtggtggtgcgtgcctgtagtcccatctactcgggaggctgaggcaggaaaatcgtttgaatccagcaggcagaggttgcagcgaaccgagatcacaccactgcactccagcctgggcrgcagagactccgtctcaaaaaaaaaaaaaaaaaaaaaaaaaaaaaaaaaaaagcattagttcacttgacagttaatcagattgtatttttctttttaaatcaggccttatgctgggggctacacatcagagttgaactgtcatgctgtctgccctcaaaaagtttgaaattggtcaagaagcaatatatcaagaacatgataagggtgtactattagggatctgccatagactgcaatgctggcacaaaggaagaagtgatctgttctgtccggggatggttgaaagaagaaaagcctcacagagaaggtaacactgtttgccatgggagatttaataaaagaaaagcagaaattagttgtaaataaaattg

SEQ ID NO: 689499 - DNA, 603 bp, Homo sapiens
  misc_feature 486, 581: n = A,T,C or G
taagagacaggtattaatggcctagggagctgtgttaggggtgaaaaaggaagtgacaaaaagattaagatggagagggatgartgagaccagagtgaggcaggacaagtaaggtgctgagcagaaggtggtgatgagaagcaggggaggcagagggtcagaagccaggagagaggccagattgaagaaaagcacccagagccgacctcctaacacttgtggtagcatccctgcccatcctccaaaagcctcaggcttggacggggcattcagtggccatggttccatttcaaaacagtcatcaagcccagcgcttttatcttcttgctgagatatcctgtctctgctcctctgcacagccccctctgtctcccaaaatcaggcctgttcttgcacctggattcttactgtaccacctatcaaatctcctggcttccctcctagcctcctgcaggccattctgcacattagaatcacctgaagcgnggtggggggggttgattctaattaattcagatgctcagatggtaccccagaccaataaaatcaatgtttggggggggtgggggatcaggcatcantcgattttaaaggaccttcagg

SEQ ID NO: 689500 - DNA, 1483 bp, Homo sapiens
gtgaagagctagaggagaagagatgaaaaatacaggcctacaaggtccataggaaagaaacaatgtgaaaggtgctaacattcagagtactggggctttggggacacagaagtgtctaaccagccaggaagtggaggtgacagtggtagtctgggagggaaggtcattgcaaaggcctcttagagaaggagatgctcatgctgagtattgaagaatgaatagaagtgagcttcacagagaagggatagccagcaaggtggacatcaattgcgaagacatagtcgtatccaagttgggaatatctggagtataatgtggctgtgaagtgtctctggcctatagaaagcacatagccatgctaccagtctcttcagggtcaagaaaagctattattctggcctagtgattctcagtcccagcacagattagaatcatgtgagatattttaaatactaacaaagtccaggcctcacccccagagatttggatttaatgagacttgagcatctctatttttaacaagctcccatgtgattggagggggcgggtctcagagtcacatttggagtctcagtaaacagatagctggccttggccactggcaacatggattctcctggttgggctggagcaagctggggctggagtttgcaggttgcctgccccattcctcttcttccttcctgcgtaggcatgtggccactttattgccttcagagggaagaaactcaggctgcagagttttcaggttggctgttcacctggtacaaaggtagttgagtgatctctggccactcccaggtgctcaagctgctgctccagcatccctgcattcctgccttgctgtgagcatttctccaagcacaagcataccctcgtggggagagcagggggtcaggattattggtagtagagggaagccttgtggtacacaccctagatgtatccccaaggaatacatgtcagtacttgtcaaaagcctagattcatgaaatttatcatagtacgtaatagaatttctcccattaaacgcagtgaaatgaactaaaacattgtaattagatgcataatgaaaataacagaatatgtaagaagaaatcaaaatagtgaatttgcatggcagggcttctgggcagtcagctaagtgtacaccccagctaagtgtctcccaggccactgcagccagacarcatgtgattcaaatctgtgctggagcagaagaacaaattgctccacgtcataaatcttctgggtcatctgcaaatagtggaaaccaggaatgttaaatcagtgaatgccaagggtgcattcatatatcaaaataaacatttgtatggacaacacaagtccaagtgggagaaatgtagttgcttttatgcgtaaaagggatagataagaatctatctactggatctttgaaacaatatttctatagtccctcccatatttccaagtcagctgtaggtataataaacagattttt

SEQ ID NO: 689501 - DNA, 924 bp, Homo sapiens
ttatgggtggaatggaacccctcaactagtttaaatgaatgaaaactgagtcacacattttgttttccacatgcggacactgagacccagggcgaaggcagggcttggaagatgttgttattcaagcaggccaggagctatttacgaggagaatgacccctcagaagtttgtgtgcgtgtgtgtgtgtgtgtgtgtgtgtgtgcgcgcgcgtgtggttttgaccaaagcagcagctgaccaaggccmaaaccaaacatccgcaatgaggaaaaataagcacaagtcttgagtgggtcccgggggtctccccagccaggttcactgccaatcactgaactccttttctttgccatcaggcaccccatccccattattcttgtccttcttctatcctgtgaggtacattctatttttcccatttcaccaatgaggaaaatgaggctcagagtaggtaaccccgttggggaaggtcacacagcatatacatagcagaggcaattctgaatccagttatgtatgtttaatgctgacacatagcttctgaagaaaagctacttccctgtctctaaggcctttttctagagcatttgtagaaaagagtagtgcttgaaaagatgccaaggaatggctggtgaggattctggggctgtttcagtgtgtaggcaggggaggaacttaggattctacgtgactaggaagggtgactgggccagactcagccttccttgagcctctggttgctcatgaacgaatccggcttcctcaaagtctgcctccagagcaataacaaaagcagctcttgctaactcagtggctggggccgctgtgggcatatccccgtatctgggcacaagctttgctcattcattccatttttctcatctgttgaaaagtacctgatcggtaagcttctgttttgaaaa

SEQ ID NO: 689502 - DNA, 924 bp, Homo sapiens
ttatgggtggaatggaacccctcaactagtttaaatgaatgaaaactgagtcacacattttgttttccacatgcggacactgagacccagggcgaaggcagggcttggaagatgttgttattcaagcaggccaggagctatttacgaggagaatgacccctcagaagtttgtgtgcgtgtgtgtgtgtgtgtgtgtgtgtgtgcgcgcgcgtgtggttttgaccaaagcagcagctgaccaaggccaaaaccaaacatccgcaatgaggaaaaataagcacaagtcttgagtgggtcccgggggtctccccagccaggttcactgccaatcactgaactccttttctttgccatcaggcaccccatccccattattcttgtccttcttctatcctgtgaggtacattctatttttcccatttcaccaatgaggaaaatgaggctcagagtaggtaaccccgttggggaaggtcacacagcatatacatagcagaggcaattctgaatccagttatgtatgtttaatgctgacacatagcttctgaagaaaagctacttccctgtctctaaggcctttttctagagcatttgtagaaaagagtagtgcttgaaaagatgccaaggaatggctggtgaggmttctggggctgtttcagtgtgtaggcaggggaggaacttaggattctacgtgactaggaagggtgactgggccagactcagccttccttgagcctctggttgctcatgaacgaatccggcttcctcaaagtctgcctccagagcaataacaaaagcagctcttgctaactcagtggctggggccgctgtgggcatatccccgtatctgggcacaagctttgctcattcattccatttttctcatctgttgaaaagtacctgatcggtaagcttctgttttgaaaa

SEQ ID NO: 689503 - DNA, 2046 bp, Homo sapiens
  misc_feature 1162, 1163, 1164, 1165, 1166, 1167, 1168, 1169, 1170, 1171,1172, 1173, 1174, 1175, 1176, 1177, 1178, 1180: n = A,T,C or G
cataaaattaaacatcacaacttctgtatacccatcactcagattcagccattatcaatgaaattgctacatttgctccagctggcccccttcttttctttttttctgttggtgaagtgttttgaaacataccccaggccctatatccttctatcccaacctactttataagtcaagctatccaactgcaaggcatgcccatagaaccccgcacctctaagagctagctcggtcctcaactgtgagaaacctggcctctcagagtgcagagaggaggcttcctgatgtgtaggcccaatcggcatgcccaaaaggtgaggtctgatttgtgagacaatttccacagtcttagaaagaagtttcctctatgccccagccacgtctgtttataacttgaccttggccaggggtggggttgggggcagggaaaaagacttgcacgttccactccagcaaagcgctctctgtttttccatggccatacattgttttcattttcatgttgcacccgcctgctccccatccatttattgctttctcctccttctcttttcccttcttcctccccctcattcttcctccctggctttgaggcgtctggacttttgcacaccagagaaagaaacctatttaatctaccatgtttacaagctgcgtaaacaaggtacagtgagtgaatcatggaaaaaatgcactttatgtgaaaaagttcattatatgactttgttctattaaaacagccgggtgtaactaaccccaaccagagaatttggaaaaaaggaaaaaaaaaaaaggagaaaagaaaggaacccctgaaaatgccctgttagcatttatatcttacaatttcayattagcattcatataatttctgctggtttaagaacatttaaatggagttctcctctagggagaagatatagggactcattttctgttgctttctaataatctcttccttaaaaatatatacatatattttttaaaattgtcccagtggatttaaggaaatagggttaaaaaccaaccgactgaattagttcttttcttgagttgttgagtaattggtcatcattcttctaccttactctcattttgtttgggtcttctaacttaataatttctgtgtcgttattattgtggggcttccaaaatttttttnnnnnnnnnnnnnnnnntntgagatggagtctcattctgtcacccaggctggagtgcagtggtgcaatctcggctcactgcagcctccacctcccaggttcaagtgatgctcctgcctcagcctcctgagtagcttggactacaggcacacaccaccatgcccagctaatttttgtatttttagtagagacggggtttcatcatattggccatgctggtcttgaacttctgaccttgtgatccacctgcctcagcctcccaaagtgctgggattacagacatcagccaccacgtcaggtccagatttttctatttttcttatgatgataacaatagcaagttattaaaatgcactggcactatgctgaacaccccacattaagaattttatttaatcttcacaagagccccatgagaatatggaggtattgtggggttaaggaactggccccagttcatggttaagaaatggtagcactggctgggcacggtggctcacccctgtaatcccagcactttgggaggccgaggcgggcagatcatgaggtcaggagatcgagaccatcctggctaacatggtgaaaccctgtctctactaaaaatacaaaaaattagctgggcgtagtggcgggcaccggtagtcccagctactggggaggctgaggcaggagaatggcgtgaacccgggaggtggagcttgccgtgagtcaagatcgcgccactgctctccagcctgggtgacagagtgagactccgtctcaaaaaaaaaagaaatggcagcactgaggcttaagcctcacagccaagcatcggcatcattcaagtctaattttctaagtaagaaaagccaattggaaacaatgactatgttaatagtcatagaac

SEQ ID NO: 689504 - DNA, 2046 bp, Homo sapiens
  misc_feature 1162, 1163, 1164, 1165, 1166, 1167, 1168, 1169, 1170, 1171,1172, 1173, 1174, 1175, 1176, 1177, 1178, 1180: n = A,T,C or G
cataaaattaaacatcacaacttctgtatacccatcactcagattcagccattatcaatgaaattgctacatttgctccagctggcccccttcttttctttttttctgttggtgaagtgttttgaaacataccccaggccctatatccttctatcccaacctactttataagtcaagctatccaactgcaaggcatgcccatagaaccccgcacctctaagagctagctcggtcctcaactgtgagaaacctggcctctcagagtgcagagaggaggcttcctgatgtgtaggcccaatcggcatgcccaaaaggtgaggtctgatttgtgagacaatttccacagtcttagaaagaagtttcctctatgccccagccacgtctgtttataacttgaccttggccaggggtggggttgggggcagggaaaaagacttgcacgttccactccagcaaagcgctctctgtttttccatggccatacattgttttcattttcatgttgcacccgcctgctccccatccatttattgctttctcctccttctcttttcccttcttcctccccctcattcttcctccctggctttgaggcgtctggacttttgcacaccagagaaagaaacctatttaatctaccatgtttacaagctgcgtaaacaaggtacagtgagtgaatcatggaaaaaatgcactttatgtgaaaaagttcattatatgactttgttctattaaaacagccgggtgtaactaaccccaaccagagaatttggaaaaaaggaaaaaaaaaaaaggagaaaagaaaggaacccctgaaaatgccctgttagcatttatatcttacaatttcacattagcattcatataatttctgctggtttaagaacatttaaatggagttctcctctagggagaagatatagggactcattttctgttgctttctaataatctcttccttaaaaatatatacatatattttttaaaattgtcccagtggatttaaggaaatagggttaaaaaccaaccgactgaattagttcttttcttgagttgttgagtaattggtcatcattcttctaccttactctcattttgtttgggtcttctaacttaataatttctgtgtcgttattattgtggggcttccaaaatttttttnnnnnnnnnnnnnnnnntntgagatggagtctcattctgtcacccaggctggagtgcagtggtgcaatctcggctcactgcagcctccacctcccaggttcaagtgatgctcctgcctcagcctcctgagtagcttggactacaggcacacaccaccatgcccagctaatttttgtatttttagtagagacggggtttcatcatattggccatgctggtcttgaacttctgaccttgtgatccacctgcctcagcctcccaaagtgctgggattacagacatcagccaccacgtcaggtccagatttttctatttttcttatgatgataacaatagcaagttattaaaatgcactggcactatgctgaacaccccacattaagaattttatttaatcttcacaagagccccatgagaatatggaggtattgtggggttaaggaactggccccagttcatggttaagaaatggtagcactggctgggcacggtggctcacccctgtaatcccagcactttgggaggccgaggcgggcagatcatgaggtcaggagatcgagaccatcctggctaacatggtgaaaccctgtctctactaaaaatacaaaaaattagctgggcgtagtggcgggcaccggtagtcccagctactggggaggctgaggcaggagaatggcgtgaacccgggaggtggagcttgccgtgagtcaagatcgcgccactgctctccagcctgggtgacagagtgagactccgtctcaaaaaaaaaagaaatggcagcactgaggcttaagcctcacagccaagcatcggcatcattcaagtctaattttctaagtaaraaaagccaattggaaacaatgactatgttaatagtcatagaac

SEQ ID NO: 689505 - DNA, 596 bp, Homo sapiens
taaatgttttgttctatactattttctaaycctccaaactcagtctcctactcttttttctttttttttttgagatggagtctcacactgtcacaggggctggtgtgcagtggtgcaatcttggctcactgcaacctctgcctcccgggttcaggagattctcctgcctcagcctcccgagtagctaggattacaggcgcctgccaccatgcccggctcggctaattttttctatttttagtagagacggggtttcactatgttggccaggctagtcttgaactcctgacctcgttatccacccgcctcggcctcccgaagtgctgggattacaggtgtgagctgccgcgcccggcgtctcttactcttttatgttccagaccctctatcttgcctatcctcatatgctaccttgtttatttagttctccctctctcccttttatgcatacaactcctctggtaattacaattattatcctgattgattttcttgtgataacccttctaagcagctttggctctttctgttcagagagtgaggctgggagaaaaagctaagtaggtaaaggggaaatttgtgaataccaacatgtt

SEQ ID NO: 689506 - DNA, 572 bp, Homo sapiens
ctctccttccgagggcttaggcatttcatcattaatcaaggcatttagtgagttgacttaattcagtctttgactgcatttgattgccttcatcttgcatctggttctaccagctgcataattttttcttctactttcatttgcatttattttctgttgaatttattcccatgccatcagttttggtttcttcagtttcttctgsgatatctttttcttctgtgcaatctcctcttctggtttagtaacaatctgttcctattccataatgatcagctcagtgtggcagggagagctcatgtatgggttaatccaaccatgagctctttaaatctggccgtgcatttttaggtgctttgtttacctgcataagctcaatgaccagagagtctacatctaaatccctcagttcaacatgactctgcatttttatgcacatgcaagaaaaattcagcactctttttgggctactgtccctgtgtccaacctcactgtttggcctgggcatacccacaacgctgcccttgtaacattgcaatggtacacattgtttctgtacagtgacatctttc

SEQ ID NO: 689507 - DNA, 633 bp, Homo sapiens
aaattatgattcattttgagttaatttttatgtatggcatgaggtacaaatttaatttcatctttataaatgtggttatccacttgtcccagtaccatttgatgaaaagactatacttaccagttgaattaccttggcaccgttgtcaaaaatgcattgctgacatggtggcatgtacctgtaatcccagcgactcgcgagctaagtgggaggatcacctgagccccaggtgtttggggttatggtgaactatgatcgcgccactgcactcaagccagggtgacatagcaagaccctgtctcttaaaaaaaaaaaaaaaatcgaccataaaagtaaagatagttattaggtctggtctgtatgtctcttcttatgccagtgccaatgttttgattgttgtcgcgtttaaagtaagtgttgttcttttacaaatttttctggctactctggatcctttgcatttccatataaattttaggttcagctggtcagtttctaccaaaaaaaaaaaaaaaaagcctgcagggatttygataggcattgtgaatctatagatcagtttgaggaagattgctatcttaatgatgttcacttccaatccatggatgtggaatgtgtctccgtttatttaga

SEQ ID NO: 689508 - DNA, 627 bp, Homo sapiens
tccccagccaggatgcaacctcgcaggttgatctcagactgctgcgctagcagtgagtaaggctccgtgggcatgggacccaccaagccaggcatgggaggtaatctcctggtctgccggttgctaagactgtggggaaagtgcagtatttgggcgagagtgtactgtttttccaggtacagtatgtcacggcttccttggctaggaaaggtaaatcccccaattccttgcatttcccgggtgaggcaatgccctgccctgcttcagctctccctccatgggctgcacccactgtccaaccagccccagtgagattaaccaggtatctcagttggaaatgcagaaatcatctgtcttctgygtcgatctctctgggagctgcagaccggagctgttcctattgggccatcttggaagtgacctgatgtgatttcttatttactgcacattcccatctaattgtgtttagccaatgatttataaaaaatgtcacatttggctctttgcccttccaagatcaataggagggcccaatgtgggctggctgtgaaaatatatcaaacatgtcaccaagaagagggtgcaaactggggatagaaatttttttttaattaacaagtttagact

SEQ ID NO: 689509 - DNA, 611 bp, Homo sapiens
tttctgggagaacctaacctgagaagataggattaaattcagaggagaacaaaacactagcatgtggtgctcttgagggctgagagtgtctccattgccattgtatccccagcacctagggcatcatttggctcaggttagtcactcaatacatacttcattcagggaatgagaaacagaggtaataatttagcctctgagggagcaaagtagaaaactctgcattattgaacaaataagctgcattaatttatataggaattaactatttagaattttagaaggcaattttatatatgtcttctgcagatattaacaactttattttacagatgaagaaacttaatttgatcattacattaacttgcccaatgctgtgctgtggatcgtagtgctggaaatcacaccatggtccttgcagcaaagtcatgcttttcctgtcaccatcagcgtgttagcttgccagcggcatgatgcctttgccaccatgggatagaaggacatattcagttgtcaggtttcagccagacaccwcactgagcataatccaggttgcctttcttctcttcttttaaaatcttctgacttagaggtccctaacctggggccca

SEQ ID NO: 689510 - DNA, 2176 bp, Homo sapiens
tggtggtgagtgctaaggacaaaaattaaagaagaaaagcagataaaaagaactcgggatatagggaggaggttgcagctttagctgggagcggccagggaaaacttggctgagcaggagatgctagaaaaagggttgcagggtggaggaagccggtcatgcagatatcttggaggacagtattccaggcagggagaagggctgccatgggagcatggctggcacgctgaagggacagtgggagggcccatgctgctggagcaaaggatcgaagggaaagtggtgaaggaaagtcagagaagtaggtggagagttcgtggagcctggcaggactctgggaaaccattcgaaggttttaagcagagagatatgatctgacttgagttggatctcaggatcactctgagggacagttgagaataactaaagagaacaagttgcagaagtaggtcccagctctacaagagacaaccagctctgaaaatgtctggctggagttggggagggaatcctataaagagagggcagggtaccccgcagtgccttcaaagcatcagccttaggggatgagtcaagcctgtcttagagcaaacttttcaccatgaggcccgggaagtaaaccctgcattcaacggaagcaagaagcctcagaaacaaatgggtgcctctaaataaagcattcctttacatttatagaggccattaatcccattcgaaccggaaagaaggaaaacaaaccacggcagtcagttctccaaggccctcggctccagccaactggaaatacctgtgaaaagagaccctatcccattaacccagctgcacactgccatgtgaaaggggccctattatttaagtagtttgtaattgtcccacattactgatatcgttaaagcatctcagaatatttccatggccaggctgaataagaaaaagtagttaccaggccacgcaggcacaaaaggccttttgccaaactacttagatattttaattccccgttgcctcagtagctaaataagcatggagaacaagcaggcggggaatactaattagagctaattagaccctgccctcttctgcctcaatcccctttataaaaagctcccccaactcaaggatgatggagttaaaatgtaaatccataggataaacagcagtctacagaccaaacccactgtttgtatttcattgtcctgtcagctctaaacctgtgcctggttacctacagagagctgcagacccagccaaattccaacaaccccatcacagaccacaggaaatgtggtagggggttgggggtagaggaagggtgctgccaacatgagtccactaaataaaacaaagggctttcttaggatgtgcagagcattcactagaagaacattcgattgcttttttaaaaagaaatgaatgtgatagcacacataattccagcggtgttgcaggatcctctttataagacggtgttcctctctctgtcttagcaaaggcagcgtggaaaagcctcacctcagtgagacccctggttttgtgggaagaccacatcctaggattctgtctgaaggctcttggccataagataataaaaagagcaggagatagcccttggtggggacgggagggggttgtcagccggccagggacttgtttgaaatgagcccctgaaacctaaggtcagtttcctgctggaaatccgtactgagatgaaagtggggttagagcaacagagagaggcactcaaccactggtccaggaacacccaggcaggcatggccctgagggtcatctctttcttttctctgagtaactaggtttttttctttcaaataatgttcctagtggcaagacagaaacactccctgaataaagyacctgtagtgcttcaagaaaacaaagaagggaagggaagcaaaaaaaaaaaagaaaaaaaaaaagaatgttgaagttaattcagcaacactgaaaaactaggagaaatgacacagatgtgagtcaacctctgctaatcctgagaagcttcagggccctaagaggtaagcagcaagttctggaggccagtgccatggcttgctccaccaccaccaccaccaaaacctgtagtcaaagagatgggcagaggccagccgtggtggctcacacctgtaatcctagcattttgggaggccgaggcggg

SEQ ID NO: 689511 - DNA, 2176 bp, Homo sapiens
tggtggtgagtgctaaggacaaaaattaaagaagaaaagcagataaaaagaactcgggatatagggaggaggttgcagctttagctgggagcggccagggaaaacttggctgagcaggagatgctagaaaaagggttgcagggtggaggaagccggtcatgcagatatcttggaggacagtattccaggcagggagaagggctgccatgggagcatggctggcacgctgaagggacagtgggagggcccatgctgctggagcaaaggatcgaagggaaagtggtgaaggaaagtcagagaagtaggtggagagttcgtggagcctggcaggactctgggaaaccattcgaaggttttaagcagagagatatgatctgacttgagttggatctcaggatcactctgagggacagttgagaataactaaagagaacaagttgcagaagtaggtcccagctctacaagagacaaccagctctgaaaatgtctggctggagttggggagggaatcctataaagagagggcagggtaccccgcagtgccttcaaagcatcagccttaggggatgagtcaagcctgtcttagagcaaacttttcaccatgaggcccgggaagtaaaccctgcattcaacggaagcaagaagcctcagaaacaaatgggtgcctctaaataaagcattcctttacatttatagaggccattaatcccattcgaaccggaaagaaggaaaacaaaccacggcagtcagttctccaaggccctcggctccagccaactggaaatacctgtgaaaagagaccctatcccattaacccagctgcacactgccatgtgaaaggggccctattatttaagtagtttgtaattgtcccacattactgatatcgttaaagcatctcagaatatttccatggccaggctgaataagaaaaagtagttaccaggccacgcaggcacaaaaggccttttgccaaactacttagatattttaattccccgttgcctcagtagctaaataagcatggagaacaagcaggcggggaatactaattagagctaattagaccctgccctcttctgcctcaatcccctttataaaaagctcccccaactcaaggatgatggagttaaaatgtaaatccataggataaacagcagtctacagaccaaacccactgtttgtatttcattgtcctgtcagctctaaacctgtgcctggttacctacagagagctgcagacccagccaaattccaacaaccccatcacagaccacaggaaatgtggtagggggttgggggtagaggaagggtgctgccaacatgagtccactaaataaaacaaagggctttcttaggatgtgcagagcattcactagaagaacattcgattgcttttttaaaaagaaatgaatgtgatagcacacataattccagcggtgttgcaggatcctctttataagacggtgttcctctctctgtcttagcaaaggcagcgtggaaaagcctcacctcagtgagacccctggttttgtgggaagaccacatcctaggattctgtctgaaggctcttggccataagataataaaaagagcaggagatagcccttggtggggacgggagggggttgtcagccggccagggacttgtttgaaatgagcccctgaaacctaaggtcagtttcctgctggaaatccgtactgagatgaaagtggggttagagcaacagagagaggcactcaaccactggtccaggaacacccaggcaggcatggccctgagggtcatctctttcttttctctgagtaactaggtttttttctttcaaataatgttcctagtggcaagacagaaacactccctgaataaagtacctgtagtgcttcaagaaaacaaagaagggaagggaagcaaaawaaaaaaagaaaaaaaaaaagaatgttgaagttaattcagcaacactgaaaaactaggagaaatgacacagatgtgagtcaacctctgctaatcctgagaagcttcagggccctaagaggtaagcagcaagttctggaggccagtgccatggcttgctccaccaccaccaccaccaaaacctgtagtcaaagagatgggcagaggccagccgtggtggctcacacctgtaatcctagcattttgggaggccgaggcggg

SEQ ID NO: 689512 - DNA, 2176 bp, Homo sapiens
tggtggtgagtgctaaggacaaaaattaaagaagaaaagcagataaaaagaactcgggatatagggaggaggttgcagctttagctgggagcggccagggaaaacttggctgagcaggagatgctagaaaaagggttgcagggtggaggaagccggtcatgcagatatcttggaggacagtattccaggcagggagaagggctgccatgggagcatggctggcacgctgaagggacagtgggagggcccatgctgctggagcaaaggatcgaagggaaagtggtgaaggaaagtcagagaagtaggtggagagttcgtggagcctggcaggactctgggaaaccattcgaaggttttaagcagagagatatgatctgacttgagttggatctcaggatcactctgagggacagttgagaataactaaagagaacaagttgcagaagtaggtcccagctctacaagagacaaccagctctgaaaatgtctggctggagttggggagggaatcctataaagagagggcagggtaccccgcagtgccttcaaagcatcagccttaggggatgagtcaagcctgtcttagagcaaacttttcaccatgaggcccgggaagtaaaccctgcattcaacggaagcaagaagcctcagaaacaaatgggtgcctctaaataaagcattcctttacatttatagaggccattaatcccattcgaaccggaaagaaggaaaacaaaccacggcagtcagttctccaaggccctcggctccagccaactggaaatacctgtgaaaagagaccctatcccattaacccagctgcacactgccatgtgaaaggggccctattatttaagtagtttgtaattgtcccacattactgatatcgttaaagcatctcagaatatttccatggccaggctgaataagaaaaagtagttaccaggccacgcaggcacaaaaggccttttgccaaactacttagatattttaattccccgttgcctcagtagctaaataagcatggagaacaagcaggcggggaatactaattagagctaattagaccctgccctcttctgcctcaatcccctttataaaaagctcccccaactcaaggatgatggagttaaaatgtaaatccataggataaacagcagtctacagaccaaacccactgtttgtatttcattgtcctgtcagctctaaacctgtgcctggttacctacagagagctgcagacccagccaaattccaacaaccccatcacagaccacaggaaatgtggtagggggttgggggtagaggaagggtgctgccaacatgagtccactaaataaaacaaagggctttcttaggatgtgcagagcattcactagaagaacattcgattgcttttttaaaaagaaatgaatgtgatagcacacataattccagcggtgttgcaggatcctctttataagacggtgttcctctctctgtcttagcaaaggcagcgtggaaaagcctcacctcagtgagacccctggttttgtgggaagaccacatcctaggattctgtctgaaggctcttggccataagataataaaaagagcaggagatagcccttggtggggacgggagggggttgtcagccggccagggacttgtttgaaatgagcccctgaaacctaaggtcagtttcctgctggaaatccgtactgagatgaaagtggggttagagcaacagagagaggcactcaaccactggtccaggaacacccaggcaggcatggccctgagggtcatctctttcttttctctgagtaactaggtttttttctttcaaataatgttcctagtggcaagacagaaacactccctgaataaagtacctgtagtgcttcaagaaaacaaagaagggaagggaagcaaaaaaaaaaaagaaaaaaaaaaagaatgttgaagttaattcagcaacactgaaaaactaggagaaatsacacagatgtgagtcaacctctgctaatcctgagaagcttcagggccctaagaggtaagcagcaagttctggaggccagtgccatggcttgctccaccaccaccaccaccaaaacctgtagtcaaagagatgggcagaggccagccgtggtggctcacacctgtaatcctagcattttgggaggccgaggcggg

SEQ ID NO: 689513 - DNA, 641 bp, Homo sapiens
aaaatgtggtatttttaaaaagtggtatacacatacaatgtaatctattcagccttaaaaaattgagaaaatcctgtcatttgggacaacatggatgaacctggaggacactattaagcgaggcacagaaagacatactgcattatgtcacttatacgtggagtggaaaaaaactgaactcagaaatacrgagagtaaaatggtggttgccatggctggtggggttgaggtgggatggagaaaggcgagatggttaaagggtacaaagttccagttagagagaatgaataagttctggagatctattgtgcagaatggtgaaaatagttcataataatgtattgcacacttgagaattgctaagagagtagatcttaaatactctcaccacacagacacaaagataactatgggaggtgataaatatgtgaattagctggatggtagtaatcactacaaatatatacatataataaaacatcatatcatatactgtaaatatacacaattatttgtcaactacctccataaagctggaaaaagaaaagaaaaatttaaaaagtaaaagagaagaaatgccaaaataggggttaaaaaaaaaacaaaccagtatcttgcaactggaacatttccctaatttg

SEQ ID NO: 689514 - DNA, 641 bp, Homo sapiens
aaaatgtggtatttttaaaaagtggtatacacatacaatgtaatctattcagccttaaaaaattgagaaaatcctgtcatttgggacaacatggatgaacctggaggacactattaagcgaggcacagaaagacatactgcattatgtcacttatacgtggagtggaaaaaaactgaactcagaaatacggagagtaaaatggtggttgccatggctggtggggttgaggtgggatggagaaaggcgagatggttaaagggtacaaagttccagttagagagaatgaataagttctggagatctattgtgcagaatggtgaaaatagttcataataatgtaytgcacacttgagaattgctaagagagtagatcttaaatactctcaccacacagacacaaagataactatgggaggtgataaatatgtgaattagctggatggtagtaatcactacaaatatatacatataataaaacatcatatcatatactgtaaatatacacaattatttgtcaactacctccataaagctggaaaaagaaaagaaaaatttaaaaagtaaaagagaagaaatgccaaaataggggttaaaaaaaaaacaaaccagtatcttgcaactggaacatttccctaatttg

SEQ ID NO: 689515 - DNA, 631 bp, Homo sapiens
caagccatgctgcacttttgaacgaggcatcctagctgtcacttcctccagcagttaacccctctgtccctcggttcctcaactggataacagtagggttgtcggaggatgaaatgagttaatatgggtaaaggacttagaacagtgcctggctggcagtgtgctctctgtacttggtaggtattctatcgttattttcccctacctgaatgtcgcctcttctcttgcctatcaaccactccactctaaacgcacttgtagcgaatccaagcccaaggcatcctttcctgcaccatctgaggaagaccccaccccactctttattggctagttcagatccagcttatatgtaaatgataagatgaaagcctgagcatatgtttttgagtctatcagtttgatcatggaaactgacagattatcagtaaggacaacgaaatatagcggcatattggccagtctcaaatccttgaaaggtgcaaaagttaaaaagtgaaaagtgggccgggcrcggtggctcgcacctgtaatctcagcactttaggaggcagacacaggaggaatgcttgagcccaggagttcaagactaacctgagcaacacagcgagacccccatctctacaaaacatgt

SEQ ID NO: 689516 - DNA, 2838 bp, Homo sapiens
tcaagtttcttatctaggggactcataactctgtgctagtcacaagtatttggagaatagctccaaattgcaagcatccacactaatgtttccgtttatttatgagagtgttaactgcatagaggagaataaagctagagggaaataagcatattaactaatacccaaatatggctgccatttttctagtccctttgaacatttttaatggacaaagtataaaatagagaaaaataattccttcgctacagggaaaagcctcaatcttttcagtttgtactttctcttaaatctctgcctagtttatgttatctaactttattttgtcaacattcatttttctaatttttgttcccatgttcacatctgttttctttaattctttcttggagattctattccacctaacctccaagttttcttgtctctctgcctttcttctttgtttttctcagtgaaacttcctttccaaacaagaaatgtttgttttatttgtgaatatcggtaaaaaacaaatagaaaaagttaacagtggaaatgcaattccagggcaatatatttttctcatgttaattggctttacttgatattcttctgttttcactgggatcttagttgcacctgctctaaaatatggtaaccattcccataacattttcttcaaatcaagctacttgaggcaacttgccagaaacttaccttaaaatgtttggattaaaatgcatatggaaataactacctgcccactctcactttcatgcccaccacaacacaaagtttatttgtgttagtagtcataactaatgtttatattgtgtcttctctccaattagccaagaaccgtgagtaattcatacacattctccttttttttaggactttgatagacagaattctaaagatgtgtttctaagattgccatcccctagtgatttgaacaaacatgaatctaggtactacagaaaagaggctttggaaataaaattaaggttaataattacctgaccttaaaaaaaggaagattatcctggattattctgctagatccagtgcaatcacataggacttaaaagcagaagagaaaggttgtagagtctgtcagagagatgtggaagaatagacaaacagagaagatatgaggtagagggggacgtcatggagattcaaaatttgaaaaggattccactcactgttgctggctttgaagataggggaaaggggtcaaggactaaggaatgcaggtgacttctggaagctgcaaatgacccctgagcaagagacagcaaggatatgggaaattccatcttacaaccacaartaactgaattctaacaacaatatgaatgagcttataaggggattcatccccagagctcctggaaaataacatcttgattttggcctatgaaatgtggagcagggagccagctatggcacattgtgcctgaactcctgacttatagaaaattgtgaaataataaattcatgctgttttaattatgtttgtggtaatttgttatgacaaagatagaatgggataagttaggcatgcagaacattttaactgaacattcattatatccaagtatctgtgctagctactgtaaggatagggcaacaaaagacaaagataatatttgcccttcctgtgcctttattctagtgggaaggactgtatatatatgtatgtacatacacatacacatatacatttatattacctagggaggatgtgtttggtgagcattaagaagagaaaagggtatcaaacagaataacttcagttactgtgcttcatgaatggctagtccgggttcttggagactgccttttatactttgtacttttgtccaaaattgtgatacttgtaatgaagtgattgttatttccaaggcattttaattaattttttaaagctatgcacatcttttaaagtgtttatcatagatcagaagatggtaagctcttttttacttcatgccacactgaggctctcatgtcaagtagaatattaaaatgctgaatgtagctctctagctctcttcagcgcatttaggtcacacttaggctgttaagttctaaattattttcagctggtaatattctatcctttaatttctggaataaaccaaatcaaaatcattttttctagataaaatttatgtgtgtatctatctgtatgtgtttgtgtgtgtatatatatatatacacacacacacatacattaaatgagtaggtgtgtatatatacatgtttactcatttaatttaatatttctgaaaatttttattttttgattgaaatttttctcgaatagagacaaaagtcagataatttctataacttctttccactccctccaccactccaaatgaaaaaaataaaagaaataaggtagtttctatgctttcacaaagaagatgtataaattctgcccttagttttttcctagagaagagggactcacaggttagttgcaaatattttgggtgggggaggacaggaaaagagaaaataatggtaattattgtggaggtgaggaagaggtgattgtgaatattcttctaccctcacttctacctgtttcattctgggtacaacctagtttacatgaccaccaacctgaaaaacattcgattattcaaagtcttttgaattacttgtagggcctttgagaatatcccatagtctcttcactttttattctacttgaaaacaaggagaaaaagaaacagactttgagatattgcaagcccatattgcaaacatttttaactatacaccaggaactttgcattctgtgaacctgttcctcatgtacccattgtatgtaaattc

SEQ ID NO: 689517 - DNA, 840 bp, Homo sapiens
caaataacctattcatagacaaaggtacatatccctgtagcatcaaataatattggcacttccagtattgtattgacacgatatccagtaatctcttttccctattaaaaagtcttaattttctttatgaataaaaagatttttaaaatgaagtaaaacaaatgtaactcacattatttgctacatttctacctacctcgtgcccttgggtgccttttcagcttctaaactgcaagaattggggtaaactgctaggctgttaagaatgtggagggatgaacacaaacaatcacaagatgatagtttttaatgagttatataatcctattgaattagttaactaattcttttgtttgtaagcaatcacatttaatcttgactcaggcataaataaatataaacaaagcaatgatttaaatatctgaaagactactggtccatctcaggtaactgaagaagttggataacctcgcttttgaaagagcatgtactaggaaagctcaggaagcctctttccttagaacatacccattagtgggactcaacttcaaatactaaaattcaccgggcacagtggctcacatctgtaattccagcactttgagaggctgcggcaggtggatcacgaggtcaggagttcaagaccagcctagccaacatagtgaaactgtgtctytactaaaaatacaaaaattagccgggcatggtggcatgtgcctgtagtccaggaggctgagggaggagaatcccttgaacccgggaggtataggttgcagtgagccaagatcccactgcaccccagcttgggcaaccaacagagtgagacttcgtctgaaaaaa

SEQ ID NO: 689518 - DNA, 572 bp, Homo sapiens
aattgaccacataattggaagtaaaatactcctcagcaaatgcaaaagaatggaaatcataacagtctctcagaccacagtgcaatcaaattagaactcaggattaagaaactcattcaaaaccacacaactacatggaaaccgaacaacttgctcttgaatgactactgggtagataaccaaattaaggcagaaataaataagttctttgaaaccaatgagaaygacacaatgtaccagaatctctgggacacagctaaagcagtgtttagagggaaatttatttacttattttattttattttattttattttttttttctgtttagagaagaccaaagggtgatttttattcaaagattttcccatgccacataagacagcactttattacccactgtgctgaactgattcctaattgtccccacgtctgcatcttgcgtctgcaattttatttatttatttatttatttatttatttatttatttattttattttattttattttattattattatactttaagttttagggtacatgtgcacaatgtgcaggttagttacatatgta

SEQ ID NO: 689519 - DNA, 656 bp, Homo sapiens
aataatttacttaaagtcttggaacataatagaccctcaataaatggtagctgttattatggaggaaacattgggtgagattatcagtgcctaccaagataggtgatatggtttggctctatgtccccacccaaatctcatctcaaattgtaatccctatgtgttgaggaagggacctggtgggaggtgattggatcatcggggtgttttcccccatgctgttctcatgctaatgagtgagttctcaggagagctgatagtttaaaagtgtttggcagttcccccttgctctctctctctttcctgccaccttgtgaagaaggtgcatgcttcctcttcaccttccattatgattgtaagtttcctgaggcctccccagccatgcygaactgtgagtcaattaaaccgctttcctttataaattactcagtctccagtagttctttatagcagtgtgaaaacagactaatacaacaggagagtgagaacaaagctcttccattggagcacccagagcagccaagctcctccctggggactgaggctagaagcttcactaagctcagctgtgatgaaaaagaaaggcataacagaaaactagatagacctagtcaaaacacacaacttaatcaaaacatgaacacctcctttctgaa

SEQ ID NO: 689520 - DNA, 623 bp, Homo sapiens
tctcaataggttgatttaatttttaaaacatgttgatttggcaatcatatagatagaagcatgtagagtatccagaattccagaattccataaatgttagctgtttttctgttttttgtgkttttttttttaccatttatttcagggtcaggggtacatgtgcaggtttgctatacaggtaaacttgtgacatcgttgtttgaggtacaaattatttcagattctttcttaatcatattttatttccatagtcacaaaagaacaaaaaaaaatttttttaaatctttgggttggttttctttggtttgtgttttacatccacttagttttataactcagtagagcctgcaaacagacaacattctttttcataagatgaactacgtctgtattttctctgtacagaaataaatgtaataagccaggtcagtggtgattaatttccagaacaaaggatttaccaggtggaaagccagagggtaggcagtataagacttacagggacagaaccctttggaaggcagaattctattcaaattcaattaaaactatgctctcaatccaaaggtaaatgattctgcttaaagttttttgtgcctactatttccctagggcaagagccc

SEQ ID NO: 689521 - DNA, 623 bp, Homo sapiens
tctcaataggttgatttaatttttaaaacatgttgatttggcaatcatatagatagaagcatgtagagtatccagaattccagaattccataaatgttagctgtttttctgttttttgtgtttttttttttaccatttatttcagggtcaggggtacatgtgcaggtttgctatacaggtaaacttgtgacatygttgtttgaggtacaaattatttcagattctttcttaatcatattttatttccatagtcacaaaagaacaaaaaaaaatttttttaaatctttgggttggttttctttggtttgtgttttacatccacttagttttataactcagtagagcctgcaaacagacaacattctttttcataagatgaactacgtctgtattttctctgtacagaaataaatgtaataagccaggtcagtggtgattaatttccagaacaaaggatttaccaggtggaaagccagagggtaggcagtataagacttacagggacagaaccctttggaaggcagaattctattcaaattcaattaaaactatgctctcaatccaaaggtaaatgattctgcttaaagttttttgtgcctactatttccctagggcaagagccc

SEQ ID NO: 689522 - DNA, 1658 bp, Homo sapiens
agaccagcctgagcaacatagtgagactgtgtctccataaaaaataaataaataaaaakaactcgtccaaggtcagacaggcagcctcttaataagcacacatatcctctatattatactacctctcgtggaggatctcctgtgttctacaaatagtctgtacttgagccagaatgtgttataatcctgggatcatggccagtgggcttagaagaagccatctctttctcatgccaagatgaggctcccccagatttgctcagacttacctatagtcagcagcatcgggggtcaggaaagacttcatgaagccataaatgcatccttctcggggcagcacctggctctcccaggtgagagaggactccattttcacaggcaggtgtgggagcttcagcacccatctctgggcccagaatgacccactggagaccttacagctctcctgtcacccccagttcctgccccgtctgcaaccttggaggagaatggagctgaagggcctgccctctgtagggtgagaaagggaggctaaagcctggtgcccactgccctggccgctccgcattacaggagctgcgcccttcctttcctggcacagggtccacagccccgaaaccccgctgtgtgggagctgggcacagggcagcaggactaatccctggaacagctcggggaggattatcccagccactgtcagcagcggtgcagccggctcattcccagataggggaggccagagccaggggcctgccgcaagttggaagaggctggggaaggggaggccagcagaggtgtcctggctgtgggtggctctgagggggctctcaggggtggggctgaatctcagtggcaggattatgtaaatcaaaccaattctaggcacagatttaaagcttggaaaaaaaaaaaaaaacccagcctggcggaaagaatttaaattataaaaacttagaagtatgaaatgtgaaatcatcccgtcggtgcttatttaacaacgaaatcatcccgacacaatgagccatatgtgaaaagtcctcctcccccgacacatcccccaacaggcactcctcaaacctctaccacccaagtgctggcatcctccctgtcctgcttcacctgagacaccccttgtctcataagacatgcaactacgggaggggtgacaggaagacaagacacgatttcctcaggcccagtttggtgtggggagaaagcctcctgatcctgaaagcaagaatttgaccagagcagaagtaatcagtatgcagattgactctgtggtatgttaatgtttatgcatagattatgaggaccaggtgaaaagtgggccaggggagccagatgtgtgtgtgagtcatgggtggctgagatgaggacaggagggaaactggttcggaggctgctggcgatggggtgggggtgccaggaggaagggaggcagttgtttgaatgtctgcatgaaaaagcggaggacagcggggtctgggtgaattcgggcaaccatttggaccgtggagaaaactgcctgcgtgcggctgaggacctgcagtattaatttgttttttagctaatgcaaagataaatataaaaactgatactccatccagttaccagaaaacatttaggtatgtgtgagacaacttgggtatgtgacc

SEQ ID NO: 689523 - DNA, 663 bp, Homo sapiens
tgtgaaaagttcatctccaattctggctcctagaagcatcttcaccctggcctctgttccttttcctgttgttccttcttttgctactgattttctaggttaggtaatttgaggattttcactgctgaaattattttttatgaggctctgagaccatcagcaccaagctgttctagaacctaataaatggctaagtgatcaagggccctggataatgagtaaccacaatttatctgcatcacaggaaaaattccactgaggcacctttaaataagcatttatcataaaacaaaatatgccaggctagagaacctatggaaataggcagtctcatttaaatttatcaagattgagtaatcctacctaggactttaaaatttttaccccaaatcttgggcatgtgactgaatgacawttactcagcagccagagagaagaaaacgtagttttggtcatttttatcttactttgaagtagtaattaactcctttgtctttccccatgtcctaaacaaaatccacctaacctgccaaactcacctaaagatatcagttagaagaaagggttggtgatgtgtgttgtcacagcaaccttgatttcaatgattacagaggggctgggtacaatctgtatcttctgaagtttgggagtagcacggggcac

SEQ ID NO: 689524 - DNA, 2279 bp, Homo sapiens
ttttgtgcaagattatttaaaatttattttggcttgcaaattcataattctcaaaaaggtttttctcctgaggacaatgcttgctgacatagtttgtaactgaagctgtcatctatgaatgccatcttcaatcagttcttagttagtaatgaattctcattttacattttcccaccaagaaattctgtaagtcatctaaaatgtacatggcagtaagattttcctatctttattcaagtgaaattgaaagaaacctaggaaaatgaaattcccctttcagacaaaaaaagaacaacttacatgggcaacagtgaggagactctgattggatgcttcagggagatgttctgctataaactcctctagatgatctaggagaaatagggtaagtgtcactgcatggattccgctgagggaatccctcgggttgtattgggtggtgtggacatgaggctggcatgtgtgaagaaggttggctaccccagacggagccgcaggccctttctccttggtggtgcaggcaggcaaatgagacaacgaggaaagccatgggaactagagcgttggtcctctggctaacgcaagctcatcaatggcactcagctgatctcaaagatggcacaccataggggcaggctgtgcttccctacaacgtctcaggttcctccttcctaatctgacctgagctaacttgccctccctttgtgatcccttctgaggtcatttccccctcaggatccacatgtgctgctgctgttcatcatccctcctaaaacattttgtactgcataaaagcaacctttcttcaaaaaaatttaacctttggtgatcaagcctggcaactactctgtgtctggcctgaccctgaagtcaaaaaaacttatgacttcactgaacctttgagtcaaacagaattaaaccaagatttgaaaatactcaattatcctaccatttaaaaatgacccgcacttagcttatttgtccttccactcttccttttcaacacgatgtatgtgtccatggagtcagttgctgttcatgctcaygctgactccagcactaggacagatcatcatggggggcagtaggtgggggcgctaacactctccaaactagctgtgcaggaaatcccactggggtgatggacaccagaataacaccccaattcttccttgagctcttattctgcactgtgtattggatgtgtgggctgaataagggcatgtggaacacttgtggccatcatgttattaaacatagcagaatatgtccctgattgttctctgcattttttttttttgagatgaaatctcactgtgttgcccaggctagaatgcagtgccatgatcaaggcttaggtgcagcaaaccaccatgacacatttataccaatgtaacaaagctgcatgttctacacatgcatcctagaattgcaagcaaaataaaaacaataaaaagagtaaacccagaatacataccttctgatggaaagcatacccttttctgcaaatagagaaaagaaaaacattatgagagtcagaccacactgtggcctgtgtgcacaggtcttttctgcattgttgacattatagaaaacccaatggaaatagtgaaaatagtcaacacaagggctccaaattaaagcctagagggcacgtggaaaggcacaaattttctgtgcatgatttccaagtttattttcattgcatgttcaccattagtttcaagaaggaagcacttctcctatggaaaatgcttactgccctagagtttttaagtgaacctgtcatcttgaattcattcttgctggtaattgactctgactttacagctgcccaccaagacattctgtaagtcatctataatgtacatggtaagatgatcatctcttatctcaatttctatggaaactaagagaaataaaattcccacctcagataaacaaaaaagactttaccttcacagagcctggcaacgtctccgagagtatctcgggtggacacaatggcttgcccaaggagccttcgtcacgctctaggaaacacagagtaattgtcagcacgttgggtgcactgaaggaatccgtcaggcagacttgtgtgctaaaaacacggggctggcacatgtagacaaggggggttaactacaaaaaaggacctcctgccagaacatcctccttggtgatgaagaaaggtcaatgagaccatcaggaaaccacggaagacagagccttggcagcacagacatgcactgctgatgccatggcagtgtctcatcatt

SEQ ID NO: 689525 - DNA, 1519 bp, Homo sapiens
ccccgccaataaaacatccttaaaaggmtcctctcaaattccttgcaaatattaggctcctctcaaattgcttgcacatgcttggagaagctcacagtggttagtacactcatacacaactgaacttgagcgacacaaagcttacaagacagcaaagacaacagcaaagctgggcccagcagccatcacctaaagaactcttcactcgttacattggagcaggtgatctctctggaaccaggaaccacagaacactgaaggacacggagctggtggctaaggattcaaggcctgcagtgaaaatgtaacatttccctccaagtgcttatttctgctataaactggtttagttttgcaatgaacaactagatttctaactgatattcacgttaataaacttttcttttttaagacagggtcttgctctgtcacccaggctggagtgcagtggtgcagtcatggcttactggaggctcaacctcctaggctcaaccagtcctcctgcctcagcctcccaagtagctggggctacagatggatgctaccatgcccagctaattaaaggattttttttttttttgtagggatgaggtctcactatgttgcccaggctggtcttaaactcctgggatcaagcaatcgtcctgctttggtctcccaaactgctgagattacaggtggtagccactgcaccaggccattaacatttatatatgtaaaatacatacagaatgtaaatcaccacaaaacataaaaatactccatattgatgtaacttaccatactatggatttgttttaaaaatgaggtaaaagtcattaagaaaatgaaagcacaaaagaagtctatcaaaattacaaaaacttaaaaccgagtaaacaaaacttcagaaagaatgaaaacaattggaaaataacttcaagaaaaaaatgtaaaatggaaacaatacaagaacaatttgtgccctctgaaaaacagaggttaaagtcagaatttttttgttcttttttttttttttttgagacaaagtctcactctgtagccaggtgctggggtgcagtggcatgatctcggctcaccgcaacctccgcctcctgagttcaagtgattctcctgcctcagcctcccaaatagctgggactacaagagtgcgccaccacgcctagctaatttttgtatttttagtagagacggggtttcaccttgttggccaggctggtcttgaactcctgacctcaggtgatccacccgcctcggcctcccaaagtgctgggattacaggcataagccaccacgcccagccaggaaagtatttaaaaacaaattaagcaaagattataaaagtttttggagtaacacatttcccgaaatgatcacgatccacatcaagtctgagccatgttgacatccccacgtcggggcccttcctggtggtcgaggaatctgcaacacagacagaggtgcaagggtcactagagaggcacagaggtagagggaggaggggctccctgggatgggt

SEQ ID NO: 689526 - DNA, 1519 bp, Homo sapiens
ccccgccaataaaacatccttaaaaggctcctctcaaattccttgcaaatattaggctcctctcaaattgcttgcacatgcttggagaagctcacagtggttagtacactcatacacaactgaacttgagcgacacaaagcttacaagacagcaaagacaacagcaaagctgggcccagcagccatcacctaaagaactcttcactcgttacattggagcaggtgatctctctggaaccaggaaccacagaacactgaaggacacggagctggtggctaaggattcaaggcctgcagtgaaaatgtaacatttccctccaagtgcttatttctgctataaactggtttagttttgcaatgaacaactagatttctaactgatattcacgttaataaacttttcttttttaagacagggtcttgctctgtcacccaggctggagtgcagtggtgcagtcatggcttactggagsctcaacctcctaggctcaaccagtcctcctgcctcagcctcccaagtagctggggctacagatggatgctaccatgcccagctaattaaaggattttttttttttttgtagggatgaggtctcactatgttgcccaggctggtcttaaactcctgggatcaagcaatcgtcctgctttggtctcccaaactgctgagattacaggtggtagccactgcaccaggccattaacatttatatatgtaaaatacatacagaatgtaaatcaccacaaaacataaaaatactccatattgatgtaacttaccatactatggatttgttttaaaaatgaggtaaaagtcattaagaaaatgaaagcacaaaagaagtctatcaaaattacaaaaacttaaaaccgagtaaacaaaacttcagaaagaatgaaaacaattggaaaataacttcaagaaaaaaatgtaaaatggaaacaatacaagaacaatttgtgccctctgaaaaacagaggttaaagtcagaatttttttgttcttttttttttttttttgagacaaagtctcactctgtagccaggtgctggggtgcagtggcatgatctcggctcaccgcaacctccgcctcctgagttcaagtgattctcctgcctcagcctcccaaatagctgggactacaagagtgcgccaccacgcctagctaatttttgtatttttagtagagacggggtttcaccttgttggccaggctggtcttgaactcctgacctcaggtgatccacccgcctcggcctcccaaagtgctgggattacaggcataagccaccacgcccagccaggaaagtatttaaaaacaaattaagcaaagattataaaagtttttggagtaacacatttcccgaaatgatcacgatccacatcaagtctgagccatgttgacatccccacgtcggggcccttcctggtggtcgaggaatctgcaacacagacagaggtgcaagggtcactagagaggcacagaggtagagggaggaggggctccctgggatgggt

SEQ ID NO: 689527 - DNA, 1519 bp, Homo sapiens
ccccgccaataaaacatccttaaaaggctcctctcaaattccttgcaaatattaggctcctctcaaattgcttgcacatgcttggagaagctcacagtggttagtacactcatacacaactgaacttgagcgacacaaagcttacaagacagcaaagacaacagcaaagctgggcccagcagccatcacctaaagaactcttcactcgttacattggagcaggtgatctctctggaaccaggaaccacagaacactgaaggacacggagctggtggctaaggattcaaggcctgcagtgaaaatgtaacatttccctccaagtgcttatttctgctataaactggtttagttttgcaatgaacaactagatttctaactgatattcacgttaataaacttttcttttttaagacagggtcttgctctgtcacccaggctggagtgcagtggtgcagtcatggcttactggaggctcaacctcctaggctcaaccartcctcctgcctcagcctcccaagtagctggggctacagatggatgctaccatgcccagctaattaaaggattttttttttttttgtagggatgaggtctcactatgttgcccaggctggtcttaaactcctgggatcaagcaatcgtcctgctttggtctcccaaactgctgagattacaggtggtagccactgcaccaggccattaacatttatatatgtaaaatacatacagaatgtaaatcaccacaaaacataaaaatactccatattgatgtaacttaccatactatggatttgttttaaaaatgaggtaaaagtcattaagaaaatgaaagcacaaaagaagtctatcaaaattacaaaaacttaaaaccgagtaaacaaaacttcagaaagaatgaaaacaattggaaaataacttcaagaaaaaaatgtaaaatggaaacaatacaagaacaatttgtgccctctgaaaaacagaggttaaagtcagaatttttttgttcttttttttttttttttgagacaaagtctcactctgtagccaggtgctggggtgcagtggcatgatctcggctcaccgcaacctccgcctcctgagttcaagtgattctcctgcctcagcctcccaaatagctgggactacaagagtgcgccaccacgcctagctaatttttgtatttttagtagagacggggtttcaccttgttggccaggctggtcttgaactcctgacctcaggtgatccacccgcctcggcctcccaaagtgctgggattacaggcataagccaccacgcccagccaggaaagtatttaaaaacaaattaagcaaagattataaaagtttttggagtaacacatttcccgaaatgatcacgatccacatcaagtctgagccatgttgacatccccacgtcggggcccttcctggtggtcgaggaatctgcaacacagacagaggtgcaagggtcactagagaggcacagaggtagagggaggaggggctccctgggatgggt

SEQ ID NO: 689528 - DNA, 1519 bp, Homo sapiens
ccccgccaataaaacatccttaaaaggctcctctcaaattccttgcaaatattaggctcctctcaaattgcttgcacatgcttggagaagctcacagtggttagtacactcatacacaactgaacttgagcgacacaaagcttacaagacagcaaagacaacagcaaagctgggcccagcagccatcacctaaagaactcttcactcgttacattggagcaggtgatctctctggaaccaggaaccacagaacactgaaggacacggagctggtggctaaggattcaaggcctgcagtgaaaatgtaacatttccctccaagtgcttatttctgctataaactggtttagttttgcaatgaacaactagatttctaactgatattcacgttaataaacttttcttttttaagacagggtcttgctctgtcacccaggctggagtgcagtggtgcagtcatggcttactggaggctcaacctcctaggctcaaccagtcctcctgcctcagcctcccaagtagctggggctacagatggatgctaccatgcccagctaattaaaggattttttttttttttgtagggatgaggtctcactatgttgcccmggctggtcttaaactcctgggatcaagcaatcgtcctgctttggtctcccaaactgctgagattacaggtggtagccactgcaccaggccattaacatttatatatgtaaaatacatacagaatgtaaatcaccacaaaacataaaaatactccatattgatgtaacttaccatactatggatttgttttaaaaatgaggtaaaagtcattaagaaaatgaaagcacaaaagaagtctatcaaaattacaaaaacttaaaaccgagtaaacaaaacttcagaaagaatgaaaacaattggaaaataacttcaagaaaaaaatgtaaaatggaaacaatacaagaacaatttgtgccctctgaaaaacagaggttaaagtcagaatttttttgttcttttttttttttttttgagacaaagtctcactctgtagccaggtgctggggtgcagtggcatgatctcggctcaccgcaacctccgcctcctgagttcaagtgattctcctgcctcagcctcccaaatagctgggactacaagagtgcgccaccacgcctagctaatttttgtatttttagtagagacggggtttcaccttgttggccaggctggtcttgaactcctgacctcaggtgatccacccgcctcggcctcccaaagtgctgggattacaggcataagccaccacgcccagccaggaaagtatttaaaaacaaattaagcaaagattataaaagtttttggagtaacacatttcccgaaatgatcacgatccacatcaagtctgagccatgttgacatccccacgtcggggcccttcctggtggtcgaggaatctgcaacacagacagaggtgcaagggtcactagagaggcacagaggtagagggaggaggggctccctgggatgggt

SEQ ID NO: 689529 - DNA, 604 bp, Homo sapiens
atcagtcctcaccagaggactctgtggccataaaaagagtaaggcttcagcagctcaacacaactgacgcagtcctgctatcagttgcgataagcacctggcatctgcctacaaaggctctgcccacatcaaagactcttccttgcgagactgagggactgcccaggccaagccaggagattctttttgtcttcgttgttctccctgcaatggttcattaactcttttttctctcccttttctcttgatgttaaatgttactttgtgagctgtggaatgtttaacatgtatatagtgaccacgtattctattacatatggttttcagtattaactgacttgtggagtggcttgagcctgtgtgcccgctattctsactaccgagtgaatgggaagttctgaggagaacctctttcttgggaactccattgagctcatggtttttgtgattgaaacagtatcaataaaagtctgaccttgtggcaagatacaaatgtatgtggaccttgcacggctcatgagaggcataactctgaaacatgggtcagaattcctgtctttctgtttcaaattgctcaacagtgctaaacatattgttttagaca

SEQ ID NO: 689530 - DNA, 601 bp, Homo sapiens
cgccttggcctctcaaagtcctgggattacaggtgtgagcccccgagcccagcctgctkctatagatttttctatgagctataagttgttgttttgtggtggcttacatggtaatgacaaagcggctttagtgatcagttatggtcagagaagtagtgaccacctgaaatgtgaatgtttgtaacttggggcctctagtatatgtcaacatttgggaaaaatttccctactatatttagtactcccctgtctcttaaacaattccatctagcttggagaactacgaaacttgagatatagaaaacttggacagagttttgaccagatcactaatggttggatgagatagggatgacctagagaacttctgagtgttaatgaaaagagaaacatgggtactcaaggacctcaatatgaacgtgacttcttctgtgtagaggaaggagtgcagctgtctgtatgtcctagggcgggagaaacactgcctgaattcaacacttgcttcaataaacattactctgtttctttttatttataaaggatgctctgaagaactagtcaataaggtcatcttcttctgccactcttactttcctatcac

SEQ ID NO: 689531 - DNA, 601 bp, Homo sapiens
cgccttggcctctcaaagtcctgggattacaggtgtgagcccccgagcccagcctgctgctatagatttttctatgagctataarttgttgttttgtggtggcttacatggtaatgacaaagcggctttagtgatcagttatggtcagagaagtagtgaccacctgaaatgtgaatgtttgtaacttggggcctctagtatatgtcaacatttgggaaaaatttccctactatatttagtactcccctgtctcttaaacaattccatctagcttggagaactacgaaacttgagatatagaaaacttggacagagttttgaccagatcactaatggttggatgagatagggatgacctagagaacttctgagtgttaatgaaaagagaaacatgggtactcaaggacctcaatatgaacgtgacttcttctgtgtagaggaaggagtgcagctgtctgtatgtcctagggcgggagaaacactgcctgaattcaacacttgcttcaataaacattactctgtttctttttatttataaaggatgctctgaagaactagtcaataaggtcatcttcttctgccactcttactttcctatcac

SEQ ID NO: 689532 - DNA, 601 bp, Homo sapiens
cgccttggcctctcaaagtcctgggattacaggtgtgagcccccgagcccagcctgctgctatagatttttctatgagctataagttgttgttttgtggtggcttacatggtaatgacaaagcggctttagtgatcagttatggtcagagaagtagtgaccacctgaaatgtgaatgtttgtaacttggggcctctagtatatgtcaacatttgggaaaaatttccctactatatttagtactcccctgtctcttaaacaattccatctagcttggagaactacgaaacttgagatatagaaaacttggacagagttttgaccagatcactaatggttggatgagatagggatgacctagagaacttctgagwgttaatgaaaagagaaacatgggtactcaaggacctcaatatgaacgtgacttcttctgtgtagaggaaggagtgcagctgtctgtatgtcctagggcgggagaaacactgcctgaattcaacacttgcttcaataaacattactctgtttctttttatttataaaggatgctctgaagaactagtcaataaggtcatcttcttctgccactcttactttcctatcac

SEQ ID NO: 689533 - DNA, 601 bp, Homo sapiens
cgccttggcctctcaaagtcctgggattacaggtgtgagcccccgagcccagcctgctgctatagatttttctatgagctataagttgttgttttgtggtggcttacatggtaatgacaaagcggctttagtgatcagttatggtcagagaagtagtgaccacctgaaatgtgaatgtttgtaacttggggcctctagtatatgtcaacatttgggaaaaatttccctactatatttagtactcccctgtctcttaaacaattccatctagcttggagaactacgaaacttgagatatagaaaacttggacagagttttgaccagatcactaatggttggatgagatagggatgacctagagaacttctgagtgttaatgaaaagagaaacatgggtactcaaggacctcaatatgaacgtgacttcttctgtgtagaggaaggagtgcagctgtctgtatgtcctagggcgggagaaacactgcctgaattcaacacttgcttcaataaacattactctgtttctttttatttataaaggatgctctgaagaactagtcaataaggtcaycttcttctgccactcttactttcctatcac

SEQ ID NO: 689534 - DNA, 771 bp, Homo sapiens
attttgcttttcttcttcttttttttttttttggatagagcataaatgtaacctgtgctgaccttgggctcaatgtttttattcatggtttgttgaactcttggtcaagtttccatctctgttattaatcattcagattgcaattgtcaaacagacaattggaacccttctgcataaaagctgagtaaacagggtgcagtttgggggaaatagaaaaagaatgaaaacagaggattaaagcaaataaaatagattaacccttgacacgataatttatactaggactagaagtccaacagaagagctgttgtagattacataygtgattaatcactgctatagtttcattggtgacaaaatgattaataaagtttaagacaaaaacaaatcttttcgcatctgcacctaagtgtgcaaaatctagcaagggtttctcatccagaccttggttcccttgcaggatggacaaacttttaattcagatttttgcggccctggttaagataaaagcatcatctttacaatagatccaccctggcttacttgtgaaataaagggttaggaacaggaacccaattctgaaaaggcttactagcacgaggtttatttgtgttcagccaccaaggcgcacaaatgctgctagccaggagatcaagcagtattccctctagttcttctttgcccaaggaagcaattgtgcattccaataaaaaatagaatattggagaagggatagaagaatggatagatgtaagaagactttacggaatg

SEQ ID NO: 689535 - DNA, 1437 bp, Homo sapiens
ttcctgcagctagatggtcccatctggggatgatgggagacagtggcctgtcatcaggcattagattctcataaggagcacgcaacccagatctttcacatgcgcagttcacagtagggtttgcgctcccatgagaaacgaatcctgccgctgatctgacaggaggcggtaatgccagggatggggagcagctgtaaatacgggtgactctttgcttgctcacctgccattcacctccagccgtgcagccccgttcctacaggccaccacccagtatcggtctgtggcctgggatgtggggacccctgctttacagtacaggagcagacctgaaccaagcccaagacacttatatttccccacttctgtggtccagagaaaagtggcctggagaaactgctctcatcaaaatacagttactaaacctggagacctctcctgtcgtatttgcatttgacactgaaggaaagatgtgaagatgttacagatctttaggaaaggacagatattttctgagaagagggaaggtgggagtcttcaaatttaccttgtagcagctaccagtggtgtatcactggtaagtgaagaatgtgtattccagaagtagtaaaagttcattttaacagagtcacttagggaaaacaaaagcttcctttatatagtggaatctgcatgcatttctttaagccctaatatctgaatgccaaggcactgagtccacgtagttattatcctgaaactctagtttattcattgtttattcaaatgagttacgaaatcacacaattaggagaaagacccacctttaaaaaaaaaaaaagaactcagaatattgyacttctataaccatacattctttcttagaagtgtgtgtttattcactctcccatcctgaaacatatgacatcctattatttaaacactggccaaactacagcaaaatgaatagaaactaaaatatttcttaaatatttaaagttcagctactcaaaatcttgacgctctggtctatccaagtcctactgattgctagtggcaatttcttcagggtgttctttctcctgtttatttttgccaattttgtcaaagatcagttggttgcaggttatatggttttatttctggattctctattctgtttccattaatttatgtgtctatttttaccccagtagcaggctgttttggcatgtaatttagagttgagtaacatgatgccttcagctttggttttttgttgttgtttgtttgattttgcttaggaatgctttggctattcaggctcttttttggttccatatacatttgaggattcttttttctaattctgtgaaatatgacattgataattttataggaatagcattgaatctgtacattgctttgggaagcatggttgttttaataatattgactcttccaattcatgagtgtaga

SEQ ID NO: 689536 - DNA, 1762 bp, Homo sapiens
tcttttcctaactttctaaaaatacatatggatatctatacatgtcctcatgcccacgcacacttttctctgtgtgtgtgtgtgtgtgtgtgtaggaggaggagagttgtgcaatagcagcccsgtggacagtgttctaggcatctcccatgcccctgctttcctacacacacatgttaaaaacatcttcttggaaacctacaaaggactataaaaatagagactacacaggtgggttaccagctaagctttcttaatgagaaactgggaagaagtgaatagcaagtttgatgaaatcatatcttcagaaagctataaatattacagaagacagataagaacataaacaactgcaagaccaaagactctgtggaacaaattcactaggagagaagggaaattttatataccgaattctttttttttaagccagttccctgtgagtgtccagtttaatgactgtttaaattatatctgcaattttctgagtggttcccttacttttcaagtttataaaccaacacatcaacaattctcagtcaatggaagagcatttctctggggagctatgaaaatataccttgcattttaaatgcaataaaaagcatgaataaacatgcctctgttctttataacacagaagtaccacatctggtcattaaaaaaatgcattatacagagttgtacagatgccagatacttattacagagaactgttttatccatttagcccaattttccagatgttttattacttggagacaggagaattgttgaaactgatgattgaagcccatttatttccaggggctcgactgcaaaccatagaaagcatttgagggacaagtaatttatgacaggccacaaggcaatgcttgaggaaggctgtcatctcaatgggtcacaaataataccaacaaaggacaaaacaccctattttagtaaccccaggcttcatttacaaaaattgcctcttaggcaagcacttagttgtcatttcacatgcaaatgtgtatgcacgtaattggagcaattttcataatagtaggtcaagttggcagtgacattgaaaatggcccaggttggctctgattggaggcctggttgtcattgtctgcaagctggcaaaattctcacctggatcagttggaagtcttgttctcataaagacaacaggatcaagttcagcaggggcaggtgccgcttccccatcccttccccaactcccccactccctgctgcccccaaagtcacagccctaagaggccctgcccacactgcagagcagcagccttggggcattagcagagctggccttggcagccacagtcattgccgctaattagaaggcacctcaccatggtcaattctctccctctatcaatcaacctgctcagagcagaaatagggactagaaaggggagcagaaccttttctagcttcactcttctgaagctagaagagtgaacacacacacacatatagagagagagaacacacacacatatatatagggaaaagctctcagaacataatggagacgtgttcttaggccacactgaaaactcatctaagtcaatgtgtctagcagcaagtgttggggaatttagtttttctatgttgctatttttgtaaatgctggtagcctctggcattagagacagtagggtctatagatcctcttcctgacaaccttgctaccaggttgcgtatattacagtgaaagggaatctgacaccacattctgccaatatttattaac

SEQ ID NO: 689537 - DNA, 1254 bp, Homo sapiens
ttcaccattaacgatgttagctgtaggtttttcatagatgccctttattgggttgaggaagttccctttcattcctggttttctaagagttttcaatcaaacatgggcattgaattttgttaaatgttttttctacaaayatagacaattacatgagttttctttttcactttcttaatataatgtattactttgatcagttttcaaatgttaatccagacttgcgttcttgggatgaattcccaagagtgtattgtcctgatgtagtattaatttgttaaattttttaagttttcagtaacactatgttgtcagtaagactggactccaaatttctttgcttatgttgccttgtgtagttttggcgtcaggattgtataatgtcacaaaatgtattgggaaatgttcccttctttattttctgaaagtttgtttaagagtttcttcggtgcttgatagcattcaccgaaggtattatctgggcctggagttttcttaagaagatgttaaattataaattaatattttaaagtagatatgacttctcaatgtagttttattttatattgttattactgaggttggcatgttctttttttaactcaactaattcataaattcacaagcatattcttatgtgcttaagagtcatttgtacttccatggactttcttttgccttatcctgtctttctgctaggttattggtcttgtcttactgatttaaggaatagcctttaattaatgagtattttttctttttttattactttgctttatgatagtttttgctatgtaggcattttaatattattattattattattattattattattattattattattgagatggagtttctcttttgtcgcccaggctggagcataatgatgcaatctcagctcactgtaacctccgcctcctgggttcaagagattctcccgcctcagcctcctgagtagctggcattacaggcatgtgacgccatgcctggctaatttttgtattattagtagagatgggatttcaccatgttggccaggctggtctcaaactccagaccttaggtgatctgcccacctcagccttccaaagtgctgggattacaggcgtgagccaccgcacccggccacatttttattttttatgtaattgaatttatcaatctttttttttatggcttttatattagactaagaaagacattatccatcccaagaaatttttctgttttcctccagtaaatgtatgc

SEQ ID NO: 689538 - DNA, 1165 bp, Homo sapiens
gtgtgacatagaattaattaaacctagaaaaaaattaacataaaaagaaattcaacaatgaaaatgtattatcttgtgggggaggtactaaaaagaccctgaaggagtcaggatgggaagaaagaggtgactggggtcttaggaccagtttagtccccactttgatctgtagctttgaactagttagtgaactctctggacatcagctttctagatgagcagatcatcttggatgcctcccaaggcacttyccatagctaaaacataatgtttcttaatgtcactgataagattttatcaccagatgcctcagactttgaaagcatgtagctctggctttttgtttagtttctcacgcagaattttattcactttaaaattgaagttccagccgccttaactatgaatatcaagagaaaaactaatagatgtaaaagtaaacaacagaaagggtagaagatctcttattctcttctggatttaggtgacagacttcatttactatcttgtttgtgaatatatttagtaaattttgtggtatgagaagttgggtatccactcttatttatcctctaggtaactaatttttatacatatgtacttgcctttttcctgcaaggcccacaaaccacatgtttttgatgccttgtatatacatgagatttaaaaggagaaggctaaagtaaatctgttctaatagctacagaaccatttgtaaattaaaccttaaactcctaaaatttcacataagaatatgtatccaagttcttttttttctacagtataaaccccttttattgaaaaatatttctcctgcctatttttataattgtaaagtcaaattaaggtaccaggaattatagctacagggcaatgagaaaggcataactaaaatatagttttatatttattatataaaccctacttcagtagggttttaagtgtaacgcagtttgatttgaaaataattaagagatcgtttcagaaactggtataatatttaagggagagctgagtagataaacagaagcttcaaggagagatttatgggaacagaagtttcagttgattgcatcatggtttttgaggccaaaggcaaataaattcctgagtatttccagatgctgtgtgtctaggcaagaggacatctgaggagctagaagta

SEQ ID NO: 689539 - DNA, 686 bp, Homo sapiens
caaattttaatccttaactttggtctctgacttctgcttgattccacagtctccacccacatttgcacaaaggaccatcacctgtccttcctggaatctctaaagttttctgctttccttctgtcctgatggccagctctgctaagtcagctgagatgcccaccatctccaaaaccgttaaccctactcctgatcctcatcaagaatatctggaccctaggattaccattgccttattcgaaattggatcacattccccttcctcctggggctctctccctttcctaaagaatagcagccatcaagttacagaacaacagactgcacagaagtttaacaatctcttaaaagaaattaaagatattcttaaaaatatggcaggttttgaagagaagatcacagaagcaaaagaactttttgaggaaaccaatattactgaggatgtgtcagcccacaaagaaaatatcagaggacttgacaaaatcaatgaaatgttatcaacaaacctgcctgttagtttagccccagagaaagaagacaatgaaaagaaacaggagatgatattggaaaccaatattactgaggatgtgtcagcccacaaagaaaatatcagaggacttgacaaaatcaatgaaatrttatcaacaaacctgcctgttagtttagccccagagaaagaagacaat

SEQ ID NO: 689540 - DNA, 616 bp, Homo sapiens
ttggcaacagtgaatgccaggcagcagggagaaaccagtgtggaatattaatttgtcacagaaaaatccacgagctacaaatctacatgtgtatatatgcaagtgttacctgtgaaattaggccaaatttcttctgaggattttaactactgaaaacgaatgccattgtttgagagtttgacagtaaaaaggaggaagatagggtcacattttattttctatttcaaatgaaatttattctttctcatttgtgattaattctcatttgatatgctggcctcagcatttctttggtttatgcttatttttctagtttctttggacatggagcttgaaaataacatgcaaactgtgggcatgcctttgtgtttgtgggcaaataaagcattaggatgccttttggatttaaagcttgcagtggctgggaactgcttccattacaactcctgttcctttgctaaaaggggccgcttctctcaggaaacagcttcctccattcaaatcagaggttcmataattaggtaaagcaacaactgcttcggttctccattttttgtggaataaatgaaagtacctgttctgtaataactttattgtggtactcaaagggtattaa

SEQ ID NO: 689541 - DNA, 611 bp, Homo sapiens
caaacccttggcaaatgtctccaactacctcattaacatcacagagattcctgaaaattaggacaccctaaacccactaatgagagcattccctagtcaagatggaaccctcagttgctcccttaaaatcttcaggtacccagaaaagacttcactaacttttatcagtccactcagtcttcaatccataggccatagagagaatgtattgaaaacagcaagggccgagactgatggggaaagaaaaagggagaagacaaattatccatatcaggagtggggcagggaacactactacagattctacagatactcacaagataataagggagtactatgagcaattctatttctaccagtatcagggtggggcaggggacatcactgcagactctacagataytaaccagctaataagggagtgctatgaatcactctatttctaccaacatcaggagtggggcagggggtaccactacagattctacagatattcacaagttaataagggagtactatgagcaactctatttctatcaatatcaagagaggggaggggacaccactacagattctacagatattcacaagttaataagggagtactatga

SEQ ID NO: 689542 - DNA, 2507 bp, Homo sapiens
tatttgtaaagaatatttctatgactcctataaagtgtatggattcctggtctgatgagacaataattgggaggaaatccactgttagatgtttatgagtgtccctgagagaagaaccctctttcttgtcctctttgcatctatgctggataaacccaggctgggtgaacaggtaacagaaatgtcaggtagattgggggagtcagatgtaaaggctcatgtgcctcacttcccatttggaaattaaatgattttmtgattcatgagtcaatttgtcatatttcctttttcacttttaaaaatgtattttgtcccaatttcatattggcacaaccactatggggaacagtttggaggctcctcaaaaaaaaaaactacaaatagtgctaccatactctagcaatcccactgctgggcatatatccaaaagaaaggaaatcagtgtatcaaagacatatctgcagtcccatgtttgttgcagcactgttcacaatagccaagatttggaggcaacctaagtgtccatcaacagataaatgaataaagaaaatgtggtacatatacagaatggggtactattcagtcatcgaaaagaatgatatcctgtcatttccaacatcatgaatggaactggaggtaattatattaagtgaaacaagccaggcacagaaagacaaacatcacatgttctcactttttcgtgggatctgaaaatgaaaacaactgaactcatggagatagagagtagaaggatagttagcagaggttgggaagggtactggggttggagaagtgaagattgttagtgggtacaaaaaacattgttagaaagaatgaataagaactagtatttaatagcacaacggggtgacaatagtcaataataatttaattgtacatttcaaaataactaaaagagtgtaatttgattgtttgcaacacaaataataaatgcttcaggggatgaatatactcttttccatggatgtgattattacacattgcatgcctgtatcaatatatgtcatatatcccataactatacctactatgtacctacaaaaattaaaaattcaaaaaatctgcactgctttattactctgttttgatgctgttttgcattgtttactactctaaagggctaaatgggcagagccacataatttttatttattctaagtgcccaacaggggacctgaaacatggtagttactgaatgcatatttattgaataaatgtaagaaataacatgaagtgaaaaatcaagaagaatgttagatagatagatacatcttgaaggagatactcgaaaacataatggctattttttctgcatggttaacagtgacaataattttaatttacttttatttttgctgatttgcattttcatattttctacaatgggaatttattacttattcttttcttctctaaatatatatgtgtaaaaatgtcaatagtgaaagaaaagagcctatagtgcactatcgcctatccaggagagctgatttcttactgtaacataagaattaaatgactctgaaaaagcaattgtttgtgagcttcactaactaaaagtgtttgtggttgaagaaatttataggacagctatgacaaacgtaagtttatgaaattaaaagccattgatgcataacattttctttgggtatcctatcaagaattcatttacaaaaataataaagtgaaaactcagcaaggaagggtgatatatttcaatgttagccaggctttagttgagatctttccatttttgtttagtgacaagaggaacaaaatgtgttctactgaaagagaaacacttgcgtaccagtagttctaatagtagagtaattgtaggaaaagaagaggaagatgaagaataacatagaatgggcatatgtccaggaaaatgcttaaaataaaattatttcctgaggaatgaggttccaaagtcttctgttcccacaaagcagtccggcctaaattttatttgttatgcttacatgagacccttcttaaagtaaatacatgttaccttggaataataggagaaaaatgacatggtgcaaaagtgcctgttaaatagttagaaactcagtgaggctattcagagaaggaaggccctcactgaaatgatttttattttattttattttattattattatactttaagttttagggcacatgtgcacaataccctgaaatgattttttttaaggtacgcatgattgcaaaagacattgtcggagttggagctactgaagaaggtttgtaggggtttttacttccttttggtactattgtaaatggaattgctttcttagttttcttgcctgatactttactgttactgaatagaaaagcaatgaatttttgtatgttaattttgtatcctgcaagtttactaatttattagttctaacagtttttagtgaaattcttagaaatttctatgtgtaagagtatgtctgcaaatgaaaatactttaattcttcatttttt

SEQ ID NO: 689543 - DNA, 587 bp, Homo sapiens
aattccaggtggcaacgaccactgatctttactgagcgctgtgtgccaagcagcaacattttaagtccttgctaaggattaactcacttattcctcaagtcaccgctattcactaggtactacgttatcccacatagggaaactgaggcacggasagatgacgtaacctgcctcagcagcagaggcgaatttgctctgagccaccacactatactgcttaataccaagttgtttcctctgcttttccataatttccaatttttctacacagggcctgaagcacaattttttttttcttttgagacagtctctctgtcgcccaggttggagtgcagtgatgtgatctcagctcactgcaacctcttcccaggttcaagcaattctcctgcctcagcctcccaagtagctggaattacaggcgtgaatcaccaggcccagctaatttttgtatttttagtagggatggggttttgccatgttggtcaggctggtcttgaacccctgacctcaggtgatccacctgccttggcctcccaaagtgctgggattacaggcatgatctactacacccggccctcttttttttg

SEQ ID NO: 689544 - DNA, 587 bp, Homo sapiens
aattccaggtggcaacgaccactgatctttactgagcgctgtgtgccaagcagcaacattttaagtccttgctaaggattaactcacttattcctcaagtcaccgctattcactaggtactacgttatcccacatagggaaactgaggcacggagagatgacgtaacctgcctcagcagcagaggcgaatttgctctgagccaccacactatactgcttaataccaagttgtttcctctgcttttccataatttccaatttttctacacagggcctgaagcacaattttttttttcttttgagacagtctctctgtcgcccaggttggagtgcagtgatgtgatctcagctcactgcaacctcttcccaggttcaagcaattctcctgcctcagcctcccaagtagctggaattacaggcgtgaatcaccaggcccagctaatttttgtatttttagtagggatggggttttgccatgttggtcaggctggtcttgaacccctgacctcaggtgatccrcctgccttggcctcccaaagtgctgggattacaggcatgatctactacacccggccctcttttttttg

SEQ ID NO: 689545 - DNA, 1729 bp, Homo sapiens
gagcccctttctccctctctagtttgaagcgaacttacccctgtagtctgtgcctggaaaactcgttttcctccttggtgcctcctgagttgtcacgggatgtatgtgcctgttagggtgtctggtgtctgtctccccgactggactgcatgctcctggtgagctggagggactggactagcacaggccaaggccctggggctggagagagcagggcagaaagcacaggcaaaaggcctttgtgatctggagggaagtgaaggagagggagagagatgagagaggctggcagaagatgggccaggggccaggctgcgtggtatcttctgggccacagaaagacatttgaattctcatgtaagagaaccaggacaccattggagggtatgagtcacytcatctaactgagctctgtaaatgtcaatgttttattatttttatacaattctttagaagtgattttaattatttacctttctattttaattatttttattttttttgagatggaatcttgctctgttgcccaaactggagtgtaatggcacgatctcggctcacttcaacttccacctcctgggttcaagtgattcttctgtctcagactcctgagtagctggggttataggcgtctgccaccacgcccagcttgtttttgtatttttaggagagacgatgtttcaccatgttggccaggctagtcttgaactcctgacctcaagtgatccacccaccttggcctcccaaagtgctgggattacaggcatgagccactgtgcccggcggctttctaagctttgtgaagagtgggttgactattcagatctctgcttctgtcccgctgtgccaagtgctggggcagacacaggcagagagtggacagcggcacggtgcctgctgctagccatttctatgcaaaaccagctttctggtcccatcctggaggccaattctaggcacctgggtgggcctgggaacctgtgaaccaagtaaactgacttggacacccccctaccccgccaggcctgtcctagcagccccacacaataccctcatgtcctgtccccaaacaccgccatcctcaaacacatgtgctctgtttccaggccgggccgggatcagatgggaagtggaacctcgtcatgagcagaaactgtttccctacgaagagcacttggagatggcaatgctgaatctcaccctgtaggactcacacacgactccaacgggattgtgagaatcaagtcactctcatgggaagaatttttatatgggaaagcggataaaactttcattggactggaatgtttggagaatgttaatttccaaatcaggaaccacaaactgccctctaataagacatcggctatctaagcgtgtgggtgccccctttctgccagcagttctggttcttaagaaaatcaccataaatcagacatgaaaattctggctccaaaaatagcattttctttgtgcaaataaaaacgtgtgtatcaagtatgatgttcccccaacgtggacacactcagttcctcacaaagccaagcccactgcagctgccacatccctgggcttacggtgcagcaggtgcttttttcaagacaggaatcaaaatgttaggaacacggcagaaaggggacacctggagaccaaacgcaggatgaggagttctgcagaggtcacagggaagtcacagaacagtaatacgctagcaggggcatggggcgtg

SEQ ID NO: 689546 - DNA, 1997 bp, Homo sapiens
ccggcccacactctcatttaatccctgcattgagatataatctcctttctacaaatgaggcactagatgctcagagagtgtgggtgacttgcccaaaccacacagccagtaagtggtggagtgggctgtgaaataagactccctgacacctaaaactatgccctaggggcaggctgccttctgaaatcatttcacaaggaagcaacaggtaagtgtggtcctgacttctacacaaggagattcatcttcctctttgactgaacatcaaatagcattccctccacaagtggagggactaacttgtcattaacaagacatccagggactctttctttcctaaggaacatcaccacactcagccagctgcacaatctgccatagctgtgttctgagaacttctgtaaacaaagtaatattaattatggagatgatgaaatcacaatcaaaattccaaactaagttcatctgcaacccacgatcacactacatcttggcgggaatatgctggtttgaagtagtcaagggctggagtttgaaagaggaacaaatgaagcctgaccttgggaggaacttccaaagattctgagccaactcccaacagggagctctcaggattcagcgagtgtcctgagtgtgctgtctgtctgtgacgcyggctaggccaagcctgatggttcctcatgagaatgtcctggcctgtgctgctgaaggtgtggtccacagtggggtcagtctgctgtttccagtctccaatgcaactcatccatgaacatatgtgcagagtttgtaaaccttccatttttctgttatttctgtatgtatttattgatttttttgtgtaaaatgtaaaacatgggttctgtattttgtgtttcattatcttcatagttaatattactttatttacaaaggtttaggtctgggatggatagaaaatgaaaactgtcccttcaccgtggagtttgagaagccccgtggaggattcaagtaatttaggcattggaatccacctcctgtggtcactttcaagcctaaaatccgcggaggatctgaacttgggcagggaaacctgagaataaacatgaggaatggagaagtctctgtaccacgtttaatgagtggagctgatcgcgtatgtccccatccccatatcatccagcacagtgcaggtgccttttacagaagatggaggtcagtgatgtaacggggcttgcctgaaggcgctcagactgttcagcactcacatttccatccagagcccagtctaaactcccagttcaatctcccaccccagtccctcattccaaaaacacaacaggaaccagaacgggaatcaagtctaagtgtttaattattattcacatatttcacagaaaaaaaggaatgtagcaaaggggtcaagattgtagcaaaaaacaaaaaatcctggattttacgggtcactctatttgtacttgggagcagggctgtcccgacatcaggcgcagcagctgcacttctccgatgcccctttgcagatgcagccctgggcacacttggcacagcccacagggcagcaggagcagcagcctggggaggaaaggagattgagaggtcagagcagactcgatcagagaactccctgccccaacagaggcctgtctccatccctccagccccagaggacccttagttcatgatggcatggtttttgtcaggagacaactggtggacattggaatgggtcttcctttgagaaagctgccccacctcacataagccctggaaagtgcagaagactagacaggcagtgacaacctacagggacaaaggaaggccggttccccagaagcacgcactcagggacagccttgggttccctcccaaccttagccacagccccagattcctggagatggccccgcactcactcttcttgcaggaggtgcatttgcactctttgcacttgcaggagctggcgcaggtgcaggagacacctgctagaagagaaaaagcca

SEQ ID NO: 689547 - DNA, 1694 bp, Homo sapiens
tggaacacggctgcagaaaaactccataactattcttgccagcagaaaatagccaaacacaatagaaagtaaattccacctcacatttcatttccaaaactcacacaaatgcatctttttagaagcccttaacaagtattgagagtgctagctgcaaatgagtctgagaaatggtttttttaaaaaaacttttgagcctctggaacccaagacatcacactaggaagcagaaattaaggccaagtgctaattggtcacatccaacatacctggctagacactcataacatatggtctcctgaatcacttggatattcagcttcactgcatcttagtgactctaatagtacctgcaagctaccgcagtccctcgagctccttactcctaggggttctagtatatggctaccaggacctcttagagcaagatctgaagagtcaccctgaggcaatatcaccattatatcatgctcgtaatacaggaggatcatttacagatgtgatctttattaaacatgaacttgagaaattcaccctctaaaatcttagttttcatttgaatttgaaatgttacaatataaaactaatcctagaaaaagatttttcccagaagcagataatttttgcattttatacttacgtaaggtttaagataaaataaaacacatcatttattaatttagactttttgttgcaggtttcctgaaacattgttgagtcttaaaaaataatttaggaattgatgtacaggtgtcactatatttatcgctgaagtctttgatgagtgttgatggcactatttcctactattgctggcttgttatagcctgccatgctagaagtttaggcattgatggattatagaacctgaagatctggagaaagaagtaattcaaatgtagtcaaaagctgtcaaactcctattgttatttttggtacttcaggggctcaaagagtagctggagaagaccaagggccaggaggcaatgttggttagcaaaggagagcaggaagccagcaggcacagtggacattgaggaatcttggatatgccacactcctgattcaagagcagcagagagtaaattaagaagagagaatacaacgagtcaggaaaggctttgccctggagaaaaagccaattccatggtcagcaggagaaactagaatcagttcactggtctgttaytcatgcacgaaacgaagtcagggcttgtatcaaaacctcatgtccaagttggtaagtcaagactgacattcagaagactcaaattgagtatgacccaaactgactttagcaaaagcagggaatcaaaatgctgggggttagaggacagtaatgggtcccaacaatgcaaagaactagagtatcagcaaaacagaacgcacaacaaaatagagccgcctagggatgagggtggagaagaacaccaaggcatgggcagactgcctcgctgcttttgcctcaaccaatttaaagagattggccttgggatgcagtatagagtttggcaggaactagtggagacatgggtgctgcaggtcaaggcaggccagagatgccaggcagccaaatagagaaataaaacacagttgaccagcagttcttcacagtccagcagctgctacaaagacttacatacttctatttgaaagaggagccagatcccaaaatacagaatgctcaggggatc

SEQ ID NO: 689548 - DNA, 665 bp, Homo sapiens
tgagtcctgtcaggagaaaactgaggtgcaaagaagttaaagaaacttgagcaagttgctcawgttggtggaatcaggtttaatcctaggctactcgtatgtgtcttgacctctgtaaagtattgcttctcatttaaaactcgtgatttgttgtaagcagcacatgaacctcctggattaggacagctgccccctaattggatgtccatcttctacttttgtcctctccagtttgttctccatctaacatgagagcagttttaagaaatttatttcagacactgtaacttcttcaaacccaacaatggcttccccttatacttcaaataaaatccaaactctgaacatcgcttacaaagctctgcaacttcccaaactcatctcattccactcacctccttgcctttaaaactctagacactggtctgcttcaattattagaaaacatttatttccctccttagctcaatccacatcctagaatatactctgtctccttcccatcataaaacacccagccgccatcccagaaggcctgccctggagtaccctgagacatcagaactcccttgacagccctttatactactgattaaggttgtaattatatatttacttgtctgttaagttgctttattgcctattttgaccatgtctcttttatt

SEQ ID NO: 689549 - DNA, 665 bp, Homo sapiens
tgagtcctgtcaggagaaaactgaggtgcaaagaagttaaagaaacttgagcaagttgctcaagttggtggaatcaggtttaatcmtaggctactcgtatgtgtcttgacctctgtaaagtattgcttctcatttaaaactcgtgatttgttgtaagcagcacatgaacctcctggattaggacagctgccccctaattggatgtccatcttctacttttgtcctctccagtttgttctccatctaacatgagagcagttttaagaaatttatttcagacactgtaacttcttcaaacccaacaatggcttccccttatacttcaaataaaatccaaactctgaacatcgcttacaaagctctgcaacttcccaaactcatctcattccactcacctccttgcctttaaaactctagacactggtctgcttcaattattagaaaacatttatttccctccttagctcaatccacatcctagaatatactctgtctccttcccatcataaaacacccagccgccatcccagaaggcctgccctggagtaccctgagacatcagaactcccttgacagccctttatactactgattaaggttgtaattatatatttacttgtctgttaagttgctttattgcctattttgaccatgtctcttttatt

SEQ ID NO: 689550 - DNA, 665 bp, Homo sapiens
tgagtcctgtcaggagaaaactgaggtgcaaagaagttaaagaaacttgagcaagttgctcaagttggtggaatcaggtttaatcctaggctactcgtatgtgtcttgacctctgtaaagtattgcttctcatttaaaactcgtgatttgttgtaagcagcacatgaacctcctggattaggacagctgccccctaattggatgtccawcttctacttttgtcctctccagtttgttctccatctaacatgagagcagttttaagaaatttatttcagacactgtaacttcttcaaacccaacaatggcttccccttatacttcaaataaaatccaaactctgaacatcgcttacaaagctctgcaacttcccaaactcatctcattccactcacctccttgcctttaaaactctagacactggtctgcttcaattattagaaaacatttatttccctccttagctcaatccacatcctagaatatactctgtctccttcccatcataaaacacccagccgccatcccagaaggcctgccctggagtaccctgagacatcagaactcccttgacagccctttatactactgattaaggttgtaattatatatttacttgtctgttaagttgctttattgcctattttgaccatgtctcttttatt

SEQ ID NO: 689551 - DNA, 665 bp, Homo sapiens
tgagtcctgtcaggagaaaactgaggtgcaaagaagttaaagaaacttgagcaagttgctcaagttggtggaatcaggtttaatcctaggctactcgtatgtgtcttgacctctgtaaagtattgcttctcatttaaaactcgtgatttgttgtaagcagcacatgaacctcctggattaggacagctgccccctaattggatgtccatcttctacttytgtcctctccagtttgttctccatctaacatgagagcagttttaagaaatttatttcagacactgtaacttcttcaaacccaacaatggcttccccttatacttcaaataaaatccaaactctgaacatcgcttacaaagctctgcaacttcccaaactcatctcattccactcacctccttgcctttaaaactctagacactggtctgcttcaattattagaaaacatttatttccctccttagctcaatccacatcctagaatatactctgtctccttcccatcataaaacacccagccgccatcccagaaggcctgccctggagtaccctgagacatcagaactcccttgacagccctttatactactgattaaggttgtaattatatatttacttgtctgttaagttgctttattgcctattttgaccatgtctcttttatt

SEQ ID NO: 689552 - DNA, 1107 bp, Homo sapiens
gcgagtgggccctccctgtactgtaggcccagcgtccatccaggccctgagggtcgccgtcgccacggcctccgcctggcatcacctgccagtgccccgcccaggggcccagtccccgtgcacttccctcacactcattccctcggtctgggaactccctggggtgacrccctcacccagcacaaaggaggcgctcacagacttgtcgagcgaacaaaccaagcagggcacaggtgtctgcagcacctgggggtggagtgcctcagggcctgggtccctcagagactcacacatcggggtgggggaactccaggagtccacctgacaggtgacaaggcagactgagacaaggccacgcggcccaagtgcgggggcagctgctccggaccccacagtggctgtggagtggcgctgagtgcaggtgtgtgtgctgacatccgccggcggggctggtgatgggtgatggtgtccagtgtgaacagaggacagaggtgcccttccatatcctgtttgactgctccccaggtccccaggccctgactcagcctgcgtgctgcgactgccccctctgcacccatactccacaaggcctgacccgcccagccttctactgtcctgtgtgaagcacgatgggggcagagcctcccgacacactcaggagtgggaggggccgtggccctcctgagcccagaccccaggtcctgcggccgccaagccccatggtcacagcagaataatgaataagaaaagtctggaaaccgcgtgtctgagttcacgtgtcaggggagctgatggggcagagtgggggtggggcagaacagaagacaccagagggaaggcctgagcgttgcaggctggaacaaccacctcctgagggctgagcgccccatccctggaggcaagcaagccgcacggatggagaactgttcggggtttgcgcctctggctaggtggttcctggcttgtcttgcctcatggcccctctgggaatctgatgaaacctggtgcctcctccccagaaaaacacaccgaagcgcccacatgtgcccagcttcaagagcttctctccgaatccccactgtcctccttcacagcccctcatgatcc

SEQ ID NO: 689553 - DNA, 1107 bp, Homo sapiens
gcgagtgggccctccctgtactgtaggcccagcgtccatccaggccctgagggtcgccgtcgccacggcctccgcctggcatcacctgccagtgccccgcccaggggcccagtccccgtgcacttccctcacactcattccctcggtctgggaactccctggggtgacaccctcacccagcacaaaggaggcgctcacagacttgtcgagcgaacaaaccaagcagggcacaggtgtctgcagcacctgggggtggagtgcctcagggcctgggtccctcagagactcacacatcggggtgggggaactccaggagtccacctgacaggtgacaaggcagactgagacaaggccacgcggcccaagtgcgggggcagctgctccggaccccacagtggctgtggagtggcgctgagtgcaggtgtgtgtgctgacatccgccggcggggctggtgatgggtgatggtgtccagtgtgaacagaggacagaggtgcccttccatatcctgtttgactgctccccaggtccccaggccctgactcagcctgcgygctgcgactgccccctctgcacccatactccacaaggcctgacccgcccagccttctactgtcctgtgtgaagcacgatgggggcagagcctcccgacacactcaggagtgggaggggccgtggccctcctgagcccagaccccaggtcctgcggccgccaagccccatggtcacagcagaataatgaataagaaaagtctggaaaccgcgtgtctgagttcacgtgtcaggggagctgatggggcagagtgggggtggggcagaacagaagacaccagagggaaggcctgagcgttgcaggctggaacaaccacctcctgagggctgagcgccccatccctggaggcaagcaagccgcacggatggagaactgttcggggtttgcgcctctggctaggtggttcctggcttgtcttgcctcatggcccctctgggaatctgatgaaacctggtgcctcctccccagaaaaacacaccgaagcgcccacatgtgcccagcttcaagagcttctctccgaatccccactgtcctccttcacagcccctcatgatcc

SEQ ID NO: 689554 - DNA, 1414 bp, Homo sapiens
gaagaggaggagctgcaggtggggagtcccagggctgccgtctcagctgcctggcgcccctgtgccacccactgtatccttgtgctggaacatccggtggtagctgagcctggccttcctgtctgtgtgaaggagacagcaaagtgatggccgtgagccatagtatagagaaccataggcagctctgcgagcatttttctcttagaaaactcagtggcttgtggaggagggcagtgtttacaaatggggatgggggactggcttttaggaaccagctgattcccaggtgccatggcagagctactagcagctttgttctgccagatgcctgtgttattgagatcatggtttcccgcagctacctctgcttttcctataaaaactattggtgaattgattttctttggtgatggtccttgagtcactcttggacatttcaatagagctatatttcccctacatttatttttaggtaccattacttrttgtccttatctctaggaaccttatgttctagcagacaaggcaggtgccagccgtgtcttcaaaagccaggcgtctctaaccttggactgccttggaagtgtttcatggtggtgtctctcagtgcccaaacctgttcctaagatccatctctgaagggcagttgtattttagggatttctgcccactccagtgctgagggcttgatgtccatctctcccctttctgctgtgatggtggttcacctttacctcacaggcagcctgtactttatataacgtctgccccaagggtacagaacagtgtcacctttgccgtggggagcaggcagaagctcccctcttcagcagcgcaggaccagaggggggtcgagggtgtgaatgaggacatcttcatccctcgggctgctgctgtgagaattctgaggaccagttccaagatggtggtggtggggagctctgcctcctggaagagtttccacagacttgcgagatttatttagcagccttttttggctgcgcactgcagttatgcatgaaaaagaaatttgaggccaaaccggagctgggttccaggtggtttttttatgttgtcacaaccataaagtatccatttttataaaacaagagtgaatggcagcccgtctgtataaatattatatttctaagttttagaagtggtggaatcaagaaatagacgaatggcatagcccttcattgagacttgtatgggatgatttacttgctaattctttattgaagactttacccccaaattttacatattttacttcttccctaaatgtaatttccatacacatcagtcagaagttgcatcagccgtggtcagattccgattcttcatctttaatgcgtttaaggcccagtgactcgctaggtcttagttttctcatttataaaattagggcaaa

SEQ ID NO: 689555 - DNA, 683 bp, Homo sapiens
gaggggaggggctaggtacctaaggcttccctatctttccacacagcctaattttcatagcctctggtctccacatttcactctttcccaaataaagaccttttaaggtgtgggtccccttggtcattctgtaaccattggatcaagttttcagttttttctgctctctcagctgcaaaataacacattcgagttttggttttttttatttggagacaaagtctcactctgtcgcccaggctggagtgcagtggtgtgatctcagctcactgtaacctcygcctcctggatataagcgattctcctgcctcagcctcccaagtacctgggattacaggcacccgccaccacacctggctaatttctgtatttttagtagagacggggttttgccattttggccaggcacactcgggttttctaaccataccttgagccaagaatttggattctgagcttgtcttttcatttaagctatgtggcgctgttaacatgaccgccctgcccagcagatcttgacttcagtgtaatctttattctcttctatggcaggagccattaggtcccccaaagccttgcctttgatgggtactttgttcccggggacaatgggattagctgtcttgccagggcgtgccatggggctgctggtgtcctgtcccttaataccagctggattttca

SEQ ID NO: 689556 - DNA, 1577 bp, Homo sapiens
aatttgagcccctttccccctaaaaagaaaactggatggatgagtctgactaaaataaggttgagaggaagatcaaagaaaggggagaaggatgtatgagagggtgagaggttgggatcatggagaagccagaggaagagaaacaaaacaaaggaacatgatctcctggctcctcgccaccccctggcccacgagaggtcactggcactgctgcagcttagcaggggtcacaggacatcaggggcatgatgggggtgactgacaaaggtcactcccagcctcctcgtgccgatggcaggatgcccacgaagacaccagaatatacttccaggtactctgcagagtcccatcccatttccttcctactgtctttccccgaaacagccaccctgagggttgtccagacacataaaccmccgcacccctcgcaggcctgctgtgcacagctgtgcaggttgcgccctgcacaaccccagaccacacgggaacgtctcccttgggagttgtacagcacagcagccctgacccctcctcttcctgagccaaatgaggaggcgattcttcttgccatggtgaagacgaaagctgggacatttaacctgatgtctcaagaaagaggtaaatggtcactggcagtagcagatcaggtaatgcccacgataaaatcacttcttacaactgagttcaggccgggtgcggtggctcatgcctgtcatcccagcactttgggaggccgaggcggtcagattacctgagttcaggagttcaagaccagcctggccaacatggcaactctgtctctactaaaaatacaaaaattaggccgggcgcagtggctcatgcctgtaatcccagcactttgggagggtgagacaggtggaccacctgaggtcaggagtttgaggccagcctgaccaacatggtgaaaccccgtctatactaaaaatacgaaatgagccaggcatggtggtgggtgcctctaatcccagctactcgggaggctgaggcaggagaattgcttgaacccgggaggcagaggttgcagtgagccgagatcgcaccattgcactccagcctgggcaacaagagcaaaactccatctcaaaaaaaaaaaaaaaaagagaacgaaaagaaaaattagccacgtgtggtggcgggcacctgtaatcccagctactcgggaggctgaggcaggagaaccgcttgaacctgggaggcagaggttacagtgagccgagatcgcaccactgtactccagcctgggcaacaagagcaaaagtctgtctcaaaaaaaaaaaagaaaaagaaaagaaaagagaaattagctgggcatggtggcgggcacttgtaatcctaactactcgggaggctgaggcaggagaatcgcttgaacccaggagatggaggttgcagtgagctgagattgtgccactgcactccagcctgggcaacagagcgagactccatctcaaaaaaaaaaaaaaaaaaaaaaattagaagagttcaatttccagtactggtcaagctctgacactgggcagcgagctgaacatgcatctacaccgctacagtgggaa

SEQ ID NO: 689557 - DNA, 612 bp, Homo sapiens
tgtggaatgttaaataaaccttttctaaaaaaaagagcaccttgacgaatcagattgttgtaactgtgcattaagcctgctatagaaagatgttgaaattctgttaagcttccctaaactatttctctataaacgatccccaaacttctacactccatacagtgacttccatgctttgaaatctatacttctcaggtggccatcctgaaactttgagcttgaataaactctctttagattccaatccttttgattattttgggttgacaaaagtgtggggactaagaattatgtggtgaggatccctccactcctcattttttgagaaaactttaaaatgggcgcaaagattattgggtgtgtaggggaggaaaagaaaactccttatctctatctacccttttacattcttggttggggtccctgtaacaaagacaaattaggctgrgtgcagtggctcacacctgtaatcccagcactttgggaggccaaggtgggtggattacctgaggtcaggagttgcagaccagcctggccaacatagtgaaaccccgtctctactaaaaatacaaaaattagccaggtgtgatggtgggtgcctgtaatcccagc

SEQ ID NO: 689558 - DNA, 612 bp, Homo sapiens
tgtggaatgttaaataaaccttttctaaaaaaaagagcaccttgacgaatcagattgttgtaactgtgcattaagcctgctatagaaagatgttgaaattctgttaagcttccctaaactatttctctataaacgatccccaaacttctacactccatacagtgacttccatgctttgaaatctatacttctcaggtggccatcctgaaactttgagcttgaataaactctctttagattccaatccttttgattattttgggttgacaaaagtgtggggactaagaattatgtggtgaggatccctccactcctcattttttgagaaaactttaaaatgggcgcaaagattattgggtgtgtaggggaggaaaagaaaactccttatctctatctacccttttacattcttggttggggtccctgtaacaaagacaaattaggctgagtgcagtggctcacacctgtaatcccagcactttgggaggccaaggtgggtggattacctgaggtcaggagttscagaccagcctggccaacatagtgaaaccccgtctctactaaaaatacaaaaattagccaggtgtgatggtgggtgcctgtaatcccagc

SEQ ID NO: 689559 - DNA, 612 bp, Homo sapiens
cacagcaggtgtggaaaatggctgccattctcttcatgtgggtagaaaagcatggcrtttgggaattaagtcctcgtctgtgtcataaaacccaaaggctcaaaagagaaatgattcacaagaccagggagttgaaattgtagtggtctcctaggtagaagagaccaccatgtaaaaaaagaaacccatcaccacctaccactgaatccaaacctacagctcccagtggttcctgttgcaaatggaaaagatcagctggaaagtgtgactgcctaaaaatgctgagagagctgtgtgtcttcctctcagcttagaccccccatcacacccccatgcaaataccagctgggaatgcacagaagtgcagcctggtttagtttttaaaaagagtaaacatcagtcatggggtcatatgatctccctgttaggttcacaggaatctttagttaatgtctgttacctaagaattatgaaaacagaaacaaccactaacaaggtgtcctaaaaacaaaacaaaccccaactacaacaaagaaaacctaaactaccaaatcattttcagataaatattgaatactggcttttccattcagtgaaggtagaaagtaatgg

SEQ ID NO: 689560 - DNA, 1397 bp, Homo sapiens
atagatatgtgtcctcaccacaaaaatcacatctatgtgaggcatgttaattagctagctttaaccattccacattgttatgtacttcaaaacatcatggatacataataaatacaattttatctgtcaatttaaaaaataaataaatttgaaaacttcaagtgctctctgaaccatttctacattcctgctggtccctcatttatgagttacctgtctgaaagtcatgcttacataacttcaaaaaaatttttacactttggcagtagagtagtacccactcagatgcccgaagggactctcatctgcttgagctactaaactgagtgtccccagaagggcacttcatcagctccttaaacccaagcatgtctcattttggctcccagagtaccaagagaataccaagcagccagagaatgttacttctgctgtttctctgttgtctccttttcttctgataatgtgttttcgtttgatgattcttagccacatgtccctgtccacactggcccagagaccagtggatacaaatcactaggccagtttcaactgcaccctctgtatacatgaatctggtctatgcatggctgataactgatcttggctaggaatctgattttatggtctgaccatatggtgatctgtccggtagacaatagggatctattttctgtcagatgagacacctcaagaaaatctggttttagtcttttctgtgttgttgttagtgcaagatcacgtttcgggaccaatgaaagaactgtctttttgaaatctggaccagttatgtgtttctcaattatttttacctgtgattcagactgttgaagctgaaagttcttgtgcacttgtgactataagaaaagcctcatttttcacggtatgaatgagaaatatccccagggctattaatacattagattataaagtttctcaaacaatctctactctagttggttgacagataattacaagaacttccttaactctatctatatttctagaattcctccaacataatgaaactaaacatgtaatactttaaacatgttagccttttaaggacaaaaaaaaacaaacccaggctgggtgtagtgatacatgcctgtattcccagsgacttgggagggtgaggcaggaggatcatttgagcccaggagttctgagtccagctaataacacactgcgagattaccatctcttaaaaaataacaacaaatagaaaaactccaaaactcaaagaaaccaataggtcaaaaacactgttaagaatccaaatttgtgtaatcaaaataattctcacgcaaatcagtattattttattattttaatactaatttaaaaatagatgtcctttccctgattttaccagtgtagaatataataaatctata

SEQ ID NO: 689561 - DNA, 671 bp, Homo sapiens
gtgtgatctcggctcactgcaacctccacctcctgggttcaagtgattctccagccctatcctcccaagtagctgggattacaggcatgtgccatcatgcctggctttttttttttgagacaaagtctcaccctgttgcccaagctggcgtgcagtggcatgatcttggctcactgcaacctccaactcctgggttcaagcaattatcctgcctcagcctccagagtagctgggactacaggcagacaccaccatgcccagctaatttttgtatttttagtagagatgaggtttcatcacgttggccaggctggtctcsaactcctgatctcaagtgatccgcccgcctcggcctcccaaagtgctgggattacgggtgtgagccactgcgcccggccaaactttttgataccagaagttggatgttgctcagttgtcagtataagcataacttccaagatcattaattaacttcaagactttggctagactgatattaattaatggttactctttagaatatgtgattaatttccaagtaagacagacacagaatttttcacttttgtttagagatgggtctatgttgtccaggtggtgtgcattcataggtgtgaacacagtacactgcagcctcagaatgctggcctcaaaccatcttcacacctcaa

SEQ ID NO: 689562 - DNA, 586 bp, Homo sapiens
caagaccagcctggacaacatgggaaaaccctgtctctactaaaaattcaaaaagtagccgggtgtggggaacrcacctgtaatcccagctactcagggggctgaggcaggagaatcacttgaacccaggaggcagaggttacagtaagccaagattatgccactgcactccagcctgggtgacagagtaagactctgcctcaataaaaacagcaacgacaacaacatagttcattcctttttattcctgaatattattccaatgtttgggtataccccattttatttattcattttaccagttgatgagcatttggattatttctatttcttggctgctataaagagttctgctatgcacattcatgtgtaggtttctgtatggtcggatgttttcatttcatctgggtagtttcctagaagtggaattgctgggttttatggtaagctcatgttaaactttgtaagaaactgcgaaacttttcaaagagcctttgtcattttacattgaactcaggtctttgtgactctgacgtccaagttcttaaccactgcattatgtgtatgtctcatgttactccatgcc

SEQ ID NO: 689563 - DNA, 586 bp, Homo sapiens
caagaccagcctggacaacatgggaaaaccctgtctctactaaaaattcaaaaagtagccgggtgtggggaacgcacctgtaatcccagctactcagggggctgaggcaggagaatcacttgaacccaggaggcagaggttacagtaagccaagattatgccactgcactccagcctgggtgacagagtaagactctgcctcaataaaaacarcaacgacaacaacatagttcattcctttttattcctgaatattattccaatgtttgggtataccccattttatttattcattttaccagttgatgagcatttggattatttctatttcttggctgctataaagagttctgctatgcacattcatgtgtaggtttctgtatggtcggatgttttcatttcatctgggtagtttcctagaagtggaattgctgggttttatggtaagctcatgttaaactttgtaagaaactgcgaaacttttcaaagagcctttgtcattttacattgaactcaggtctttgtgactctgacgtccaagttcttaaccactgcattatgtgtatgtctcatgttactccatgcc

SEQ ID NO: 689564 - DNA, 637 bp, Homo sapiens
tggtaacaaagcttttccagctgaatgaatgcacttagctgataaaccagaatttgttcttttttttccttcttttttttttgagacaggttctcactctgtcaccgaggttggagtgcagtggtatgatcatagctgactgcagcctcaaccttctgggctcaaatgatcctttcacctcagcctcctgagtagctgggaccacaggtgtgtgccaccacacctggctaatttttatggatttttttttcttttttttttttcgccatgttgcccaggctggtcttgaactcttggcactcaagcagtccttctgcctcagcctcccaaagtgctgggattacagatgtgagccactgcacctggccccagaaattatgcttaaaaaaaaaattaagctgtgtggaatctggacaaggctatgtttctcctaraaacaggttttgctgtaaatggttttgatgggcgaaagtgtgagaaaaggttataatagattcttttttttaattttgtgagaaattccaggtcttcttgcttaacttatatgcatgtggatatatttgttttcaaagccatggaagaatctctgttcatatattttaatgcaaattaccttgtatgctgctatgcaaattct

SEQ ID NO: 689565 - DNA, 714 bp, Homo sapiens
  misc_feature 268, 269, 270, 271, 272, 273, 274, 275, 276, 277, 278, 279,280, 281, 282, 283, 284, 285, 286, 287, 288, 289, 290, 291,292, 293, 294, 295, 296, 297, 298, 299, 300, 301, 302, 303,304, 305, 306, 307, 308, 309, 310, 311, 312, 313, 314: n = A,T,C or G
  misc_feature 315, 316, 317, 318, 319, 320, 321, 322, 323, 324, 325, 326,327, 328, 329, 330, 331, 332, 333, 334, 335, 336, 337, 338,339, 340, 341, 342, 343, 344, 345, 346, 347, 348, 349, 350,351, 352, 353, 354, 355, 356, 357, 358, 359, 360, 361: n = A,T,C or G
  misc_feature 362, 363, 364, 365, 366, 367: n = A,T,C or G
gtagttctccttatcctggggttaattcaggagaacagcatggcccctgttctccctgctaatgtccttcctctacccatttcagatagttccaaggctcttcttcactctttcccagtcttaagttaaaattctcacttcttcaaaatagggaagtgcataaacctgtgctcatatctatttagaagaaatgatatggggtgaggaaacaatgaataatggagtacactcagtgaaagtcacttttgggggatcttaatgacaaacnnnnnnnnnnnnnnnnnnnnnnnnnnnnnnnnnnnnnnnnnnnnnnnnnnnnnnnnnnnnnnnnnnnnnnnnnnnnnnnnnnnnnnnnnnnnnnnnnnnnctatatgtttgcacacacaaayatatgtttgtgtgtgaatatatatgtgttgaatatatattacttataaaaattattatttcctcttaccaattttctgttttgtgaaagtgtttttatatctttttcctgaaaaattcttaaaattctcattcacatcaatttcttttcatgtggtgttttcttactgttcacttgatcattttaccacaattaattatgggtctagcatggtcctatgggcagagaatgaaagatctaagcacagccctcatcttcagggaactcatcattcagtgatggagacattcatgaaaagagaaataggaaattagtgaaaattttga

SEQ ID NO: 689566 - DNA, 714 bp, Homo sapiens
  misc_feature 268, 269, 270, 271, 272, 273, 274, 275, 276, 277, 278, 279,280, 281, 282, 283, 284, 285, 286, 287, 288, 289, 290, 291,292, 293, 294, 295, 296, 297, 298, 299, 300, 301, 302, 303,304, 305, 306, 307, 308, 309, 310, 311, 312, 313, 314: n = A,T,C or G
  misc_feature 315, 316, 317, 318, 319, 320, 321, 322, 323, 324, 325, 326,327, 328, 329, 330, 331, 332, 333, 334, 335, 336, 337, 338,339, 340, 341, 342, 343, 344, 345, 346, 347, 348, 349, 350,351, 352, 353, 354, 355, 356, 357, 358, 359, 360, 361: n = A,T,C or G
  misc_feature 362, 363, 364, 365, 366, 367: n = A,T,C or G
gtagttctccttatcctggggttaattcaggagaacagcatggcccctgttctccctgctaatgtccttcctctacccatttcagatagttccaaggctcttcttcactctttcccagtcttaagttaaaattctcacttcttcaaaatagggaagtgcataaacctgtgctcatatctatttagaagaaatgatatggggtgaggaaacaatgaataatggagtacactcagtgaaagtcacttttgggggatcttaatgacaaacnnnnnnnnnnnnnnnnnnnnnnnnnnnnnnnnnnnnnnnnnnnnnnnnnnnnnnnnnnnnnnnnnnnnnnnnnnnnnnnnnnnnnnnnnnnnnnnnnnnnctatatgtttgcacacacaaatatatgtttgtgtgtgaatatatatgtgttgaatatatattacttataaaaattattatttcctcttaccaattttctgttttgtgaaagtgtttttatatctttttcctgaaaaattcttaaaattctcattcacatcaatttcttttcatgtggtgttttcttactgttcacttgatcattttaccacaattaattatgggtctagcatggtcctatgggcagagaatgaaagatctaagcacagccctcatcttcagggaactcmtcattcagtgatggagacattcatgaaaagagaaataggaaattagtgaaaattttga

SEQ ID NO: 689567 - DNA, 594 bp, Homo sapiens
agaaaggtaaatgggtcatattgttgtcatctgatttggcctttgagcctagaaaggagagatcagttttactttctttatgatattttacctggtcctcaaccacttcatggcaatacccagaggactttgccagatcttcactttccttaacttttctgcatcatttagtgccatttcttagaaggctttacttgtatgcaatttgcaaagtggttacacaagtactattttttaatcctcctttcaagttctctaatgttaacagttcagtgaagctgagttacagtgaaattatgtgaaatgacaagtatcacttctcccacacctaagcatgttatcaamgatattattattactatatagatcttcttcatgggacctctagttatctagtgggtatctaaaactcaacatatctataacttgaccaaacatgactcttatctcttaagtcaattactctttttccaaatgtgtataagcactaaagtaccttcattgttcaggtctctgaggtttaaaatcctgatcctcttacttccatcagtcacaaaaatcttcccttttcacttccaaatgtattttgcttta

SEQ ID NO: 689568 - DNA, 1662 bp, Homo sapiens
agtaaggggtaagggaaattggcgatataggaaattgcacctaactgtagggggcagggatgctgacagaagcctgtctgcttccctcccgtgcaaggggaatggtgatagcacccactctcccttcggttgtaaggggtctgtctgcgtggagcatttggaacagcgcctggcacggaggcagctcccatgcatgctatagctgttttaccgagcaggaactttctgttcctctcctgaggccgtttctcagtctctcctgctgtctctcctggagaagaagtccctgatacaccctgggggctgggcccaggtagggccggagaggcataagcctggcttcccagagccctgatggctgggccagcggtggaggctagggatgggttctcatcatttcatcagctgacactcacttctaacatcacttcaccccacccccagtggcacctggtgtccctgagatcgcgtgtccatctcaggatctccagaaggtgagggaaaaggaagctagagcgtaactctgattgtctgacctttccacgaaccgcctgctcttggccccaaccctaacccccttcgcctttccagggacctgaagaggcmcccccgaatcctggccttctctgcactctgggttgcatagcaagaatcatcttgcttcttcagctgcccctcccccttgaaactcttcattttgtgaataaacaatcacctatgtatatcaaaaacccacacacactaagaaggtgcctctttggagatgccttgaggcagatttctcctgcctccgatttccgagtagctgggattacaggcacctgccaccaagctaggctaatttttgtatttttagtagagacgggatttcaccaggttggccaggctggtctcaaactcctgacctcaggtgatccacccgccttggcctcccaaagtgctaggattatagcacttggccttgctgccaccccagaccctcatctccttgtcctctgcacggaactattttggtcggattttgcttcttcttggcctgtcctattccctaacctgccttcagagggactgaggttttagattttcccgctctgctacatttgtgtctactcatttcatcttccaaatcttggttgaagtattttgtcttctccttctgccatgtttccttcttctgaatttgcgcttaaaaaatcttttttactgtcatttagtaaagttttgcaaagtaatggagaaaaatgtgttgccaaaccaaacgtgagtctgctcacccagtgatcggaaaaagccaaacgccagcactgggatttgcagcaagagaaagtgaggaacttccttagcgcatgtttgatttcagtctctctgaggtctgtgagactgtggtcagcattttccattgggcgagggtcctggtttctgaaaaacaactccaggacatatgtcaagaagttatctttagtttctgtagggaaccaatcatcttgtgactctgatttatgtgggtggttattgttgaagttatgattatcttcttgtttagcaggttattaatttgcttcctctggttgcagggtgtgcctggaatttccgttagagattcaaaatcttttctttatgtccatgctggggtggaggggagcccagcagggccctacaagg

SEQ ID NO: 689569 - DNA, 1478 bp, Homo sapiens
gaaagtaaataggcctcttatctcagcttaattaaaattattttaagaagagagggagttggagcctctacagaaaatctaattacgctatttcaaacagcagaagatagcgtttcagtttctgatgcccctgataactgtgtaatagattgtgaagaaaaggcagggacagaatctgggaaaggaacagaaagttcacwttgtaaatatgtagcagagtctgtaatggcttggtcaacacaaaatgttgactacaatcaattataggaggtaatatatcctgaatgtcagacagttggatgcataatgaatgatttttacatatttttaattaccttactgtcatctgcgtggggttggggaagaagaagggattaaaactagatggtgcttaatgtgccacattcaagtagaaggtaaatgaatcctattgtttttttttttactaaaatttttctcttaacattgaatatggattctttaggaagagaaagcaaccctctgtaggttgggttcaaaccctgtgagcaagtgttagatgtggacggacccagggcctcctggagctttcggtctggggtgctttagcagtgcttccaaaaatgcttagggtccaggccgggcatggtggctcactcctgtaatcccagcactttgggaggctgaggcgggtggatcacctgaggtcaggagctcaagaccagcctggccaacatggtgaaaccctgtctctactaaaaaaaaaaaaatccaaaaattagctgggcatggtggtgcacacttgtaatcccacccacttgggaagttgaggcaaaaaaatcacttgaaccccaaaggtcaaggttgcagtgagttaaaattgtgccactgcactccagcttgggtaacaaagggagactttgtttcaaaaaaaaaaaaaaaaaaaaaaaaaagaaatgctcagggtccacctttggggcagccacgacttcccagggtgccagcttgcagtgtcatgctccccacctacaggctcacaaaaatcctgtgatgggctggactgtgttcccaaagtcctaacccgtttctcagagtgtggtcttgtttggagatacggtctttacagaggtaatcaagttgcaatgaggtcattagggtagaccctaatcctacacgacacgcatccttatgaaaggggaatatgtggacacaagcacagagggaagacagagtgaaaacacagggagaggctgggtgtggtggctcactccagtaatcccagcactttgggaggccaaggcaggaggatctcttgaagccaggagtttgagaccagcctgggctacacagggagaccttgactctataacaaatttaaaaattagccaggcatggtggtgcatgcctttagttccaactacttgggaggctgaggcagggggatcacttgaacctgggggatcgaggctgcagtgagtcgtgttcgtgccaatgcactc

SEQ ID NO: 689570 - DNA, 1478 bp, Homo sapiens
gaaagtaaataggcctcttatctcagcttaattaaaattattttaagaagagagggagttggagcctctacagaaaatctaattacgctatttcaaacagcagaagatagcgtttcagtttctgatgcccctgataactgtgtaatagattgtgaagaaaaggcagggacagaatctgggaaaggaacagaaagttcactttgtaaatatgtagcagagtctgtaatggcttggtcaacacaaaatgttgactacaatcaattayaggaggtaatatatcctgaatgtcagacagttggatgcataatgaatgatttttacatatttttaattaccttactgtcatctgcgtggggttggggaagaagaagggattaaaactagatggtgcttaatgtgccacattcaagtagaaggtaaatgaatcctattgtttttttttttactaaaatttttctcttaacattgaatatggattctttaggaagagaaagcaaccctctgtaggttgggttcaaaccctgtgagcaagtgttagatgtggacggacccagggcctcctggagctttcggtctggggtgctttagcagtgcttccaaaaatgcttagggtccaggccgggcatggtggctcactcctgtaatcccagcactttgggaggctgaggcgggtggatcacctgaggtcaggagctcaagaccagcctggccaacatggtgaaaccctgtctctactaaaaaaaaaaaaatccaaaaattagctgggcatggtggtgcacacttgtaatcccacccacttgggaagttgaggcaaaaaaatcacttgaaccccaaaggtcaaggttgcagtgagttaaaattgtgccactgcactccagcttgggtaacaaagggagactttgtttcaaaaaaaaaaaaaaaaaaaaaaaaaagaaatgctcagggtccacctttggggcagccacgacttcccagggtgccagcttgcagtgtcatgctccccacctacaggctcacaaaaatcctgtgatgggctggactgtgttcccaaagtcctaacccgtttctcagagtgtggtcttgtttggagatacggtctttacagaggtaatcaagttgcaatgaggtcattagggtagaccctaatcctacacgacacgcatccttatgaaaggggaatatgtggacacaagcacagagggaagacagagtgaaaacacagggagaggctgggtgtggtggctcactccagtaatcccagcactttgggaggccaaggcaggaggatctcttgaagccaggagtttgagaccagcctgggctacacagggagaccttgactctataacaaatttaaaaattagccaggcatggtggtgcatgcctttagttccaactacttgggaggctgaggcagggggatcacttgaacctgggggatcgaggctgcagtgagtcgtgttcgtgccaatgcactc

SEQ ID NO: 689571 - DNA, 1478 bp, Homo sapiens
gaaagtaaataggcctcttatctcagcttaattaaaattattttaagaagagagggagttggagcctctacagaaaatctaattacgctatttcaaacagcagaagatagcgtttcagtttctgatgcccctgataactgtgtaatagattgtgaagaaaaggcagggacagaatctgggaaaggaacagaaagttcactttgtaaatatgtagcagagtctgtaatggcttggtcaacacaaaatgttgactacaatcaattataggaggtaatatatcctgaatgtcagacagttggatgcataatgaatgatttttacatatttttaattaccttactgtcatctgcgtggggttggggaagaagaagggattaaaactagatggtgcttaatgtgccacattcaagtagaaggtaaatgaatcctattgtttttttttttactaaaatttttctcttaacattgaatatggattctttaggaagagaaagcaaccctctgtaggttgggttcaaaccctgtgagcaagtgttagatgtggacggacccagggcctcctggagctttcggtctggggtgctttagcagtgcttccaraaatgcttagggtccaggccgggcatggtggctcactcctgtaatcccagcactttgggaggctgaggcgggtggatcacctgaggtcaggagctcaagaccagcctggccaacatggtgaaaccctgtctctactaaaaaaaaaaaaatccaaaaattagctgggcatggtggtgcacacttgtaatcccacccacttgggaagttgaggcaaaaaaatcacttgaaccccaaaggtcaaggttgcagtgagttaaaattgtgccactgcactccagcttgggtaacaaagggagactttgtttcaaaaaaaaaaaaaaaaaaaaaaaaaagaaatgctcagggtccacctttggggcagccacgacttcccagggtgccagcttgcagtgtcatgctccccacctacaggctcacaaaaatcctgtgatgggctggactgtgttcccaaagtcctaacccgtttctcagagtgtggtcttgtttggagatacggtctttacagaggtaatcaagttgcaatgaggtcattagggtagaccctaatcctacacgacacgcatccttatgaaaggggaatatgtggacacaagcacagagggaagacagagtgaaaacacagggagaggctgggtgtggtggctcactccagtaatcccagcactttgggaggccaaggcaggaggatctcttgaagccaggagtttgagaccagcctgggctacacagggagaccttgactctataacaaatttaaaaattagccaggcatggtggtgcatgcctttagttccaactacttgggaggctgaggcagggggatcacttgaacctgggggatcgaggctgcagtgagtcgtgttcgtgccaatgcactc

SEQ ID NO: 689572 - DNA, 1343 bp, Homo sapiens
ttggcacaatacttggcacatagacaacactcaaaaacatttgtgaaagttattttttttccccaaatgcagaggtttaaaaaaaaatgcatcttcctaatctacttcaactagaaaagctgaacttgccccgtatttagtgaccctgagttgcctctgtgatcaccacttttaagtgccacacaagcatgagcatgagaatttgaatcaacagttgtttcaactccaccaaacagttaatgagcttctttgtaacgggcataaaaagataaaataataataactttctcatgataaaacaaggcttccagcttgagcaaagactgctgactagaaccaagtaaagaagctattcagcaacattctgaataatctaccatcattaaatacaaatgtggactggtaccaagggcatcattaagcagttttctttagcaatactcaaaggcagcctgagaactggaggaaaaccaggggccagcagggcagctggacagaggggcagaggtcctgagggtggaagcactgaccagaaggaagggcctgaggacaggaaagacagggagagaccaaaggaccctggcgcctctgtccaggattgtgcagagaacacagatacaagatcaccagttatgaaataccaggattccagaagttttaaaactcccctgttctaaaaaagtgggacactgtgtccttggctgatcttttggcactttctgttgctcttgaccccacaaagattacaaaaacagtggcttccagggargcccttgagatgacagtttaaaccttgaaacaaatccaacccaagtaaaaagattttcttgcccaaactactttgtatttttctctgctttaattactgaaccctataactagaattcatccctgattcaaagagatgctaaaaatagcctatttcagaatgtagaatgagaagcatcgtgtaattttgctactaaatggactccttcttttttttatagttcagtaacttactcttcaaatacatttatttttatcaaccaaaaaaatgcaaagcacttcggatgcacattaaacagtaattttcaatactaattatgtatttataagtttataagtgaaatctcaggcatacaccaaccttacttaaaaacagccgcctgactctttccccctaatcatgaccttcattaaacagctttgattgcaaagagtaccacctcatttacatatgatgaatgaattaaagctcttatccaacaggctccccattgcaactggcaatttattaataacaacttacatctgaatccacagtgccatttacaaagggctttcacataaatcatctcatt

SEQ ID NO: 689573 - DNA, 784 bp, Homo sapiens
tcctggaaggcagtgattcctcttttattctgttacatctgttccacattgctgtgataatgctgttgaagtgcacccccttacaccagaagatcacctgtgtgaatgtgaatagactgacactggagaggaccagctcagcacagtcacttgaactgcccctttgcatttcaggcaggtaaaatgcctttgaagagtgaaaataaagttactgctgattaagcagagagtttgacttgctgatcaatttgatcagaagcctctcaatgagataattactgcatttatttatttcaagaaaagtaaaagccaaagcccagaatgtggcaaggcaagagttgaaaagaaaagaacaagtttttctttgcctagcaagctcacttcaaggacagttataagataatgctgtttgagaagttgaraccaaagaaataggctccagacactcccctccgaagcaagggtgaaggaaacaaagaaaaacaaacaaatgtctgtatttagccagttcttgttttttctttcaatgcagctacaaggccaccagctattaaaggccacaagttatgccaagaattcagttatgctataaattacataaactggtcattatataattaactgcctttgttttgcttctgtaagtttacttattaaaatctcactcagtctttgttcaaggctcagctttttggatgtgaattcactgagccagagcataccttaaaataaatatcctcctttattgactcatactggtctctctagtcctctgtgtcccaca

SEQ ID NO: 689574 - DNA, 784 bp, Homo sapiens
tcctggaaggcagtgattcctcttttattctgttacatctgttccacattgctgtgataatgctgttgaagtgcacccccttacaccagaagatcacctgtgtgaatgtgaatagactgacactggagaggaccagctcagcacagtcacttgaactgcccctttgcatttcaggcaggtaaaatgcctttgaagagtgaaaataaagttactgctgattaagcagagagtttgacttgctgatcaatttgatcagaagcctctcaatgagataattactgcatttatttatttcaagaaaagtaaaagccaaagcccagaatgtggcaaggcaagagttgaaaagaaaagaacaagtttttctttgcctagcaagctcacttcaaggacagttataagataatgctgtttgagaagttgagaccaaagaaataggctccagacactcccctccgaagcaagggtgaaggaaacaaagaaaaacaaacaaaygtctgtatttagccagttcttgttttttctttcaatgcagctacaaggccaccagctattaaaggccacaagttatgccaagaattcagttatgctataaattacataaactggtcattatataattaactgcctttgttttgcttctgtaagtttacttattaaaatctcactcagtctttgttcaaggctcagctttttggatgtgaattcactgagccagagcataccttaaaataaatatcctcctttattgactcatactggtctctctagtcctctgtgtcccaca

SEQ ID NO: 689575 - DNA, 904 bp, Homo sapiens
tgcagtcaattttcataaatctcatgtgtgtttcaaagaaatgagtattctctatttgttgcctttaggaatctatgtatcttcattatatcatgactgttaattgtttttcacatgttctatacycttcctaatgctttgtctgcttgatctatcaattaccagaataggtattgcagtctgcccctctgaattcatatcacatgcatataaattttaagttactaaacttccctccgtgaaatcaagctcttatcattgtgtagttaccttctttatcttgaataattattctaatttaaggtcgattttccctgataataatataagtaaaccaactttcttttggttagcatttgcctgatttatcttagtccatctttttactttctattttcctgtaactttccttatattccttaggtattctgaccacgtgtgtcttttggctaatgaatttattccatttataatttatttatgtttctttatatgcatttatatgtatatataatatatatgtatttcttccatatagttatttactttttgttactttttatattctgcttttgttctttcaactgtttttgtttttggtggttgtcttagaaaattaatttgcaaatttataaagaaaacaagattgtaagaaaggcagaggaaatcaaataataaacatgaagatgaaattaatcaataaaaatgaaataaaacattgtcagtaataatagacataaaggaaattaaacattatcagagaataatattctcaattatgttttaagaaagctaaaataaatatccatgaagtatataatttccttgggaaaatatcattccaaaattattctaaaagaaggaatagtctgaaaaatattagtaatataggcaacaaacatta

SEQ ID NO: 689576 - DNA, 904 bp, Homo sapiens
tgcagtcaattttcataaatctcatgtgtgtttcaaagaaatgagtattctctatttgttgcctttaggaatctatgtatcttcattatatcatgactgttaattgtttttcacatgttctatacccttcctaatgctttgtctgcttgatctatcaattaccagaataggtattgcagtctgcccctctgaattcatatcacatgcatataaattttaagttactaarcttccctccgtgaaatcaagctcttatcattgtgtagttaccttctttatcttgaataattattctaatttaaggtcgattttccctgataataatataagtaaaccaactttcttttggttagcatttgcctgatttatcttagtccatctttttactttctattttcctgtaactttccttatattccttaggtattctgaccacgtgtgtcttttggctaatgaatttattccatttataatttatttatgtttctttatatgcatttatatgtatatataatatatatgtatttcttccatatagttatttactttttgttactttttatattctgcttttgttctttcaactgtttttgtttttggtggttgtcttagaaaattaatttgcaaatttataaagaaaacaagattgtaagaaaggcagaggaaatcaaataataaacatgaagatgaaattaatcaataaaaatgaaataaaacattgtcagtaataatagacataaaggaaattaaacattatcagagaataatattctcaattatgttttaagaaagctaaaataaatatccatgaagtatataatttccttgggaaaatatcattccaaaattattctaaaagaaggaatagtctgaaaaatattagtaatataggcaacaaacatta

SEQ ID NO: 689577 - DNA, 904 bp, Homo sapiens
tgcagtcaattttcataaatctcatgtgtgtttcaaagaaatgagtattctctatttgttgcctttaggaatctatgtatcttcattatatcatgactgttaattgtttttcacatgttctatacccttcctaatgctttgtctgcttgatctatcaattaccagaataggtattgcagtctgcccctctgaattcatatcacatgcatataaattttaagttactaaacttccctccgtgaaatcaagctcttatcattgtgtagttaccttctttatcttgaataattattctaatttaaggtcgattttccctgataataatataagtaaaccaactttcttttggttagcatttgcctgatttatcttagtccatctttttactttctattttcctgtaactttccttatattccttaggtattctgaccacgtgtgtcttttggctaatgaatttattccatttataatttatttatgtttctttatatgcatttatatgtatatataatatatatgtatttcttccatatagttatttactttttgttactttttatattctgcttttgttctttcaactgtttttgtttttggtggttgtcttagaaaattaatttgcaaatttataaagaaaacaagattgtaagaaaggcaraggaaatcaaataataaacatgaagatgaaattaatcaataaaaatgaaataaaacattgtcagtaataatagacataaaggaaattaaacattatcagagaataatattctcaattatgttttaagaaagctaaaataaatatccatgaagtatataatttccttgggaaaatatcattccaaaattattctaaaagaaggaatagtctgaaaaatattagtaatataggcaacaaacatta

SEQ ID NO: 689578 - DNA, 2016 bp, Homo sapiens
tttgtttttattttgtttatgtttatttcttttataacagaaggtagtaatattacagacatactgcattttattgctgtggcattatacactcattgtatacttgcatttgggagggaagtaactagactacaatataggaatctgctcaaactaagcaggaagcatttgtatgcaaggaacgaataattcttgtttttttcccctggaacattctaatcggctctttatttatccagtcaagactaactgaatcttttccctggaagacagggaatggcattttaaatggtttcaggggtgacaagtgtttgtaattgtgtgtgatgccattttaccattgttcaattgggggcagaatttattttaccccatgaaagagaagcttcagcctcatcagtataataactttttttaaacgattggctatctaaagattatatcctgaattacacaaaaaggagacttcgctgggcacggtggctcacgcctataatcccagcactttgggaggccaaggtgggcagatcacgaggtcaggagttcaagaccagcctggccaacatagtgaaaccccgtctctactaaaaatacaaaaattagctgggtgtggtggcgggcgactgtattctcagctacttgggagactgaggcaggagaatcactttaacctaggagtcggaggttgcagtgagccgagatcgcaccactgcaccccatcctgggtgaaacagtgagactctgtctcaataaaaatataaaaattaaaaaaatggaggggtgggggagacttcaatgtgtaggaaggtaaaacctaggatgtctgccccattctgtatttgctgcagtttactttctaagatcagatctgataacttcacccatttgattcaaaatgtttgcctataggagaaaacccaaaccatttaaatttacccatataatcttttgccattgggcccagctatctctccaatgttggcttccattttttgccttgaaatgcccagctctactgagattcttaccagaacccaaaggcaccatgccctttcactcttcaacacctattcacatgacttttctctgttgggaataccaataccttctctgcctattcattctctaaccccagtccctctgctatggtccctccatgcttagcagctacttcttaaaaagatacctcaagtcctattggcagttctagcttaaggcttacctctcccagtggatgatacaatattcatgaacaaaaattctattacatttctgtaaatcagttcagtgcctttcgcagtttctggcatatcacaagttcttcctaagtgtttgagttaacaaaacttaatttttaaaattgtgctatgtttttcttacctatttacctactactttgagattttcttgaaaatcacagctgttttatctatcattctattctttttcaaattgtttttgaaatttaaaatgttttggcttttataattttttaaattttattgtaaattgacaaattgtaattgaatatactattgggcacaaaatggtgttatatgcatgcaatgtggaatgattaaatcaagctaattaacataaccatcacatcaaatacttatcactttctgtggtgagaacattgaaaattgactctcagaatttttgaaatatataaaaaatacacttatttacaatagtcactgtgctgtacaatatgtctcaaaaacttattgttcctctcaaactgaaactttggaccctttaacaacatgtcccttttcccccagtgtccagcctgggacactagaatgtaagcaccattctaccttctgcttctttaattcaattgctttagatttcacatgtaagtgagaacatgcattacttgtcttcctgtgcctggcttattcacttagcataatgttctccaattccattcctgttgttgcaattgacaaaatttmtttcttttttaaggctgaatagtattccattgtgtatatataccacattttt

SEQ ID NO: 689579 - DNA, 603 bp, Homo sapiens
cctgcaaaagagtctggcaatccagtgtaattttcttagtaagcaaagtgtgataggagggatggaaaatagattttgagtcagccagtatatagtttctgccacaaatttctttgtaatyttccatattatttatatataaacgaataaattggaatttaaagtactacgtgttacaagtaaagaatcttgaatgtagcatgattccatggcttataagagaatgtagatatgtactttcagattaattaaacaggagtattgatactctaaaattgaatgcaatataaactcttcacttatatttgattttggaaagtgtcttgaatttatatatccataggatgaatctcacttgctcaaaatgattcaggattaaccttctacagggcatctctagtcaaaaagtaagtgagaagtgcctcaattacaaatggcctgaaaagaaagaaaatagcaatgctttgagtgtctattatgttctagaagcttgtatgcactgagtcatttaacctatgtgacaatacgtcaaggtaagaattattatctccaatgtagagacactgtcatctcctgttttagagattggtaaagtgaggttca

SEQ ID NO: 689580 - DNA, 603 bp, Homo sapiens
cctgcaaaagagtctggcaatccagtgtaattttcttagtaagcaaagtgtgataggagggatggaaaatagattttgagtcagccagtatatagtttctgccacaaatttctttgtaattttccatattatttatatataaacgaataaattggaatttaaagtactacgtgttacaagtaaagaatcttgaatgtagcatgattccatggcttataagagaatgtagatatgtactttcagattaattaaacaggagtattgatactctaaaattgaatgcaatataaactcttcacttatatttgattttggaaagtgtcttgaatttatatatccataggatgaatctcacttgctcaaaatgattcaggattmaccttctacagggcatctctagtcaaaaagtaagtgagaagtgcctcaattacaaatggcctgaaaagaaagaaaatagcaatgctttgagtgtctattatgttctagaagcttgtatgcactgagtcatttaacctatgtgacaatacgtcaaggtaagaattattatctccaatgtagagacactgtcatctcctgttttagagattggtaaagtgaggttca

SEQ ID NO: 689581 - DNA, 603 bp, Homo sapiens
cctgcaaaagagtctggcaatccagtgtaattttcttagtaagcaaagtgtgataggagggatggaaaatagattttgagtcagccagtatatagtttctgccacaaatttctttgtaattttccatattatttatatataaacgaataaattggaatttaaagtactacgtgttacaagtaaagaatcttgaatgtagcatgattccatggcttataagagaatgtagatatgtactttcagattaattaaacaggagtattgatactctaaaattgaatgcaatataaactcttcacttatatttgattttggaaagtgtcttgaatttatatatccataggatgaatctcacttgctcaaaatgattcaggattaaccttctacagggcatctctagtcaaaaagtaagtgagaagtgcctcaattacaaatggcctgaaaagaaagaaaatagcaaygctttgagtgtctattatgttctagaagcttgtatgcactgagtcatttaacctatgtgacaatacgtcaaggtaagaattattatctccaatgtagagacactgtcatctcctgttttagagattggtaaagtgaggttca

SEQ ID NO: 689582 - DNA, 878 bp, Homo sapiens
ggtttgcaaacgtcttagcacacttcttgctattggtgctttctcttgtgtctcttttccatttctgaaaagactaatagttactccacggccatgtagtagatggaagtcattgtattgttataatatttgtttagagaaccagtcatgaaatttttacattttattttattatttaacaacaggaattctcaactttagcactatttacatttaaggccagatgattctttgttatagggggtgttctgtacattgtaggatgccagtagcaccctcccctagaaccctggttttggcaaccaaaaaaacaatttcaggcattgtcaaatgtcccctgggtgcaaaaatcatgcttctctccccacacaattcttcagcattaaactggaatcttgtttaaggggsactaaaataaaagagggtttttctaccctgttgcacagaaatcatggaaaccagttattaagccttcacaggggatttttgctaaatggatttataactactcacattttggcagatcatttactttgacaaaaaatatgtttactccaaagaagcgaattggtgaactagggcaggtaatttaataatttgggtagaacagaagccaactattaaataaatactggtgttttgtgtttgcctttctattttcttgatttatccatattatgttattaaattgaaccagctctacccagaataacataagccatttaagaatctcttaacagttattattaaaacattactgttttcttaatttgtttatattttattataagcacaaatcataatcccattcttcttagacacaatgcttactgttttcaacggtcaatcccttaagatgaaacataaatggcctgcac

SEQ ID NO: 689583 - DNA, 613 bp, Homo sapiens
tgtaatcccagctacttgggaggctgaggcaagggagttgcttgaacctgggaggcggaggttgaagtgagctgagatggcgcccctgcactacagcctggcgacagaaaagactccgtctcaaaaaaacaaaaaaaaccaaaacaacaacaacaacaaaaaccctgcatatggcagagttcctaatctcagcatttctcatcctaatgcttccccatttctcctaagtcttaatatctcatttttaaataatgcacaatactaaaacacaaaagaaatattawaatttttcaataaattgagccttaatagtcctacaaaaagattcttttaaaatgcagaaatttccaaatttttaagcctgcattcatttctttaccttctctgtattaatgaactatgtaattatataaatagacctgaaattttatgcctataacaaccttttgtaattagtcatgtccatgcctctcagaagtgaaaatgtaatctcaaattaaatagcttgcataagatcttacagttcataacaaagaatcacacatgattagaacccagatcttgtgactaggtcaaattctctttggattctaccatgaggataataaaattt

SEQ ID NO: 689584 - DNA, 2021 bp, Homo sapiens
gggtaattagtatttctgtcacctcaaacatgtatcagttccttatggtaagaacatttaaatttctctcttctagcttttttgaaatacacaatatgtaattgtaaattatagtcatcctactgtgcattggaacgcagaaggcttttctcatatctaactgtaacattgtacctgctgtcctacttctcccatcccccttctccttaccctcccctgactcagataacttgtattttactctctacwtctatgagctcaacttttaaaacttccacataggagtgagatcatgtggtatttctatttttgtgcctgacttattccagttaatttagtgttctctagattcatctatgttgtcacaaatggcaagatttcattgattttatgggtgaacattatttcattgtgtataacacattttctttaaccattcatttgctaattggacaacagatatcattgatgacactgatactactggataatatactatatcactaccagtagaatgacttgtagaattgtggataaattgctaattaccccaagaatcacatagtaacagatttctcaaatgaagtattataggaggttcagatgctgaatgaaaaaaaaaaaaaaagacaactacagacaaaaattttaaatatgtaaaatttttctaggtaccttctgtcttgcttccaatgtagactgatttctttgtaggctgcctattcccatccaggaatattttttattatatgtagagatgatgccagctgtttctttgatgttatgttgtacacattaatgggttacttttaatgtttgactgagggacatctccaagtatttatcatattatacatggctgatactggttttctttgtttttctgtaggtcagcttcccccaatatttttctactttggataggaggactacctctcagcatttcctgtaatggcatgtgagtaagaagcagatagacaagctagttttcaccgtagtttccgaaagtaaaaaaatacattaaaactaataaatggaaaaattctgatgggttaatacttccaccaggatccctagttctcccatatatattgttcagtttctttggggagcagttcttcagctttggtctggaagtaaccagtatctctgtcaatgctgggcttgcatatgaagagtgaagactgcctagttgtgcagttgcatagaaagcctttaacagtatgaacattcaattaatcactatcatagtttaatattattgataatatgattaataaaatgatttatgtttcatccaaactctcagaccacgtgatcattgttgctaggctcgtaacctttttagacttcttttttcccactgaagggaattgctgtcttatctactggtatcttgggcctttttgtgaactttgctatgttcattctgtttcatcagttattggaaaattagatagccacatgcagaagaatgaggctggatccatatcacttaccatatacaaaaataaactcaatatggagtaaagaattaaatgtaagatctgaagtcataaaagttctagaagaaaacctagaaaaaattcttctggatgttgcctagccaaagaattgataactaagaccccaaagtcagatgcaacaaaactaaaaataacgggaagtaattaaactaacaagcttctgcacatcaaaagaaatgatcatgagaataaatagacaacctacggaatgggaaaaatatcacaaactatacatctgacaaaaggcaaatatcaacaacgggttcaaacaaatctgcaagaaaaaacaactattcccattaaaaagtgagcaaatgacataaagagacatttatcaaaataagattttgaattggtcaaaaatatatgacaaaatgttcaacatcactaatcttagggaaatacaaaataaaaccataatgagataccacctttccctagtcagaatgactttcactgaaaagtgaaaaaacagtaagtattggcatgggtaca

SEQ ID NO: 689585 - DNA, 785 bp, Homo sapiens
tttattaacatagagaaaaatgttgagaaaaacttctgaggaaaaaagaaataaatgacactagagagttagaagtaaaagtaaaacaaactaactaaaacataattgagctacaagaatccacaagtcataaggctcaaagtaaagaaaggtgggttaaagaacctttagmaattaagagacattttaagtggtcttagtagaaacaaaataaatgatgttatagcaacaaatgactgtttaagtatccttagcaatatcttgaaaacacacaaagagcagattaaaatggcgaaatgaatacaaatgagtaactcccactcttagtctgtagcttcaaaactatatgtgtgtgtgtgtgtatgtgtatgtatgtgtgtgtgtgtgtgtgtgtatatatatatatatatatatatatataataaatctgtaataaacctgaaatacaaataagcaaacaaagtaatatcagcaaactagagggtgagaatgtcagatgagcagggtagctcagccccttttaaacatgtttcttagggactggcaacagaaacccttaggttgaggatgaagcaatggttttagcattgctgccagagacaggctactagcaagagttgggaagagcaatgaggttttaagcccaggattcagagttctagcatctggcagcatctctcactgttctccatgaccctttgagacaggtttcaagaaactagtatggcttcagagaactgagagtggagagcttaaaaaacaagatgactatacaaccaaaattc

SEQ ID NO: 689586 - DNA, 1369 bp, Homo sapiens
tagatcatgtgaaaatgaatatatcaaggaaatgaaaatcctgatgcagtcaaagcgatccagtaaaggagtgaaaaaggtacaaaaacaggaggctatgattaaaaatcagcttcctacacagagttaatacttgacattttcttggactggtaacttgtttgtctcatttattgatgtatctatccctcccaccctaccacattgcatggttacttccacatgatgactgtttaatcgtaatttttgaatatctgatctcatagatggtttggtcctttgtgtaggtgataactagatgagaaattttacgaaaataagaaggcttcacctgagagaattacataagaaacattaatggcagagttggatcaagtcttagaagacacaatatggtgtgtggttatcaggcctctagagtaaatttaaaacaataaatttggctatgtcactacaatacattagctgtaggagactacacaataaacttaatcattgtgagcctccattttctcatttatagaaagggcataacacttctatcgtaatatttttgcaaggacaaaattagataataatgcacatctgcttgtgtctggaatatatgactgttcattatatgtttggtattttttaatgctccccaaattactgtgatagaacctatacccctttttatgcaataacattactttaccaagacattaaagatcccaagtaagtttaagtttcgtaatttgctaactctgaaagtcaaataattgcacctactgaagattcataatgtatcatttaatctttaatcaaggagaaaatttttgtggcaatgaaactgataagcacaactaattgtacattgtacatataaatttcacattgtaaagccataacactgtctatgtcaatctttataccacaagttcacaaaactcttttgaagaaataactgtgtcttttagctctgatgtacctcatcacctatggaacatggtatagtgccattggctttttcaaaattatctcagccattataagcaaagagacagtgtcctgacagttgaaactaccttctgtaagtgctgctgcattgagagaacaagtgctagtctggagaggaaaagtgtaagcataaaactttgatgcctcaattcaaatttttcttttaagcttcccctttaactactcgtaaggcatcctgactttaaaaagcaaaaggatrtaaagcatctactgaagcatatttaagttctattcttccttcagtttggctaatcaaaagtgatgtatatatctcaataatttcatgacaaaaaagcatggacatatattggcaaattcttcataacggctcattcagactgaatcagag

SEQ ID NO: 689587 - DNA, 1161 bp, Homo sapiens
  misc_feature 2, 3, 4, 5, 6, 7, 8, 9, 10, 11, 12, 13, 14, 15, 16, 17, 18,19, 20, 21, 22, 23, 24, 25, 26, 27, 28, 29, 30, 31, 32,33, 34, 35, 36, 37, 38, 39, 40, 41, 42, 43, 44, 45, 46,47, 48, 49, 50, 51, 52, 53, 54, 55, 56, 57, 58, 59, 60,61: n = A,T,C or G
  misc_feature 62, 63, 64, 65, 66, 67, 68, 69, 70, 71, 72, 73, 74, 75, 76,77, 78, 79, 80, 81, 82, 83, 84, 85, 86, 87, 88, 89, 90,91, 92, 93, 94, 95, 96, 97, 98, 99, 100, 101: n = A,T,C or G
tnnnnnnnnnnnnnnnnnnnnnnnnnnnnnnnnnnnnnnnnnnnnnnnnnnnnnnnnnnnnnnnnnnnnnnnnnnnnnnnnnnnnnnnnnnnnnnnnnnnncatatcaatccataaactcctctaattcccaaactagaaagtaccaaggtgcagctgtagctcagcctcactttttcacacatgctaaagagaaacctagaggctaagtgatgtgctcgtgtgcttagtaagtggaagaacgacaactaggtctcagttttctcattatcatccccattgtttttctaagacttcgattttcattatttttcttcagaaaaaacaatagccaacaacaataaaccatacacttttgcctcataagtctattgctgcactctgtatggatataccagcatcttgctactagctgcctgagggtaggtaactaaattcaggcccaggtctcatgtagtttggccaggagtgtgtaaaatgctaatttatgtttacataaagtatttccgatctagtggttttctgaatagcactagaatctgtgtcatgtttacatgttttagactttatgaatgtgttatttgcaaatgtttgagcaattaaataatataattataaaataccttctgtcaggatgctcaaagcactatgtatatatartaattactacattataaaaatgtaataagcaatcacccactaagataaatttagagggaaaaaagtttaggatagtgttacataaatgtagaaaggattaattgtaaattcaaaaaatgactgcaaacatgattaaatgcaaagacaaacacaaatcaagctaagcacatttgtctttggaaaaggaattataaaaatgtttggcaataaaatgaaactgcttataagtcatttcaaaataatggtacaccctgggtgattttattcgttctataactttaaagctgtgacccagtgccttgtatgtgctttcttgtaaagttataacctaattatgaagtgaccagatatgaaagagttgctatgaatctgctgcagcctccaagtgtgacgtctgatgtttaaaactcttctaatgaaaattgcacggaataaccatcaatagaaaaagattagatactatggtgcagtaaagcgaaatagaaattggttttactccctg

SEQ ID NO: 689588 - DNA, 408 bp, Homo sapiens
atggggctaataacatacttacctcatacagttatggtgctggacacagtcagtgcctagattgttcacagtcaatgtctaatgttctataagtgacgtgctgttattgcttatttatttttttaaattatttttcttttgagaaaggttctcactatgtggcccaggctggagtgcagtggtgctatcttagctaactgcagccttgacctcctggactcaagtgatcctcccaacctcagcctaccgagtagctggaactacaggcgcacaccaccaggcctggctaagtttttaaaatatatcttttgtggagatgcraactccctgtgttgcccagggtggtctcgaactcctgagctcaagcctgcccacctcagcctcctaaagtgctgggattacaggtgc

SEQ ID NO: 689589 - DNA, 655 bp, Homo sapiens
tccactgagattttttgttttggtagaagtgacaaaggaattcatttgtgtcttagtccatatagctaacaaatgattccagcttacctgtatgaagtagtctgttttttacttgtggtagaattgctagaaagttaaaaaaacataagcttcagggaccatcacttgaatagactccttccatggccctgaaaaataaatttagcaatgtggtcataagtttagcaatgtgatcacagagtcatatatgtctgtcaatttttgcaaaatacttttgtattctttttcttaaagagagcacctgcgctaaattttatacgcttcgggcttcacataacttgaatgcttctggtgctcattgattaaaaaaaaaatttttttttgtggtaagccgaatagcagtctcccaaagtcatttcaatcctcagaatgtgtaaatatgttgggttacatggcaaatggtaattaatattgcagatggaattaagaatgctaatcacttgacattaagatatggrgattagcccaaattatccagaaaaacccagtgaaatcacaaagatccttaaaggtggaagaggtaggcagaagaagagagtcagaggaagaagaatggtcagagagaagcaatgttgctggctctgaagatggagga

SEQ ID NO: 689590 - DNA, 1560 bp, Homo sapiens
tatttcagtttaccagaaaaaaacaatattaatttactactcatggctaaatttttatgttggtgtcctccttttttttaaattatatgaagcttgctttctaatagatatttctctttttaagttatctctttagtatttgcttggctaaatgtcatcttactgaaaaccaaaaactaaattcaaattttcacaaaaatagctaaccccagtaatgatttctgtatctgatgttatatagatttttattgaggggaatttcactagaatggaaagttttttctctacaccccagagtgtgatatcattactcatttgtatccactcttaattttctttctaagttggagcttgtcttttacttgtgaacacttttatcacttccacttgccctcactcactcttttctccctttgcctctttttagcacttctcttcagggtttagctaagtgccacatgtgtttgcaaaaatctaaatcttgggaacacctggatatttctgcctatgyaggtgattgccttttttgttgattgcttctggtgtgcttttttggttctcactctccatcaaagattagtttttcaagttatgagttcttggaggaagatgctacgtgaaacataactttaccatctttagctgcaatcttaattccacttgatcacacaaatcttgctttcctatttgtattgactatatctcctctatggtttaacttatgcatgtaaggaatagcagttctgccattgcctgtacagagatgaaagtgttcttgatctaaatgagtgttttcaagtcagatgactttttatatttattttctaaagaaataatacaatatttatcatttaatagtttaaaagtatattaatatatccctaccattacttgagaaaatgacatatggagataattgtatcccaatatgaaaataaagaggtatggatattttttagacataaaatatgggtaggacataagtggccacaaatactaaagtgtttctttttctacttacattacagtgtgaaaaagttagtctagcactagatgagtaagagtcaaataagacaatgattaggaagacagtgtctgggaagccaacattcaaagagctactaaactataaattaagtcaaatttcccaatgctttaatagtaaattgatactctatcaaataatcatatcttattaataaagcagcatcattacaactgaaaaaattatgcaagagtaaaatgaatcatttgtgactttctgagaaaaatatattttggttatctttagaagaaaacaattgatctgcagtcgaattaccttagcaaaataaatttaaaattagatttggagtcagctaacaattgcgatttgcatttcaaaataatttgttaggaattcaaagtatattatttcatataagttgaaatacaaattgagacatctgccaaattttacctcaaagatggagtaattcattgaatcatttatgatttgaaatactgttttttaccttttctcaggttaacaaaaatcatgagaactgctttattgaacac

SEQ ID NO: 689591 - DNA, 1560 bp, Homo sapiens
tatttcagtttaccagaaaaaaacaatattaatttactactcatggctaaatttttatgttggtgtcctccttttttttaaattatatgaagcttgctttctaatagatatttctctttttaagttatctctttagtatttgcttggctaaatgtcatcttactgaaaaccaaaaactaaattcaaattttcacaaaaatagctaaccccagtaatgatttctgtatctgatgttatatagatttttattgaggggaatttcactagaatggaaagttttttctctacaccccagagtgtgatatcattactcatttgtatccactcttaattttctttctaagttggagcttgtcttttacttgtgaacacttttatcacttccacttgccctcactcactcttttctccctttgcctctttttagcacttctcttcagggtttagctaagtgccacatgtgtttgcaaaaatctaaatcttgggaacacctggatatttctgcctatgcaggtgattgccttttttgttgattgcttctggtgtgctttyttggttctcactctccatcaaagattagtttttcaagttatgagttcttggaggaagatgctacgtgaaacataactttaccatctttagctgcaatcttaattccacttgatcacacaaatcttgctttcctatttgtattgactatatctcctctatggtttaacttatgcatgtaaggaatagcagttctgccattgcctgtacagagatgaaagtgttcttgatctaaatgagtgttttcaagtcagatgactttttatatttattttctaaagaaataatacaatatttatcatttaatagtttaaaagtatattaatatatccctaccattacttgagaaaatgacatatggagataattgtatcccaatatgaaaataaagaggtatggatattttttagacataaaatatgggtaggacataagtggccacaaatactaaagtgtttctttttctacttacattacagtgtgaaaaagttagtctagcactagatgagtaagagtcaaataagacaatgattaggaagacagtgtctgggaagccaacattcaaagagctactaaactataaattaagtcaaatttcccaatgctttaatagtaaattgatactctatcaaataatcatatcttattaataaagcagcatcattacaactgaaaaaattatgcaagagtaaaatgaatcatttgtgactttctgagaaaaatatattttggttatctttagaagaaaacaattgatctgcagtcgaattaccttagcaaaataaatttaaaattagatttggagtcagctaacaattgcgatttgcatttcaaaataatttgttaggaattcaaagtatattatttcatataagttgaaatacaaattgagacatctgccaaattttacctcaaagatggagtaattcattgaatcatttatgatttgaaatactgttttttaccttttctcaggttaacaaaaatcatgagaactgctttattgaacac

SEQ ID NO: 689592 - DNA, 1560 bp, Homo sapiens
tatttcagtttaccagaaaaaaacaatattaatttactactcatggctaaatttttatgttggtgtcctccttttttttaaattatatgaagcttgctttctaatagatatttctctttttaagttatctctttagtatttgcttggctaaatgtcatcttactgaaaaccaaaaactaaattcaaattttcacaaaaatagctaaccccagtaatgatttctgtatctgatgttatatagatttttattgaggggaatttcactagaatggaaagttttttctctacaccccagagtgtgatatcattactcatttgtatccactcttaattttctttctaagttggagcttgtcttttacttgtgaacacttttatcacttccacttgccctcactcactcttttctccctttgcctctttttagcacttctcttcagggtttagctaagtgccacatgtgtttgcaaaaatctaaatcttgggaacacctggatatttctgcctatgcaggtgattgccttttttgttgattgcttctggtgtgcttttttggttctcactctccatcaaagattagtttttcaagttatgagttcttggaggaagatgctacgtgaaacataactttaccatctttagctgcaatcttaattccacttgatcacacaaatcttgctttcctatttgtattgactatatctcctctatggtttaacttatgcatgtaaggaatagcagttctgccattgcctgtacagagatgaaagtgttcttgatctaaatgagtgttttcaagtcagatgactttttatatttattttctaaagaaataatacaatatttatcatttaatagtttaaaagtatattaatatatccctaccattacttgagaaaatgacatatggagataattgtatcccaatatgaaaataaagaggtatggatattttttagacataaaatatgggtaggacataagtggccacaaatactaaagtgtttctttttctacttacattacagtgtgaaaaagttagtctagcactagatgagtaagagtcaaataagacaatgattaggaagacagtgtctgggaagccaacattcaaagagctactaaactataaattaagtcaaatttcccaatgctttaatagtaaattgatactctatcaaataatcatatcttattaataaagcagcatcattacaactgaaaaaattatgcaagagtaaaatgaatcatttgtgactttctgagaaaaayatattttggttatctttagaagaaaacaattgatctgcagtcgaattaccttagcaaaataaatttaaaattagatttggagtcagctaacaattgcgatttgcatttcaaaataatttgttaggaattcaaagtatattatttcatataagttgaaatacaaattgagacatctgccaaattttacctcaaagatggagtaattcattgaatcatttatgatttgaaatactgttttttaccttttctcaggttaacaaaaatcatgagaactgctttattgaacac

SEQ ID NO: 689593 - DNA, 586 bp, Homo sapiens
gtgacatttcttagctgttcctaaaacacgtgaagcttcacatggttgggcttggtaagaccatccaagaggctggggctgccaatataatttgtaattttgattattttttttagaagcygaacaaactgaaaggaacattcaccccactgcaatgatgtttaccagcactattaacttactgcagactctttgtctgtctgctggagttcatgctgagatcatgcagagtgaagccaccaagactttatgcggactgctgcaaatgttagtggaaagcggaatgacggacaagacatgtatggaatgagagatcgagggcccagggagtcagcgctgggggccgcacgcttgtcgtgtctgggtgtgcatgtgggtgggtgtggatgtgtgtggattcctttcctgtggctgctgtaacaaagtatacaaacttggggacttacacagtagaaattctcacggttctggtggctggaaggctgagatcaagggtagttccttctggggctgtgagggagaagctgcttcagggctctgccccagcttctggagtttactggtctctttagcgttcctcggcttg

SEQ ID NO: 689594 - DNA, 713 bp, Homo sapiens
ggtaggcccatcgtgcagcatgacagagctgcccactctgtggaaaccactgaaaaatagtcagatgtttagagtaatcrcccgtgccttctgcattacgtttatgcttgtatccatgcgagagaaatgtcagtgggtgtcaaaatagtcagatgattagagtaattgcccatgctttctgcgttacgtttattcttgtatccacgcacaagaaatgtcagtgggtgtcagtgcttattagtcagatgtttagagtaattgcccgtgctttctgcattacatttattcttgtatccattacaagaaatgtcagtgggtgccaatgctcactaggtatccagccggttcccctgcaaaccatcaccaatgagaacccatcgggaccgagcttggggaccatcccgcaagcccacttcctcctggtgatgctcagcatgctcaccctgcagcacagcgcaaacaaccttgacctcctgctcaattccggcacgctggccctcgctcagacggcactgcgcctgattggtaggtctgcactggcttgagagcctttgggaaaacgtcaagattttgctttgatttattttctttcttttttttaaaaaaagctttttgtaaattatggtaagacacaaatagcagaaagtgtagcattttaacgtcgcaattcagcggtattaaatacattcacaattttctagagtcatcaccac

SEQ ID NO: 689595 - DNA, 1687 bp, Homo sapiens
ggttggcttttcactctgatgataatttcttttgctgtgcagaagccctttagtttaattagatcccgtttgttaattttggcttttgttgcgattgcttttggcattttcatatgaagtctttgtccgtgcctatgtcctgaatggtattcatttgttttatttttttactatattgtattatgtgctctggctataatccagcaactcagaatttcaattttctgaatataggcttaaaatatcttactttttatgtttatatgccttttgttaaaattcataaaaccttaaaatatcaacaataaaaaagaaaaatgcactttacaaacacaatttaaaaaactggataaattgtcttgtattttagtttttctgggcccctgattaaaacaatacaatttgggatttttttccgcaagtattagggaacaattaaccctaatgtaaagcagtcactatgaatgtacatgggaaaaaatgattcaatatttatcctagataaatacaatgttctacttggtatataagacatatttttaatgttatttgatgcaaacgtttgttatggtagtgatcataggtttaagttattttcttttaaatatgtaaaactgagacctttgtcctttaagatgttagtgctaaattaaaaaaaaatygtacttgaatggctaaggaaggaatgttttcagtgaaatctggattcttctcagactaaaatatttcacagagaatagagctgctagtgaaagtctaatgtgaacacatgacatttaatttctatcaaagttttaatagtctaagtaaaatgtggctatgagtaaaataataaaatacaagtggaatggcatgacaatagtgccctactgggactcaggcagcagcagtggaaggggatgtttcaagagcatctgtctctttggcagaattcaaaggcagctgctctggttactttcgtaatgctcatgagatttccatttgattatagaagcaatgtctgctctctgttgcaggcctggagtcatctgcatttgccttacctgtgatgctgagttatttgtttaattgcttttgatgagaaaaaataaatgcttcttgagaaaaagctttgaaaaggtttagcaagctattataatttaaatccagctttgcctgcgtatatcctttttcaaatctcattcttatttgtattcccagtatgatggatgacaacagttgcaagcttatagtatcactgttcttatcatgccacggtctcttgtaaatgttgttctgtttttttgaggtgacctattatatctctctttgctgcccaattattttcatataagggactgataaggtaagaacgtacctgctatttttctttccatgagtatttgttcctttttacagatacttgaaaacttgggactttcttatcctaccaatatgaaataattgccagtatgcttacctctgaaagtgagattgtaagaatctgtttacatgcaccttaaatatttgtacaagtcaactgtacacaaattacggagcctgtaaacctggctgggattgttattttgtcattttttagctgatgtcttgggcaatatacttatcatttccaagtctcactttctccctctgtaaaatattgagataagataacacatattttgagaaggtataatgcacagataca

SEQ ID NO: 689596 - DNA, 1196 bp, Homo sapiens
tgagcagataagtcagaattttactttctactattacttctaatttcataaagaaaattgcagctgttttggaaaacccattttactttcccatttccagatctctattccctgtcagatttacattcattctttcctccttcctagttttcttcttatagagtaactgccctccctctgcatccaaggccaatctctcctgctgtgcccaggacctcccccactctccactttggaactttatgccatgtcttgkctcttttatcttctgtcttcaacgttttcctctccattaggtcatttcaatagcattccattagtcttacacacacacacacacacacacacacgccccaactccagtgatctcacatccatctccagctgacccccaatctcttaccatcacaaccaaacccctcaaaagtaaatttaaaacttttttaaaggtgaacttctgtcctctgtttccatttccttattatctttcattcttcaaccctgtccatctggccccaccaccacaccactatgtttatttcaagatattaaagagatttcaagaaattggcttatattgattgtgggagtttgcaggtctgaaatctgtaggacagggtggcaggcccaaaactcctaggcaggagctgatgctataattcataagcaaaatttcttcttcctcagagacacctcaattttgctcataaggcctttcaatggattggattcaatctaggccacccagattattgaagacaataatatctttattattatctttattatatacttaaggtcaactgacagatgttaactgcacctacaaaataacttcacagcaacatccagattagtgtttaatggaataattgggtactatagcctagccatattggcatataaaactaatcatcacactcactcccactaagagggtgggataggcattcacagtacactggtaactccacatgaactgctaacagtctttcatatagccttgaggtagtggaagaagttgggctgggatgcagtcacaacaaaggcctagaaaccccatggggttctaaagttgagatggcttctgtgatggctaattttatatatcaacttgactgctccatggggtgcccatattaattaaacactgtttcggggtgtgcgtgtgaaggtatttctggatgagattagca

SEQ ID NO: 689597 - DNA, 2205 bp, Homo sapiens
aggtattcctttatgtgggtttcgtatagtaaccattattcagagaaattagaacctaaaatgtatacattccagctttggatattagaggtgttttctcctccatcaactacaaactcagtaatcaaagtaccgtattttgtcgaacctaagactgtaatatgtgctattattttatgtactctctaaaataggctgggtgtggtggcttacccctgtcatctcagcactttgggaagctgaggcgggcagatcatttgagcccaggagttggagaccagcctgggcaacatgctgaaaccctgtcgctacaaaaaatagacaaagtaactggcatggtggcacacatctgtagtcccagctactcgggaggcttgaacccaggaagcagaggttgcagtgagcttgagactataccactgcactccggcctgggtgacagagagagactgagtctcaaaaacaaaaagaaaagaaaagaaaagaaaaatattgtcaattaaattatatgatcaattgtaagacccttggcaattcaagagaagttaacatgtggaggaaaatgtgtaaaataacaaaatatggcagtattcatatcatctggcctgaatttgaaaacccatacatttatagagaaatgacttctgaggagtcagggacactcccagagaccacctgctgtgaaattgactaagaagcttatcaaatccatatatatccctaaggcccactttgggtccaatgaattggaatctttggcagcagacccagaaatctgtaaaataccctcaaaaagcactgttcgagtaacatacatagtgttatgaatcagaatgatcagcaagcccaataatgatcccccagccacaggctagaaatgctctgaccacaaatcttcagtcctgaggtgcacagggggtaattagcccaatggctgtagcatcaaaacccagaatgggaataaggagcctcttaatttgttcatccaaacaaacgtgcactgaggaactactgtgtgccacaccatgctatatacagatgggtgcctcaaggatatgatgaaaaattgacaaatctatactccgagtaaactaccaagtaagccacccactaggagatgtgttctggctcttgggacttgatttacaatctggtatccaaggttccaatttaaaacatgcttatcttcatagccagagggcatgacagcatttacgtttttaaaaaattagctgtagagcagagaatgggaggagggcacttggcttgagatgtttacttgaaaaaagacctagggctggggctggggcagatggtgggggtgggggcatgggcagaagactttaattacagaacaagttcaactagtagaaacaggttcggggactcctggcaaatatgtgtctcatctggtgggagtggaaactggctggcgtatgctagaagcagcatattagctgaaagtgttctgtgtgctgtgggtattagacacgcttcacaaaggggctagttggtgtgggttaactgaatgctttggttaagtgggagctgaattaagacagtttctgctttacttgattttttttccatctcagagccaaaaccaagctcagcaaacatagttcgcatgkgcccacaattctgattaaaccaaaagccttggcaatagaggactgaacagaagcacttagtcactagttccccagattttatcattgcactatcatttgattcttcaactctagcattaataagtacaaccaactgatagctgtgcctagctaattcctctcattcaaggttgtctgtgacccccaggcaagggtaatccttgttttgtgccctcaaggtgccaagtacctcttcttccccagtagtcagcctgctcatattgactgattttatgtctgtctccactgcctggctgcaagctacaaggggacagggaccatatctatcttgctcatcacagtagccccagctcctcctattacgctggcacatagcagactctcagctcatatttgttgaaatgaaaattaaattgaaatggggctaatcaaagaacacgtcacggaggaagcaaatccagagaagatttttgcaaggaggaatacaccatatttaaaacttctgagatgggaccaaaaaataatatgcagaatactatagtgggctgtttgaaattttgaaaggtaattcaaa

SEQ ID NO: 689598 - DNA, 1512 bp, Homo sapiens
gaacattttgattgggcctagattctgaggtattatactgccaagagaatccaatctgtgagggttgctataagcactcagaatggtgaagtaccctaatgacagaagtgctctgaagtcctattaggtttcaaggcctctcagtgtaggtagcagttttgaattcctttgagcattttctttctcttagtactacactctcaattaatcttgttaacaatcactatcatttttagtcgtgctctctgtaattctgaggggagagtgccctacctgaggctggagtagggtctttactgraaaacaactctgtcgcaaaatagccatctgagaagttgtaggacagaagttattgacagaagagcaaagacttgggcaacaagacaggctaaagtagacttgctccagaatgtacctgaaatactacattggagaatactcaatattagatgggggtgtggtaaagcaaagggaaaattctccacaattaatgatgtaaaaccataataaagaaaattttgcaatatttgtaatctcaggtcagtaatttggtagactgggaatacatagttgatggatatacctaaagtatcaaatatgtacctatgggcatgtgcaaagtaccccctctacaatgtcagtcattatcagagggcatgcatttttagggccacctcagactccaggattcccttcccccgatgttgtttggcatcatgttgacattattttgaatgttagcctgcttttcattttcaataagattaacattaaaatattaccaagaaattctctttcttctttccctctctagtcttacctaccactccttcctccagatggcttgtaaagttcccaattcttttcctctcttgtgaaacagagcttcttcctattctgatgtgtgccaccacatgacaccaaagatcttgggattctattttcttctccttatactgatggaattactttcaaaatacacatacatatgtgagttggcaataaaccaatttttatagtggatatatctaaatgttaacatggtagattatttttatttttttccttgtgcttatttttgatttccaaattttccacaatggaattatattatattccattgcaaaaatgaattaagaaaatgcattactgataaactatttatggaataaaatgagctcacataagtatgaaaaaaatgtgcccaagttaattgattggtaaattaccatttctcctcattcatttaccctgtgctgtctctttcttctctgaagtgatatgaatcctggataaatctgatatatgtatatttatgtgagagtagcaatttacatttcacatgaaattatgcttccaattactaaatcaaggaatcatcaaaaacatcttcatcaccataaaaaggaaggtagtaataaaagtaatacactttttgatattactttaggcaaattaaaacttcaatgaggcacaaaaggttatgctgggaagtcacatacaacaaaagcc

SEQ ID NO: 689599 - DNA, 1512 bp, Homo sapiens
gaacattttgattgggcctagattctgaggtattatactgccaagagaatccaatctgtgagggttgctataagcactcagaatggtgaagtaccctaatgacagaagtgctctgaagtcctattaggtttcaaggcctctcagtgtaggtagcagttttgaattcctttgagcattttctttctcttagtactacactctcaattaatcttgttaacaatcactatcatttttagtcgtgctctctgtaattctgaggggagagtgccctacctgaggctggagtagggtctttactgaaaaacaactctgtcgcaaaatagccatctgagaagttgtaggacagaagttattgacagaagagcaaagacttgggcaacaagacaggctaaagtagacttgctccagaatgtacctgaaatactacattggagaatactcaatattagatgggggtgtggtaaagcaaagggaaaattctccacaattaatgatgtaaaaccataataaagaaaattttgcaatatttrtaatctcaggtcagtaatttggtagactgggaatacatagttgatggatatacctaaagtatcaaatatgtacctatgggcatgtgcaaagtaccccctctacaatgtcagtcattatcagagggcatgcatttttagggccacctcagactccaggattcccttcccccgatgttgtttggcatcatgttgacattattttgaatgttagcctgcttttcattttcaataagattaacattaaaatattaccaagaaattctctttcttctttccctctctagtcttacctaccactccttcctccagatggcttgtaaagttcccaattcttttcctctcttgtgaaacagagcttcttcctattctgatgtgtgccaccacatgacaccaaagatcttgggattctattttcttctccttatactgatggaattactttcaaaatacacatacatatgtgagttggcaataaaccaatttttatagtggatatatctaaatgttaacatggtagattatttttatttttttccttgtgcttatttttgatttccaaattttccacaatggaattatattatattccattgcaaaaatgaattaagaaaatgcattactgataaactatttatggaataaaatgagctcacataagtatgaaaaaaatgtgcccaagttaattgattggtaaattaccatttctcctcattcatttaccctgtgctgtctctttcttctctgaagtgatatgaatcctggataaatctgatatatgtatatttatgtgagagtagcaatttacatttcacatgaaattatgcttccaattactaaatcaaggaatcatcaaaaacatcttcatcaccataaaaaggaaggtagtaataaaagtaatacactttttgatattactttaggcaaattaaaacttcaatgaggcacaaaaggttatgctgggaagtcacatacaacaaaagcc

SEQ ID NO: 689600 - DNA, 1512 bp, Homo sapiens
gaacattttgattgggcctagattctgaggtattatactgccaagagaatccaatctgtgagggttgctataagcactcagaatggtgaagtaccctaatgacagaagtgctctgaagtcctattaggtttcaaggcctctcagtgtaggtagcagttttgaattcctttgagcattttctttctcttagtactacactctcaattaatcttgttaacaatcactatcatttttagtcgtgctctctgtaattctgaggggagagtgccctacctgaggctggagtagggtctttactgaaaaacaactctgtcgcaaaatagccatctgagaagttgtaggacagaagttattgacagaagagcaaagacttgggcaacaagacaggctaaagtagacttgctccagaatgtacctgaaatactacattggagaatactcaatattagatgggggtgtggtaaagcaaagggaaaattctccacaattaatgatgtaaaaccataataaagaaaattttgcaatatttgtaatctcaggtcagtaatttggtagactgggaatacatagttgatggatatacctaaagtatcaaatatgtacctatgggcatgtgcaaagtaccccctctacaatgtcagtcattatcagagggcatgcatttttagggccacctcagactccaggattcccttcccccgatgttgtttggcatcatgttgacattattttgaatgttagcctgcttttcattttcaataagattaacattaaaatattaccaagaaattctctttcttctttccctctctagtcttacctaccactccttcctccagatggcttgtaaagttcccaattcttttcctctcttgtgaaacagagcttcttcctattctgatgtgtgccaccmcatgacaccaaagatcttgggattctattttcttctccttatactgatggaattactttcaaaatacacatacatatgtgagttggcaataaaccaatttttatagtggatatatctaaatgttaacatggtagattatttttatttttttccttgtgcttatttttgatttccaaattttccacaatggaattatattatattccattgcaaaaatgaattaagaaaatgcattactgataaactatttatggaataaaatgagctcacataagtatgaaaaaaatgtgcccaagttaattgattggtaaattaccatttctcctcattcatttaccctgtgctgtctctttcttctctgaagtgatatgaatcctggataaatctgatatatgtatatttatgtgagagtagcaatttacatttcacatgaaattatgcttccaattactaaatcaaggaatcatcaaaaacatcttcatcaccataaaaaggaaggtagtaataaaagtaatacactttttgatattactttaggcaaattaaaacttcaatgaggcacaaaaggttatgctgggaagtcacatacaacaaaagcc

SEQ ID NO: 689601 - DNA, 1512 bp, Homo sapiens
gaacattttgattgggcctagattctgaggtattatactgccaagagaatccaatctgtgagggttgctataagcactcagaatggtgaagtaccctaatgacagaagtgctctgaagtcctattaggtttcaaggcctctcagtgtaggtagcagttttgaattcctttgagcattttctttctcttagtactacactctcaattaatcttgttaacaatcactatcatttttagtcgtgctctctgtaattctgaggggagagtgccctacctgaggctggagtagggtctttactgaaaaacaactctgtcgcaaaatagccatctgagaagttgtaggacagaagttattgacagaagagcaaagacttgggcaacaagacaggctaaagtagacttgctccagaatgtacctgaaatactacattggagaatactcaatattagatgggggtgtggtaaagcaaagggaaaattctccacaattaatgatgtaaaaccataataaagaaaattttgcaatatttgtaatctcaggtcagtaatttggtagactgggaatacatagttgatggatatacctaaagtatcaaatatgtacctatgggcatgtgcaaagtaccccctctacaatgtcagtcattatcagagggcatgcatttttagggccacctcagactccaggattcccttcccccgatgttgtttggcatcatgttgacattattttgaatgttagcctgcttttcattttcaataagattaacattaaaatattaccaagaaattctctttcttctttccctctctagtcttacctaccactccttcctccagatggcttgtaaagttcccaattcttttcctctcttgtgaaacagagcttcttcctattctgatgtgtgccaccacatgacaccaaagatcttgggattctattttcttctccttatactgatggaattactttcaaaatacacatacatatgtgagttggcaataaaccaatttttatagtggatatatctaaatgttaacwtggtagattatttttatttttttccttgtgcttatttttgatttccaaattttccacaatggaattatattatattccattgcaaaaatgaattaagaaaatgcattactgataaactatttatggaataaaatgagctcacataagtatgaaaaaaatgtgcccaagttaattgattggtaaattaccatttctcctcattcatttaccctgtgctgtctctttcttctctgaagtgatatgaatcctggataaatctgatatatgtatatttatgtgagagtagcaatttacatttcacatgaaattatgcttccaattactaaatcaaggaatcatcaaaaacatcttcatcaccataaaaaggaaggtagtaataaaagtaatacactttttgatattactttaggcaaattaaaacttcaatgaggcacaaaaggttatgctgggaagtcacatacaacaaaagcc

SEQ ID NO: 689602 - DNA, 1512 bp, Homo sapiens
gaacattttgattgggcctagattctgaggtattatactgccaagagaatccaatctgtgagggttgctataagcactcagaatggtgaagtaccctaatgacagaagtgctctgaagtcctattaggtttcaaggcctctcagtgtaggtagcagttttgaattcctttgagcattttctttctcttagtactacactctcaattaatcttgttaacaatcactatcatttttagtcgtgctctctgtaattctgaggggagagtgccctacctgaggctggagtagggtctttactgaaaaacaactctgtcgcaaaatagccatctgagaagttgtaggacagaagttattgacagaagagcaaagacttgggcaacaagacaggctaaagtagacttgctccagaatgtacctgaaatactacattggagaatactcaatattagatgggggtgtggtaaagcaaagggaaaattctccacaattaatgatgtaaaaccataataaagaaaattttgcaatatttgtaatctcaggtcagtaatttggtagactgggaatacatagttgatggatatacctaaagtatcaaatatgtacctatgggcatgtgcaaagtaccccctctacaatgtcagtcattatcagagggcatgcatttttagggccacctcagactccaggattcccttcccccgatgttgtttggcatcatgttgacattattttgaatgttagcctgcttttcattttcaataagattaacattaaaatattaccaagaaattctctttcttctttccctctctagtcttacctaccactccttcctccagatggcttgtaaagttcccaattcttttcctctcttgtgaaacagagcttcttcctattctgatgtgtgccaccacatgacaccaaagatcttgggattctattttcttctccttatactgatggaattactttcaaaatacacatacatatgtgagttggcaataaaccaatttttatagtggatatatctaaatgttaacatggtagattatttttatttttttccttgtgcttatttttgatttccaaattttccacaatggaattatattatattccattgcaaaaatgaattaagaaaatgcattactgataaactatttatggaataaaatgagctcacataagtatgaaaaaaatgtgcccaagttaattgattggtaaattaccatttctcctcattcrtttaccctgtgctgtctctttcttctctgaagtgatatgaatcctggataaatctgatatatgtatatttatgtgagagtagcaatttacatttcacatgaaattatgcttccaattactaaatcaaggaatcatcaaaaacatcttcatcaccataaaaaggaaggtagtaataaaagtaatacactttttgatattactttaggcaaattaaaacttcaatgaggcacaaaaggttatgctgggaagtcacatacaacaaaagcc

SEQ ID NO: 689603 - DNA, 1376 bp, Homo sapiens
aaaatagggactctaaagtatttacttttctttttttgtttgttgaaagacatataagtggaagaggtttatatgttttaccataaaatgaagatgaatacattttcaaatatggcattttaacaagaagtgttttaagctccattgatcttatatgattccctttatttagactttaacttttgaaaacaaaatcctcactaagatgttggagtagtactactaatatgggtaacatttggttgtgtaaatatgaagtattggttgacatttcagttagctattatgtaaaaaacaacagaaaatattactggcactcagcaataattatttatttagctcrtgtgtgtctctgggtcacctccagaacagcaaatctagctttggcccagctggcatggctctgttgggataccttgacttcacatgtcactcagcctctagttggtctagcaggcagcataggtatgttgtacccatgatgatagcaacagagtaagtgcaagaccaggtgcacagtgttgtatctactaatataccaacatatctttagctttgatcatttcggcaatttgattcaaagcttgcttcttcagcgaattatttgttatgttctatagattttcatttgtgtaatgtttattatttttcttaccttgaatatttattactgttctatggccttatgtaagttattttatattttgttaatgtctgatgccatttaaattttatgaagtattaaacaagattcttttttttttacagagttttgctcttgtcacccaggctagagtgcagtggcgcgatcttggctcactacaacttctgcctcctgggttcaagcgattctcctgcctcagcctccctagtagctgggactgcaggcactcgccaccatgcccggctaattttgtattttcagtagagatgggatttcactgtgttggccaggctggtctcaaattcctgaccttaggtgatctgcccacctcggcctcccaaagtgctgggattacaggcatgagccactgtgctgggcctaaaccagattctttaaaaagaaccagtaatctttagtttagaaactgatcatttcccatttgattaaaacaactttactttagaatatgaaagcttagtcaagggagaacacactcaattcaacgtgaacaaacattagcccgggatttcatgaggcattacaagaaaaataaaattatcgaatttctcagttgttcattttaatgttcatcaatcccagtgaaaggagctatattcttatgtctaagttacatatctcatgtcacaataactgaaatagtaattaataattattgaataatatccaacattccaaatgctatgttaagcaa

SEQ ID NO: 689604 - DNA, 1376 bp, Homo sapiens
aaaatagggactctaaagtatttacttttctttttttgtttgttgaaagacatataagtggaagaggtttatatgttttaccataaaatgaagatgaatacattttcaaatatggcattttaacaagaagtgttttaagctccattgatcttatatgattccctttatttagactttaacttttgaaaacaaaatcctcactaagatgttggagtagtactactaatatgggtaacatttggttgtgtaaatatgaagtattggttgacatttcagttagctattatgtaaaaaacaacagaaaatattactggcactcagcaataattatttatttagctcgtgtgtgtctctgggtcaccyccagaacagcaaatctagctttggcccagctggcatggctctgttgggataccttgacttcacatgtcactcagcctctagttggtctagcaggcagcataggtatgttgtacccatgatgatagcaacagagtaagtgcaagaccaggtgcacagtgttgtatctactaatataccaacatatctttagctttgatcatttcggcaatttgattcaaagcttgcttcttcagcgaattatttgttatgttctatagattttcatttgtgtaatgtttattatttttcttaccttgaatatttattactgttctatggccttatgtaagttattttatattttgttaatgtctgatgccatttaaattttatgaagtattaaacaagattcttttttttttacagagttttgctcttgtcacccaggctagagtgcagtggcgcgatcttggctcactacaacttctgcctcctgggttcaagcgattctcctgcctcagcctccctagtagctgggactgcaggcactcgccaccatgcccggctaattttgtattttcagtagagatgggatttcactgtgttggccaggctggtctcaaattcctgaccttaggtgatctgcccacctcggcctcccaaagtgctgggattacaggcatgagccactgtgctgggcctaaaccagattctttaaaaagaaccagtaatctttagtttagaaactgatcatttcccatttgattaaaacaactttactttagaatatgaaagcttagtcaagggagaacacactcaattcaacgtgaacaaacattagcccgggatttcatgaggcattacaagaaaaataaaattatcgaatttctcagttgttcattttaatgttcatcaatcccagtgaaaggagctatattcttatgtctaagttacatatctcatgtcacaataactgaaatagtaattaataattattgaataatatccaacattccaaatgctatgttaagcaa

SEQ ID NO: 689605 - DNA, 1376 bp, Homo sapiens
aaaatagggactctaaagtatttacttttctttttttgtttgttgaaagacatataagtggaagaggtttatatgttttaccataaaatgaagatgaatacattttcaaatatggcattttaacaagaagtgttttaagctccattgatcttatatgattccctttatttagactttaacttttgaaaacaaaatcctcactaagatgttggagtagtactactaatatgggtaacatttggttgtgtaaatatgaagtattggttgacatttcagttagctattatgtaaaaaacaacagaaaatattactggcactcagcaataattatttatttagctcgtgtgtgtctctgggtcacctccagaacagcaaatctagctttggcccagctggcatggctctgttgggataccttgacttcacatgtcactcagcctctagttggtctagcaggcagcataggtatgttgtacccatgatgatagcaacagagtaagtgcaagaccaggtgcacagtgttgtatctactaatataccaacatatctttagctttgatcatttcggcaatttgattcaaagcttgcttcttcagcgaattatttgttatgttctatwgattttcatttgtgtaatgtttattatttttcttaccttgaatatttattactgttctatggccttatgtaagttattttatattttgttaatgtctgatgccatttaaattttatgaagtattaaacaagattcttttttttttacagagttttgctcttgtcacccaggctagagtgcagtggcgcgatcttggctcactacaacttctgcctcctgggttcaagcgattctcctgcctcagcctccctagtagctgggactgcaggcactcgccaccatgcccggctaattttgtattttcagtagagatgggatttcactgtgttggccaggctggtctcaaattcctgaccttaggtgatctgcccacctcggcctcccaaagtgctgggattacaggcatgagccactgtgctgggcctaaaccagattctttaaaaagaaccagtaatctttagtttagaaactgatcatttcccatttgattaaaacaactttactttagaatatgaaagcttagtcaagggagaacacactcaattcaacgtgaacaaacattagcccgggatttcatgaggcattacaagaaaaataaaattatcgaatttctcagttgttcattttaatgttcatcaatcccagtgaaaggagctatattcttatgtctaagttacatatctcatgtcacaataactgaaatagtaattaataattattgaataatatccaacattccaaatgctatgttaagcaa

SEQ ID NO: 689606 - DNA, 619 bp, Homo sapiens
tggaaaccctggcattcatcagctgttttcccacccgggctgcacttgacttctcccaccccattcaccagcaactcctccacaactctttccagggatgagaaaaaggaggagagaaagcctcgcatgtatctcctagaaacggatgacacaaacaaaggaacctagaggttgtgagtggaaaggccgcctgggcagtttccatggcaacgcctccatgcctgccgtagcagctacgtgctgcctggcatgtgcactctgccaggtccctggagggcactgctgtctctcacttgctcagggttcaggagttgttaatcccggattcagataataatatccaaaggcaatcaggggacattgaaccagctggagctgaaggctcctctctgtgggccwtggaaggaggggcctctgcattcctccgcctgccataggctgggcctgcagcaagtgctcaactacagtgggaagaatggctgagtgaaggagagaccctcccagactacagtaagttcctctgctgatagaggtgagagaaaagcagagcctggagtggaggaagggtaggccttcccccaaattatagaggacacacattgatcatcagattgctttt

SEQ ID NO: 689607 - DNA, 1249 bp, Homo sapiens
gccttcaacaatagctgctttaccattttaaccacagtcctcatgccctcttggccaccatctcctccctcactaggagcagataacctaactaatattttccatagataatagaggccttgaggcaggagctccatcaaccccacccagggccctggttttatctctttaggaatgaatcctccccttacctcgtccatctcagggaaggaggtgtgtctgcttctgcccaaagctaatgcctgcctcctcctgatcctgccttccctcttgtcctcctcctcagataactggctccatcagccttttcctttctactgctgttatccctccatcacctgaacatactcaagtcttcccccaagcgtttagcaaacagcagcagaaacaacaaatggtacttctttttttttttttttttttcttttgaggcggagtctcgctctgttgcccaggctggagtgcagtggcgcgatctcagctcactgcaagctccgcctcccgggttcacgccattcttctgcctcagcctcccgagtagctgggaccataggtgcccgccaccacgcccggctaattttttgtatttttagtagagatgggttttcaccgtgttggccgggatcatttcgatctcctgacctcgtgatccgcacgcctcagcctcccaaagtgctgggattacaggcgtgagccaccgcgcccggccaacaaatggtacttctagataccgttttatatggttctggccctccccggtgaagttttatttaaagaaaaaagaattatcttggagagatacattcatggggtttaaaaaaaaatagaaaaaaaaagcacacagcgaaaaacgtctttatatcccagaggcaacttttcttgctagtttcttacatgcatagagttatgtgattatataacccttctcttatttacacttgctgttttcacatagtgccaatcattccatattagcatatatagattttatttctttaacatccacagagtaccccaaagtatgtactatggacataccaacatttatttgacaactcttctattagtagatgtttgcatcccccttttgctatttctttttatttttattttaaatggagtctccttctgttgcccaggctggagtacagtggcaccatcttggctcactggaacctccgcctctgtgttcaagtgattctcctgcctcagcctctcgagtagctgggattacaggtgcccrccacca

SEQ ID NO: 689608 - DNA, 592 bp, Homo sapiens
tctataaaattcccttcccaacttctctagccaacttttttactcaaggttaagcaaatttaggcaatctctgacttaaagactccatcagtgttgacagtggagttgaggacatccctactcccaccccatccctaccacccctagccctgccttcccacaccgctcctcactccccactcacaccctcaactaggcacctaaggctcacctctccccagagatcccaagaccctaccttccagggcctctcgttaatttcctccccattacattctcccttctctcctcccttgtaccaaccaaagccttccaaccctctcccsgttcaacccatgggaaccctgaattagcaaggagttgggactgcacttcctttgccagtactgttgcagcctaacaggaaatgggtgtttccaatgtaccaagtgggcattctggagacattattttcctcacagaaatttgtttagcagccgggcactgtggctcatgcctgtaatcccagaacttcgggaggcagaggcgggcagatcacctggcaaaaccccatctctacaaaaatacaaaaattagccaggaagagtggcac

SEQ ID NO: 689609 - DNA, 1013 bp, Homo sapiens
attattctctatttctaatcaaacacttgcttataaaatgctcccgatgaggcaggtggtatctgaaagttccttccaaacctgtaagtctaaggcactttagaatgagtattcaagagcaggtatcaccccaacagtcacacaaaaatgccggcatttcttatgtataagaatggcataggtaaaacggtttgggccaattccaaagtgctagctgcgagatgcaagaacactaccactttctttgcctgatgggcaagcagtctgcttctgggtcaagtcaattgaggctgttagctttggcaagtgtcttgtgtaatcctgttgctaattcagccatgtgcatcattctctgtggattataatagttgccgccaatcccctacattacacagcagcctgggaaatgctcttagaggtaagaaccccatcactgccagctcatccacatcttcctttagctaaacatttactgagcacatactgttaaatgactgatagaattatttccattagcgatacctgttctttttttagtcagtttattctccttttgagtatctttgttttttctttcagtcagtattagagctgacttgggtgttctgaagctgatggatggctataaaaataacatttcttttaaattgtattttgctgtttaaatatctttttttccatgtttttcattaaggacatgacaaatcttttctgtgtggtttctkccttgtcgcttattgctcactttaaatttgtgctgtaccaattggtggctctctggattaggccattagtactagaaagggaggtaaaaaggtagaacaactgaagcaagaaaaagaaatatgcaggtatctgaagctggagagagaacacttacagaaaatcatgaaagtgtgttgttttttactctttttcatagggcagtacatatttgtgatttttttctaattttgtattttttgtgacttacgttgtttagaggttaacatacgaagaaagaatggctcgtc

SEQ ID NO: 689610 - DNA, 592 bp, Homo sapiens
tggatgtcaatttatgagacttcacagcttgtttttgaagatgattctttccagctaaagaaagcagtataggacagacagaatctcccctattcccaagctagatgaccttagataagctactcagtgccccatttcagttccctcttcattaagagggaatcgtgacagtacctacttcacaggagtgtggtcacgtgaaataatgtgctagcacagggcatgccaaagggcagatagtccaattgatattatctgtctttgtttttgttattattaagacaatgttcacaatgaatcctttgttatttgacgcacatatagaaagtttcagaaataagcaatttgcaaaacttgcaaaaaactgtaagtgaattattcctctgctatgctgagttttcttcctccaccttcaagaagtggcaaggaaaaaaagatagaaaaatcactgaccaattagaagtttttgtttcaattcaraccaccctaaagttcctggaaattgcatatatgaactctagtaagctgaataccaaaaatgagagggaagtagctgataccaggctacagattgtgggctacaaaagattga

SEQ ID NO: 689611 - DNA, 602 bp, Homo sapiens
tgaaataaacaagaaacaactgtactacctccaatgacaaaatatggagacaaaggggaggaaaagagggtaaaaattaaatcaggaaaggggattgaagagaactctattttctatattctcagtaagcaaatttttctccattcatacctggaggttcatctaagctcttgtgaccactatgaactatttgaaagcctcagaaaaaaagagtaggtgtgaaatttaagaggatggaacaacaattttctgcaaatataaaaataaagaattgaagactatcactgtcccatttgacaggtccatgaataattatgtcctattgactttaattatctcacgacgagaagtagctcactattctgcaacacagtaasagctactgctttttaaaaatatttagtatttttcacacacaatgctaagggcttcacatgaattatttcttttgtttcttaaaatgaatctataagaaaggggttaatattgtctttatttcataaataagcacagtaaatcatatacaatacacacaaattatcctaggttatacagctagtcagaatttgtagacactttttctcaagattgctttttttgaa

SEQ ID NO: 689612 - DNA, 725 bp, Homo sapiens
gccactttctgttcctctatttttcattattattactacttgttttataattccaaaaccttgcttttactctaaaatttaatcaatcgatttttctccacactaatccctgggaaataaataagtatacttaaataagaatgctgttacctgtattatagcattagaattggaaagcagccctggacttttttgttgagatgaaaaaaagctattctcactcacatgcccaaattaagacagaagaatggatctctattatttatatagatttatatgattttcccatatttatattataaatatgggaaaatcatatttaaattggacatgcatagaaattcaatgtaatctaatcaatcagccgcacctggaaatagagacaaagagaggtgtccctgagcaatgtgaatatactacattaataggtaagagaagatataaaaaccacaccattatatccagaagacaatcgttccacaataattaataaaaataatggaaaagtatgatctcagaatcatcagtatacttgttagctccccagaccctctaatatttcattttccccaaacactgaacacaaaayagaaaatcagattaaatatgatcagcttgctttgatatgcagctgacttgtgctcatgagcactttatctacctcatgctttgtctttttcttttaaaacccaaataaaataattatgctaattctctccttctca

SEQ ID NO: 689613 - DNA, 1425 bp, Homo sapiens
  misc_feature 554, 555, 556, 557, 558, 559, 560, 561, 562, 563, 564, 565,566, 567, 568, 569, 570, 571, 572, 573, 574, 575, 576, 577,578, 579, 580, 581, 582, 583, 584, 585, 586, 587, 588, 589,590, 591, 592, 593, 594, 595, 596, 597, 598, 599, 600: n = A,T,C or G
  misc_feature 601, 602, 603, 604, 605, 606, 607, 608, 609, 610, 611, 612,613, 614, 615, 616, 617, 618, 619, 620, 621, 622, 623, 624,625, 626, 627, 628, 629, 630, 631, 632, 633, 634, 635, 636,637, 638, 639, 640, 641, 642, 643, 644, 645, 646, 647: n = A,T,C or G
  misc_feature 648, 649, 650, 651, 652, 653: n = A,T,C or G
gttacattaacatgactttaaatttataatatactacattatttattatattgtcattatcttctttccaactagaatgtgtaatacagaaatcattttaactttgttttactgatagactctaagtgcatagaagagtccctgcacattcacaaatatttattgaataaattaataaatagctgaatgtatatagtatacaaatgtattcatcggtgacattttaaagcatatacaatcatgtaaataagcaagaattagatgataaataaatgcccgcactaattagatattttaatttctttctacagaacaattagccatgttgaatacatgtggattacttttgatgaggaaacatttataatataaaaaatgaaaataaaatttatacttttaaatttcaaataatttaatatctggatgtcaaattaagttgagtttggtgcccttgaaatttaataatttattggtatatgaatcataagatcactgtatcattaagaaatattagtttgtgaatatttgatataagaaaactgacctgttagatnnnnnnnnnnnnnnnnnnnnnnnnnnnnnnnnnnnnnnnnnnnnnnnnnnnnnnnnnnnnnnnnnnnnnnnnnnnnnnnnnnnnnnnnnnnnnnnnnnnnaaatagattatttaccacttccaatcacatgttaggggtagagattatgttgacatatatgaatttatttttattcctgaatcagaaagcgtaaaatagaataatttaaccccaaatatgtaactcatgacttcctagtcaaatattagtgtttacctaaatattgtattttgagattcagtaaagttttgtagaacaaattattgttatttcatctataaaattgtaacgataacaatattatttgacagcacatttaggtatatgtgtaaatgagtttatttcatttcaaaatgctcctagatataaacagttaaggtttcattaaaattaaatagaaaagaagcagcagcattacaagagtgtttcatgataataagaccatgatagaaattataagtaatgatatgttttgtaatgtaagaaataacatggcatgttaggaaaaagaggatgtaggttaaatgtgcaagtcagacaatgacatcggcatcatcatcatcatcatattgatgttgttgttgcaaatctaatattataatttatacttcaataatataacatgccaaaaatatttttcagggctttagatacagttatatgtctgattacagaataactgtcaggaaaatgccattgttatctattgtttacacaagatgaaaaatattgtgaaatcatacaactgatatatgatgacaccaggatttgaacccaacttgacagttacatgagsctatcattttaattgttaaatataaagagttaagta

SEQ ID NO: 689614 - DNA, 620 bp, Homo sapiens
caagtcagctccaaataattattttgtttttattgaaaaacaaaggccttgcccttggaaaacttagattatagccaaggcagcaacatacccgcagaaagcaacataaatactccacaatataacttatccacaaatacaacaacaatatttttcaactaaggaactgctttaggaggcttgcaactgagtttgtaaagggagaaagtggcaccagccttgccaaggaaagtagccaaaccaatcctggcaatcggtgatggaacagctgtcacatgtacaaaaagagtcaagacggagcctagaaacattgataaaatgtagagcagaaaagtgagcagagaaaaatggcaaaggacattctaaaaaatattcaaatgctcacattaaaatataagcattttatttgtataagtacaacttaaagcaagaaaccatttttcaattatcagagtggcaaagatctttttaaaatgataatactcaggcttgtaggttttggtgtaacccatgtgcccttctggcaggagtgtactgtaaatgagtccaatctttttgcagggcaataggtaggcatcakagcctttaaaattatcaaatctttaacctgctattggagt

SEQ ID NO: 689615 - DNA, 670 bp, Homo sapiens
ggaaactattctgtttcccttggcattttgtcaatatgtgatattaatgagcttacaatcataaatagagaatataatgcaacttttcccattcttgtgatccaattcatgttatagataaattacaatgctataggttgttataaggtttctgaaacttatggtttggtagacagacactaaacacaattctattttttggcctacaattttataaatgaataaatrgtttgtctgttttcataactagaacaaaaatactatgaggctaacactttgtcttattaactgttgttgggaaaaaaaaggagtgagagattcaatatattttagaatttttaaataataatgcatataattaaatgggttcacctaaaacagagattaaatgtatcatttataacgtaactgcatagtctggtatcatgtacttagcattattggggaaagggatacttttcagaaccagattaacatgaaaaagcactgtaaggacaagtggaaaaagaaataattattaaatattactctttccaggtgtctaatttgcattattttacttacataacacaactattttatatatagtggtacacttaccctaattttacagacaagaaaacaggtttaaagggctcaagtaacttgtctaaagttaagcaaatggtaa

SEQ ID NO: 689616 - DNA, 649 bp, Homo sapiens
atttggttttggggagttttcataccctggtctcaaaaaccagcaagggtctttcacagaggtcattctagaatttctttataggagggttttagaaatgaccagctgactgggagtgggggttggaggaattgtcttatacttattatgtaagcatgctgattttacctggattttctttttatcaaggacggcttggggaagatgttggagatggggaaggggaataccttaaggctcttgaggcaacttatcattttttttgtgtctccatctctgatacctgtgaacctgtctttggccaggatcttgcacagagaaatatccatggacttgagacatcagaagctgttgtcccaatagtccagagtgtgattcagatgctccctggtctctctggccttgctctgagctctttggcaacgtgtgggacctccgttcatctcacctcctaagctgggatgaggcttaacaccgcagggctcagccaggcttcccagggctgatcatgggcrtgacggtggttagccagcatccgggaccctttttctgcacacagaaaatgttcggtggctcaaaggaaaatgagaggatgctgtgtccaggtgggctgggttaaaccatgtgcttggggcaaataaggggtacc

SEQ ID NO: 689617 - DNA, 2078 bp, Homo sapiens
tcattaaataaatatttattgggcaacactgcagctataacagtaaattagacagataaatatcctgttttacatggagttcatatagtgtgggaaacaagaatgtaaaagtgagcacagaaatatacaagtatagatgatgacaaaggcattaaaaaaactattctggtggaattaaaagacagtgaggcaactaaagtgtttgggaaaaccttctccaaaaagttgatatttaggctgtgtgcaaattgactctaagatgtctactatgggaaaatctttgtgaagagaatgccaagcaaatgaaatagcatatgcaaaggctttaaggaagacacaatagttaaagaagccaagaagactatggtgttagagtatagtgacaaatgagcatggaacgaaatgaaatgatttagaagtcaatagacatgagatcatcaggagagctatggcaaagagtctgattttatgctaagtgcaataggaagccagagctgaaggtagrgacccacttcttcagctaccatctttgtccaatacaacagtaacccagattaaattctcatcagcaataagctcttccgcactgatcttgttatctctgcctcatggggattaattaccatagggcttcagttgctctgtaggaaaggtagagaactgtccacagtctgtgtgtggaaactatgtttcaggcaatatgacaccaggctgattcagtacccaggcaatagcttctctgattgtttcaatttacttccagttccctaattaccttttctcattgaaatgaaatattaagtctaatatgagcgtctcaattttaatttaatttcttaaccattgtaatctatttattatgtcattctatattctgaatttcatgttatatattgccaaattttatttttaaattaatctttagaaatatcaacatcaaaaggtttcaataatatcttctccaagaaaagcatgagttgacaaaatattattacagaggttgagccaatgtgatggctcttccatttcagaaagccaaggaattatttttaaagagtaaaaaatgtgggtaagtatttttgttgggaaaaaaatagtctccttttatgttctcttaccattcagaactcaatcactagaaaagttgctcggtatgaaaatattttagagttctaattgctgagggggaacatttattaaggtgcttttaatttctgaaggaacattgcttatcagggtttctacatgtttttctatcagtagtaatacaaaggggtctttctttgagaaagagtttctgtagtagcaacatgcaaagcatttgtagagagaaaaataagagccaaggaaaggcagtattaccaagatcctcagagactattactatgttattgacaaaaagtagaaattatgccttgaaaattctaatcaggttctccaaaagggaaacttttctgtgctttcaggacagtgacatttggaacaatatattcttttacataataggatgacaaaagcatgactatccacctaagaaattatacttccctgaatatgtgtgttttttccaaaatctgtgttttacattaagaatgctgtaagatgagggtactgctgtcactatagacatggctatcacctcaactaccttcacaggcagtggcctctacagaacttttgtagttttaccagaaaactctaatgtgggtaaaataccaaatatatatatataattttgttaaatttaggataagtttatttgtcatgtagaaataaatacttttttataaatcagttttgcagctagaaaaagccttttatttcaaagatgggaaacaagagatgccctactcattgcatgagctaatgtagcagccaggctctactaacagtggaaattctttcctcttcactgtaatttttctgtgatttttgggtagcttagaaagttgtagacccaaaaactgacttattttattacctaaatagagagaaaaggaaggtagagcagaagagaaggaaagaattcaagtagaaactgcagctaatatataccaatttttcagctaataaagaga

SEQ ID NO: 689618 - DNA, 622 bp, Homo sapiens
tgtggtacccttgctctgcaatttaacagcatgttgttattatttggcatttaatgagtaccagaaattgctctgagtattctccacttggttcagaaacaatgaaataaattaccttcttagactgcctggtattagaggatccttctggtactgascacccacagactgatagggaggggatttctgatgaaagtctcctccgcagaaaatatgttttttcttcctcttcttttgactacttcccatgaaatcctcaatcagggacacccaggaatcatacagtgcccaaagtcctacccagtatcaccaaatataaagggacagtttacataagttgattctttttttttcgagacgaagtcttacttcatcgcccagactggagtacagtggtgcaatctcggctcactgcaacctctgcttcccaggttcaagtgattctcctgcctcagcctccccagtagctggcattacaggtgtgtgccaccacgcccggctaacttttgtattttttagtagagacagggccaagctggtctcaaactcctgacctcaaatgatccacccgccttggcctcacaaagtgctgggattacaggtgtgagccactgcacccagc

SEQ ID NO: 689619 - DNA, 580 bp, Homo sapiens
aggctgaggcaggagaactgcttgacccaggaagagggaggttgcagcgagctgagattgcaccagtgcacactagccttggcgacagagtgagattctgtctcaaacaaacaaacaaaaaaacaaaaacatgactaatccagtatgtacatacataacgtttcactgggacacatgcaaataagtgcttagcaaacattaaaagaaacttggggcctaaaggaaatcagaattttaaagaatatttctacctactgagttgtctacttagtggctacgtgaaatcagtgtcttctaaatttagaattttactgaattctttcttcatgggatcactttatacaacactgacaaagtcttcacaaggctacattctaaatccaagtagcaaataaatagcaaataaatctycttctgccattttttatctcttgtctttaaccacaacatttcattttctgcccacatggactaatgcttcttcaaagaagtgggcagtggtcagaaagcctgagttctcatttcaattctcacacaaaagttaaaagaaacttggagcctaagtttcttggggcaacct

SEQ ID NO: 689620 - DNA, 616 bp, Homo sapiens
acaatggccaaaaatacttaacttcaaaaaatggattataaatctgtacctcaaaagcaaagaaactgaaggactcaatttaggctaggcagaatgaatgtgtccacaaaacatagtatgaaaaactaagaaatttaatcgccattaattaggtctagagtctacatgtttgaatttgttatgtcaggcaacattccggcataatgtgtcaaaggaaggagcagaaagacttgactgcgtatgctgaactaatgctggttgatttgctgcctactcaatgttcatggatttgaatcactctaagcactttgttcaaagtttcatattgtcatctacataatccttttacmtgaaataaccaaataaggttagttttacatatttacaagcataaatacaagcttgtcagtaaggtcttaagttgtattgaagaattgaaaagcatcaagccctcagacagttggaaaagttggaagaaaccacagacacctcagacatctagcacctctcttcacccccacaagtaaggatggtgagaatcagaaagcattgcttcatagtggacacgcgaattcagtacattctaaatcctaaattccctactataagaagctgt

SEQ ID NO: 689621 - DNA, 612 bp, Homo sapiens
ggcagcatcaatctcattaataagattatggataaatcctcccacgagttactttgctttctgaacctatctttgagttttgagcagaataaattctcccaaagctggcaattccaacaaccaaggggtagtatccttttactacagtagtctcatgtgagccactaaatagaaattactcaggtgctawgaaaacagaaagaagtaaagaaaaatagattgactaaagggtaactgttcatccactgtccccttacaaatacatgcctagtctctgttcccctgcagccacaaattatggcaatagtcacatgggtacattctaatcacatagcaaaagtatacactattacagtgaaaaaatgggcacaaggtatctcctgaatttcaagcaattttagatagcttttagtaataactataggagagctataatatttgccaagattttattgaagttatctttaaataaacacttgacatactattttagcaaaaacatcagctagaaaaagatatcttcagctgttaatgacagtaatgcttgcagggttttacacaacagctgagaaggttggatggagactagtggtctgcaaactgaaagtgcac

SEQ ID NO: 689622 - DNA, 1132 bp, Homo sapiens
ttataataaaacatattggaagagaagagaaaatgatgagatgcagctctaaagagaaatgatactgatggaagtagtgaagcaaggtttatattaggccatatttgcaacttgaggtaccttcttttaaaattattgtaaaatgcaaacttctataggcaatgcaaaaattatcctttcaaatcaaaagcagtgctttgggaatctggaatcaaaccattagattaagcctataaaatcagagcacaaacagtcaaaaccaagatgctgyattttcaggaaaacttgattaaatgggcgcaaacacatttcaaatacccagggattctctggaatggggttctaaacaaacttcctaggaaataattacagaactggaggactgaaacaaagaaaaatgattgcaatcccttcttaaatcttcacctacagaaactactgttttgtagccaggccagtgaagaaccaagcttcctagaagtgtcgtgacttacataccaaagatgtgcaacccaacacataccatcttaaatatgaatcctaaaagagactggaataaagcagggaaagccgagcctaagagctatatggcattggtcagaatacttaccatctctgggcctcagcttcctcatctgtaaaatcatattattcatttcataggatggttgtgatgactagtttaaattactccacatgaagcacttagtacagtacgaatggcatgagttaagtattccataatggaagctatcattattattatcattattcaaaagacctaatttcaaattctgtcttctctgctgagcagctgtataactttgaccaagttatataacatcccttgaacttctattacataccctttaaaaactccagaggtttgctctgaagattaatgacataagagagtcttaagcatagagccaggcatatagcaggtgctcaaaaacatcagttgccttcatattctaagataattttcagttattttgctttagtgaccatttcttgtctataaacacataatattcaaccaaaaaaaatggtaagctaatatcccttagttgaacacaaaaagcacaagctttaaaagacaaactgaattccattcaaatttaaaacttcc

SEQ ID NO: 689623 - DNA, 1132 bp, Homo sapiens
ttataataaaacatattggaagagaagagaaaatgatgagatgcagctctaaagagaaatgatactgatggaagtagtgaagcaaggtttatattaggccatatttgcaacttgaggtaccttcttttaaaattattgtaaaatgcaaacttctataggcaatgcaaaaattatcctttcaaatcaaaagcagtgctttgggaatctggaatcaaaccattagattaagcctataaaatcagagcacaaacagtcaaaaccaagatgctgtattttcaggaaaacttgattaaatgggygcaaacacatttcaaatacccagggattctctggaatggggttctaaacaaacttcctaggaaataattacagaactggaggactgaaacaaagaaaaatgattgcaatcccttcttaaatcttcacctacagaaactactgttttgtagccaggccagtgaagaaccaagcttcctagaagtgtcgtgacttacataccaaagatgtgcaacccaacacataccatcttaaatatgaatcctaaaagagactggaataaagcagggaaagccgagcctaagagctatatggcattggtcagaatacttaccatctctgggcctcagcttcctcatctgtaaaatcatattattcatttcataggatggttgtgatgactagtttaaattactccacatgaagcacttagtacagtacgaatggcatgagttaagtattccataatggaagctatcattattattatcattattcaaaagacctaatttcaaattctgtcttctctgctgagcagctgtataactttgaccaagttatataacatcccttgaacttctattacataccctttaaaaactccagaggtttgctctgaagattaatgacataagagagtcttaagcatagagccaggcatatagcaggtgctcaaaaacatcagttgccttcatattctaagataattttcagttattttgctttagtgaccatttcttgtctataaacacataatattcaaccaaaaaaaatggtaagctaatatcccttagttgaacacaaaaagcacaagctttaaaagacaaactgaattccattcaaatttaaaacttcc

SEQ ID NO: 689624 - DNA, 1132 bp, Homo sapiens
ttataataaaacatattggaagagaagagaaaatgatgagatgcagctctaaagagaaatgatactgatggaagtagtgaagcaaggtttatattaggccatatttgcaacttgaggtaccttcttttaaaattattgtaaaatgcaaacttctataggcaatgcaaaaattatcctttcaaatcaaaagcagtgctttgggaatctggaatcaaaccattagattaagcctataaaatcagagcacaaacagtcaaaaccaagatgctgtattttcaggaaaacttgattaaatgggcgcaaacacatttcaaatacccagggattctctggaatggggttctaaacaaacttcctaggaaataattacagaactggaggactgaaacaaagaaaaatgattgcaatcccttcttaaatcttcacctacagaaactactgttttgtagccaggccagtgaagaaccaagcttcctagaagtgtcgtgacttacataccaaagatgtgcaacccaacacataccatcttaaatatgaatcctaaaagagactggaataaagcagggaaagccgagcctaagagctatatggcattggtcagaatacttaccatctctgggcctcagcttcctcatctgtaaaatcatattattcatttcataggatggttgtgatgactagtttaaattactccacatgaagcacttagtacagtacgaatggcatgagttaagtattccataatggaagctatcattattattatcattattcaaaagacctaatttcaaattctgtcttctctgctgagcagctgtataactttgaccaagttatataacatccctygaacttctattacataccctttaaaaactccagaggtttgctctgaagattaatgacataagagagtcttaagcatagagccaggcatatagcaggtgctcaaaaacatcagttgccttcatattctaagataattttcagttattttgctttagtgaccatttcttgtctataaacacataatattcaaccaaaaaaaatggtaagctaatatcccttagttgaacacaaaaagcacaagctttaaaagacaaactgaattccattcaaatttaaaacttcc

SEQ ID NO: 689625 - DNA, 1132 bp, Homo sapiens
ttataataaaacatattggaagagaagagaaaatgatgagatgcagctctaaagagaaatgatactgatggaagtagtgaagcaaggtttatattaggccatatttgcaacttgaggtaccttcttttaaaattattgtaaaatgcaaacttctataggcaatgcaaaaattatcctttcaaatcaaaagcagtgctttgggaatctggaatcaaaccattagattaagcctataaaatcagagcacaaacagtcaaaaccaagatgctgtattttcaggaaaacttgattaaatgggcgcaaacacatttcaaatacccagggattctctggaatggggttctaaacaaacttcctaggaaataattacagaactggaggactgaaacaaagaaaaatgattgcaatcccttcttaaatcttcacctacagaaactactgttttgtagccaggccagtgaagaaccaagcttcctagaagtgtcgtgacttacataccaaagatgtgcaacccaacacataccatcttaaatatgaatcctaaaagagactggaataaagcagggaaagccgagcctaagagctatatggcattggtcagaatacttaccatctctgggcctcagcttcctcatctgtaaaatcatattattcatttcataggatggttgtgatgactagtttaaattactccacatgaagcacttagtacagtacgaatggcatgagttaagtattccataatggaagctatcattattattatcattattcaaaagacctaatttcaaattctgtcttctctgctgagcagctgtataactttgaccaagttatataacatcccttgaacttctattacataccctttaaaaactccagaggtttgctctgaagattaatgacataagagagtcttaagcatagagccaggcatatagcaggtgctcaaaaacatcagttgccttcatattctaagataattttcagttattttgctttagtgaccatttcttgtctataaacacataatattcaaccaaaaaaaatggtaagctaatatcccttagttgaacacaaaaagcacaagctttaaaagacaaactgaattccattcaaayttaaaacttcc

SEQ ID NO: 689626 - DNA, 1189 bp, Homo sapiens
atttggaggcattgtattctcacaattgttcagagacccatattggagaatgggaccacatttttggtaacgctataaggatcgctgtgtatctctctcttccattaaattccttgagggcagggaccatgaaaaaaccctttatactcccctccattctcctttcttccctcccccagcatagaggcttaatccagcatttaataggggagagaacatatttctatgttgattaataacatagcatgatcacagtactaaccacaaatacccacgacctgttaactacctttccaacctttttctgtatgacttccctccaggtgcctagtgatttagccaacctgaactgcttcaggctgtgcacacgttggggggttttctcacctcactgcctttcttccacaccatttcctttgtttagtattccctcctccacccctataggtccagttcctactgatcctttcactgttcaatccaaagactacctctttgaagaagtcttccatgctgcaaatactattcacagttgatatctttgttactttcagctttataggaaagatttctgtgggctctgccctgtgctactgtgagccacttgggggcagatctgtcctgatccttctagatcttcccacagaaacgggtacagagcgctgcccatagcagagatttatgcatgtgcattgaaagaggaaaaaaaaaatcagaatgaccagggtagtgtgatggatgctctaagggtagccaaataaaaatgataggaagctagaaaggaaacccaagagtgggtcagaaggaatagcagacaatgttaaaatgttttaaggctgattttatgtggcattggtagakattagcctgctcaccacagccagtttcactgtaaatcatgtaacagaccttgtagaaatgccaagatagtagacgtctgcttaaaacgcagagctctgagaaacgctcgacttcaaacattgtttactttcttcattaggaactaaagagaagcaagtacaaggcagcgggtagcaattacctaatatctttgccgaaagagagatttttcaaaatgtgcttttctcactaatccttgaggggaaatgaggtttatttatggtgtcagaagagaacaaggcattaatagtaaaagattttatatgacttcatgtttttaggaaagtca

SEQ ID NO: 689627 - DNA, 1304 bp, Homo sapiens
tatgcaaggtggggaggcagaatcaaggctctgcataatggctagggccctcaaaaggctatgctgccagaaaaaagatgctcaggcaaagggaaatgtcaagcaaagttgtctgtttcccctggcctctgggtagaaaagaattcagattctgcccatacacagctttgaggtttaatttatacaatctgagtggtcagaaactccaagtcaagatattaacatgaaattgttccagtttgatagcacgtccgccatctggcagaacaattaaaaaaaaaaaaaatcctttcctggcagccatgcggactcaccaagggctcctggccatgccctctcccaagattctccataaaattagttggttgcttcttgccctgaggcagcccagtgaagtctagggtgtggtgatcccatgttgttgatggggaaaaagggagtgatggggtgcttgagggcttcttaagccatagttcaagcatagcgagtgccccctcttcttctgaaagggccagatacctggcctcatcctctccacaaagaactctcttgggatcctcaggggatccaggttagggcagagccctagggctcagagaggggggtcagtaattaacctgggccctagcactgtaaaagtgacagtttgatctccccactgtccttcttcccctgcccaccagggacaaggcttccagaaagaggggaccactgggaaattctgcctcttgttcagataaagttcttcccgctgcaaggctycgagcttcattcttcatcctcagatctagaatgggatggagggcagttaatttacaaaaaaaattatataaaataattgtatgtaatatatattatcaaaatagctctcacagcataaatcttatagataaacctcaccaacatgaacttacaaaccaaaattatgaacacatgaaaaaataagctactaagagtaagaaattaaaactaataaggagcaaatgtggctgggcgcagtagctgatgtctgtaatcctagcactttgggaggctgaggtgggtgggtcacttgaggtcaggagttcaagacaagcctggccaacatggtgaaaccccatctctactaaaaatgcaaaaattagtcagacgtggtgatacatgcctgtagccccagctacttgggaggccgaggcaagagaatcacttgaacttaggagatgtaagttgcagtgagccaagaacatgccattgcacccagcctgggcgacagagtgatattccatctcaaaaaaaaaaaaaaaaaaaaaagcgcaatgtgatta

SEQ ID NO: 689628 - DNA, 612 bp, Homo sapiens
taactctatcatctctctctgtagtcattaacaacctgcaagtcacccatgcactgcacatggttcagtcttcatgttatttgtctcttggcaatattccattccgtaaaccaattcctccttaaagcattcttcttcttcagtttctgtgacacaacactcctctagcttccttcctactctctggacactccttcttatcccacctttctttaccyagctagtcattgttggagtaacgctcttactacagtaatcacctctatgcaacaacttccagatctatatatgcggtcctggcctggcctctcctctgaattcaagatttacatcacctaccacttacttgactgcttctaaggcaccccaaaatcagttattttattttgttttattttttaagataggatcttgctatgttgcccagactgctctcaaactcctgggctcaagcaatcatcccacctcagactccagagtagctgagattacaagcatgcaccactccccagcatcagttcatttaaattaaaactcatgattgtctctttgcttcccccaaacacttactcttcttccagcattccttagctcagtgaatgcaacatcact

SEQ ID NO: 689629 - DNA, 774 bp, Homo sapiens
tttatgtataatgtataataaaataatgagattggcttatgaaatcatatgttctttttatgtcaatgactgtctaagcactggtgtatgagactaagtggtttgtatgtacaaagcttctatttagtgaatgaagattaataaatactattccagaaaaattttattattatcaaaataaactatttctagtactgaatgggaaaagatggaggatcttaatgctcaagttagtgatccacagatttaaaaagtttaagagccagcaatagataaattacataacccataatgtgaatacatctgataaattattattataaaaaactgatgaagcacccaatttttcatttaaacaacagaacctgatttaatgaatcatcaatctaaacaggagcatttagactggaatctgtgaatttgggaactttataaatatatgtagttgacagaaaacggaaagaatttggcccaatgcacaagagtagtcaggttgtaattattaatatcaagtcaaagtttgatttttatttacccgaaagccagaattcaggcagaaaatgacacaatatcataagtgtggaaawagaaagaaaccattaccgtaaaatgaacacagaagaaacatagcatacacagatactttttggtgattttgcttaaagagaaagacaaagaatcagacaaaatcaataaaataatactgaggggcaaaaaaacccatcaagatttcttgtttttttttcagaaaactgacaactgtttagaacaaag

SEQ ID NO: 689630 - DNA, 1442 bp, Homo sapiens
tcatgagaaattttcctctaacaattcatatgttttgaagtttaaaaatstgtatagtcaggcacagcggcacacacctgtagtcccagctactcagaaggctgagataggagaactgctagggcccagatgtttgaggccagcctggaaaacatggcaagacccccatctctaaaaacttaaaaattaaaacattaaaacatttatataatgctcaatatctaatacttacattttgggttacaagttatgctttacaaatttttaagttttaatgaccccagctatagaaatatttgaaataaaggcatcttttaattttgaagggtgattaggttccatggaaccagagaaatattttagtttcatgactatacatgaactaatgtggatagaaaataaatactccccaaaatttcttgtgtggtaagtccattagattttttaaaattaaccttggcaatcatcatggtttgtaaaatagcatctagagatagcattatcttggtttcatttgtaatgggagtaaacatttagaatcttctggctataagatgtcaaagcctcccatctatttgactgtagccaatatcatatatatgtcagaaagaaaaacattttcaagcctagcctctattcccacatactgattcttgcaatctaccaatgtatattttatttatgcatggtatgagtagataaaaattatgtaaagccatagaaaacttataaaattatgtaagaaaaatggttttaaattgtatcagcaaccgcttattaaacaataaacaattgccttgttacctaaaagatgctggttcccactttgaatcatcagcagctgtccctgggctggacctacaggtgaattctgaccactgagggcccataatcatgaaccctccctcaacgccaggactgctgtcctctctgggccagccagaaaaacttcactatccaaccctgctaacgcagtgcttcaccagtgtccaccgcagatataggtgccagaatgggtagattataactgaaaaaattagttaccagcccttctgcattgctttttcctaaaaagtagtgttttttgttgttgttgttgtttgtttttgttgttgttgttgttgttgtttttgagacagtttcactcttgtcacccaggctggagtgcaatggcgcgatctctgctcactgcaacctctgcctcccaggttcaattgattctcccgcctcagcctcccgagtagctgggattacaggtgcctgacaccacacccagctaatttttgtatttttagtagagacagggtttcaccatgttgagcaggctggtctcaaactcctgacctcaaatgatccacccacctcggcctcccaaagtgttgggattacaagcataagccaccgtgcctggcagtgctttctttctttctttttctttcttg

SEQ ID NO: 689631 - DNA, 1442 bp, Homo sapiens
tcatgagaaattttcctctaacaattcatatgttttgaagtttaaaaatctgtatagtcaggcacagcggcacacacctgtagtcccagctactcagaaggctgagataggagaactgctagggcccagatgtttgaggccagcctggaaaacatggcaagacccccatctctaaaaacttaaaaattaaaacattaaaacatttatataatgctcaatatctaatacttacattttgggttacaagttatgctttacaaatttttaagttttaatgaccccagctatagaaatatttgaaataaaggcatcttttaattttgaagggtgattaggttccatggaaccagagaaatattttagtttcatgactatacatgaactaatgtggatagaaaataaatactccccaaaatttcttgtgtggtaagtccattagattttttaaaattaaccttggcaatcatcatggtttgtaaaatagcatctagagatagcattatcttggtttcatttgtaatgggagtaaacatttagaatcttctggctataagatgtcaaagcctcccatctatttgactgtagccaatatcatatatrtgtcagaaagaaaaacattttcaagcctagcctctattcccacatactgattcttgcaatctaccaatgtatattttatttatgcatggtatgagtagataaaaattatgtaaagccatagaaaacttataaaattatgtaagaaaaatggttttaaattgtatcagcaaccgcttattaaacaataaacaattgccttgttacctaaaagatgctggttcccactttgaatcatcagcagctgtccctgggctggacctacaggtgaattctgaccactgagggcccataatcatgaaccctccctcaacgccaggactgctgtcctctctgggccagccagaaaaacttcactatccaaccctgctaacgcagtgcttcaccagtgtccaccgcagatataggtgccagaatgggtagattataactgaaaaaattagttaccagcccttctgcattgctttttcctaaaaagtagtgttttttgttgttgttgttgtttgtttttgttgttgttgttgttgttgtttttgagacagtttcactcttgtcacccaggctggagtgcaatggcgcgatctctgctcactgcaacctctgcctcccaggttcaattgattctcccgcctcagcctcccgagtagctgggattacaggtgcctgacaccacacccagctaatttttgtatttttagtagagacagggtttcaccatgttgagcaggctggtctcaaactcctgacctcaaatgatccacccacctcggcctcccaaagtgttgggattacaagcataagccaccgtgcctggcagtgctttctttctttctttttctttcttg

SEQ ID NO: 689632 - DNA, 637 bp, Homo sapiens
ttgtcattttgttcttaaccrttgcggttaaactcaaatgatccaagttttagatgaaccagcttgttattgaggaggggctggccaacagggtcatacgctataaattcaaaagaaatgatgtttgagaacaggccattgatttgatgaacaggaagtgatggttttgagtagaagtgggggtagtgagcaggagcatcactacaggggacaaggtaaaggcatgagtgggtgatgctgaaggaaggaatcggtggagacaaccaatcaagaaatgacaggggaaaggaacaagaggaagggatacatcctaggggggatctcagggttactttcacagatgtatttatttccaagacagaggcacaatttacatataagataaatggatccaatggagccagagaatggaaataccacaaagatggcaccagtggagttggtaattttttgaggaggatagaaagacggggatctaaagtccaggggaagggatcagctctggagggagaagagcaactgcttgcttcaagaccagaggggaagaccagctatattttaaactagagatactctggcatctcttgaatttactggatttgtggaagttcctttcaccacattgataccagtgaaa

SEQ ID NO: 689633 - DNA, 1475 bp, Homo sapiens
tttccacaataataaaaactttatatgaacaaaatatttaagtagagtccaaaaattaatgcctacatataccaaggaaccctgagcacatttaatctttttcctaatccctaaagtcttgttaccaacacatctcagctatacttcaatctctgcctacaaaccactttttggaaacagtggaaacaaattgcatcaccactcagatttcattctgctgcaactttccagatcattaaactcaattcaattaagccaggtgagaaacagcatactactcatcttaccgcaaatgtataccttttagctctaaagttcagctaaaacaaaatttaaaaaatatatccatgtcatcatgtaaaaaatatacatgtaacatcctaagttctaaaatgttctttgtagatcatagtaaatcaatcatttaaatgcygtaatgccacaaataaaaatgtctgattatcttcaatgtatctctacgtaggttgattttactaaattatttgataatactttcataattcaaacttcccaatcttagtaatatattagttttaataacttgacttcttagtaactttacacagatcttactgcaataactatcacttcttttctactacagctcaaatatatttgcaccacaatccagaggatttgttatatgactatgcagttaactaataaaaaagctacttgaaacaatattgcacttaattctttcttgctgcaatgtgttgagggtggatccatttgatgtgtatgtaatcatctaatatgtgattagttctataattaaatgaattggaaacattttgctatatcaattattaattcatcttgagacaaagcaagacttacctctgcttgacctatgattaattctgcccatgttttccactgtggacatttatccctctcttcaaatgttgtttcattagatccccaacagcactgttcgtggttgtaccacaacgcactaaggcaaatgccctcctttaggtcagtcatccaatcggcagcaatgtctattaatccggccagtgcccctataaaaacatgttggagatggtaaaaaaattaagtcaattttttgggagtcgagaacaatctagttaaaaggcaagtagaaagcaggagactcctaaataaagggtcatttatgaactacatataaatttaagattttcaaattttagttataaactgtaaagagttattttttacaataaaagtgctatttttgtttggaattttaaaaagttacatcattcaaattaattgtgatctgaaaaacaatgtttaaaagatactaaaatatcttcaaaagacagctacttggcaggaggttcacaaatctaattttcaatcgataacttaattaacagacttataaatgatgtcaatttcattaaaatttaatgtccattagaaataattattgaaactcataggaataatattttcttaaatta

SEQ ID NO: 689634 - DNA, 458 bp, Homo sapiens
atggctgaacttttaaaaatacactcttagccacatacctatgaaatgtatatgtgtgtgtatacatatgtgaatttgcttctgagattatggaggctgaaattcccaagatggaaggaaagctggatggatacccaggaaagcatttgtttcctattaggcctcttaattctctcctggcctttgattgattgtatgagtcccacccccgttaagggggcaatctgcttcacttagtctgcccatcccgatcttaatcacatgcgaaacactctctggaacatccaagaatttgacatccaagaatttagcactaatacaataatattatccaatgtagatatattcagmtttccccatttgtaccaataatgccttgtatagctgtttttgaaagggaaaattttcaaaggagaaactttgcatacagtgaaattcatagatcttaggtgtacatt

SEQ ID NO: 689635 - DNA, 458 bp, Homo sapiens
atggctgaacttttaaaaatacactcttagccacatacctatgaaatgtatatgtgtgtgtatacatatgtgaatttgcttctgagattatggaggctgaaattcccaagatggaaggaaagctggatggatacccaggaaagcatttgtttcctattaggcctcttaattctctcctggcctttgattgattgtatgagtcccacccccgttaagggggcaatctgcttcacttagtctgcccatcccgatcttaatcacatgcgaaacactctctggaacatccaagaatttgacatccaagaatttagcactaatacaataatattatccaatgtagatatattcagctttccccakttgtaccaataatgccttgtatagctgtttttgaaagggaaaattttcaaaggagaaactttgcatacagtgaaattcatagatcttaggtgtacatt

SEQ ID NO: 689636 - DNA, 1292 bp, Homo sapiens
taaagaaatgagctacattatcatttacttcttctgaacccaaaatatctctcctcctttttgttgtgtgattcgtggtgacgtggactgtgtgaaggagacaggtcagttgtcctgctcagtgttctacattctgcagttgtctggtgattacctcctatgaaactcaggctaagcgttttctgcaagaacatggcattgttcatattctgcaccggcagagtcccgggtgacatgctgtctcttgccagcggctcctgactcctgttctttacaggatggaattgaaaggagcagggctaaggcctctcaatgctgtttgtccatctagctgtggtcttcctaagtattgatatcaattggaggctgaaggactatggcttctctactcaaaggagcctagtgggttaacaactgtcaagagcagtcagtggttctgaaatacaatcctcagccaaggatccctcctgtgttacagatggatcagctaaaacaaaccaacactgaagatacaaagaatggggttaggttsaatgaaaccagggtaacacctttggatgagctaaacacaaagatgacactgaccttgagcaggtatagcagctcagagacatgcctgcaaaatgaaacccctgaggaactttgtagctacccagagatatctggttcaaattagaatgtctggcagatcactcccggcatgtgctacatagtcgtgtgaacgtgtcacacctaacttgggtccaatgtcttcagactgagcacaggtggccactggcatggtctgagaataggaatagagccatgcccactttcccatcctatgactgggcttccaaagggaactacagtttcattcaaacctacatgtgcctatacgtcctgcctgcagcaatgacatctctcagcttagtaagggctgcttagtgtgggaatatgactcccatctggaaggccaggtggtgccttatcactgtcaaagtaaaaaacctattgtccacgtcaagggccaagctgacgtcctgttcctcaaatgagtaaaaggcacttctgtactgctggaatgaggcatgtagttgaaagtaagttgaagtagtcgaataacatctatccagtgagtcctgcaagacttcaggctcttctgcttccatcagcacctcgttgagcctggaaaaggagacaaaactaaagcagccagggaaaatcagacaccacagagccccaactagatttcaggggtaacataaggaagtggtcaaaaaaggaaaaggataggtccattaatgaggtaa

SEQ ID NO: 689637 - DNA, 602 bp, Homo sapiens
taaaaatctgtgtaaaacactgtatcatgtaatctaatcctgtagttccatcaactaagtaccatcaaacctatgatcacaggtttggatccaccaaacttgctggattcaggttaaattcaacacttcagggcacaaagaacagaggaactcaaggaagcagactcaccaggttctccaaagcagatcagtgctcaagtaccaggagtttaggagttgtagagcagagaacctytttatagggcctgctaccccacccagcaggaagtggaactacccaaaactgggctggcccagcaatgtcccaactaaaatgcaaatctatccataactggcatgacagggattctcaaactgggaaatatcctgttctgggatctttccactggattaagtgccctgactcactgaggccctgccttagatctcagtttcagtgacagcaaagagggacttgggggattctctaactggtggtcaagggctctctttcttgattgggggcaatgaatgcttcctgtcttacacattccctaaatcataaaacttcctgccctgatccactttagctgaatgccatattgtttgtacatgaacccatc

SEQ ID NO: 689638 - DNA, 2152 bp, Homo sapiens
tggagatggagaaggacaagacacattctctgcttccgagagttctttggctggggtcyggagaggatgggtggtgttgtgtaagagaggatgttgctgctgtagcagttgtgctctttggtatttatccaaatgagttaaaaacttatatccacacaaaaacctgcacagggacatttacagcagctttgtaattgcccaaacttgaaaacaaccaagatgcccttcaatgggtaaatgaatgaaccaactgtggtacatccagacaatggaatgttattcagggataaaagaaagatatgagctattaagtcatgaaattacagggagagactttaaatgcatattactaagtgaaagaagccagtgtgaaaaggctgtatgattccagctagatgacattctgggaaaggcaaaactatggacacaggaaaaggatcagaggctgtcaagggttaaagggaagggagggatgaataggtggaccactggagagtttcaggacagagcaactactttgtgtgacactttatacatttgtcaaaatccaaagaatgtacaatatcaagagtgaaccctaatgtaaactgtggacttcacctaatcatgtatcactatgggttcatcaattatagtaaatgtactatgctaatgcaagatgttagtaacgggggaaactgggggtgaagtgaaagggtgttggggaattctactttctgcttgatttttctgtaaacctaaaactgattttttttaaagtcctttaaaaaaaagagcgtcatgaagtgtaatcacggagaaatgcataggtgttatgggagcaatctggggtagggggtggggagggcttgggagcatgggggtcactaatgaagtcaagacccttgtatgtaaagttagacagacaaagtttcaagttccacctctgccacttatccaccatgtagccttagccaagttacttaacacctcttaaacctcagcttactcctctgtaaaatggggctaatgacgcctgccaccaaattattatgtgatttaaataaaatgcaaataaagtacttggcactgccagtgatgagagtcagtgcttggcgaaagagagctccttttcatgccatggtgggtgaggaggctggctcaggtggagagcaggaggagaaagcatgccagcccgagaagtaatgtgggcagagccctggaggttcaaggaagagcagatgcagggggtttggctcagccaagaagggcatgtggagggtgggggctgtggctgcagaggcaaaagagttaggtagggtgctgtggcctggcgtgccatcccagggagttgctgtttcctcttgaggattgatggaaggcaggatgactggcaccagggagagccctgattggcttggcagtttagaatgtttcctccagtaggcacagaaaaatgatgggagagagtatgggggaggggggaagcaggacaggaatgacagcagcaatccagggacaatttttctgggtcaaagtagtgggaaaagttggactgtggggtctaggagcttgggatgtggcttgggaaagcagcttagctgaagtcacccgctggctggctgtgtgactgtaagtaagtcatttaacctcttagagtctcaattagttcttctttaagaatgtccatcttctaggaagatcctgaagttgaaataagatagtaagaatcaaagaagttctgggggcgggagagacatgaactgtatactgaagtctccaactatgggaggtggaagacgaaaatggcacaggctgaaactgtagcattcagagcaaggaccatggggctgacagtgctcagtttgaatactggccccgctgctcactagcatgaaatcttggtctcgccacttaatttatttgagcctcctttgtagcatctgcaaaatgaggatagtaatacctaccacacaaggttctgtggtggggtcacatgagacaattgccaagggcccagaacatagtgagggtttcaaagatgagaacagtcattactatcatcattattatcatcatccttggaggaatataatcaagaatatttttcttttattgcgatctgtgttatcaacatgatgtatgtatcgtgagtgtcttgatagtaaaaaat

SEQ ID NO: 689639 - DNA, 2152 bp, Homo sapiens
tggagatggagaaggacaagacacattctctgcttccgagagttctttggctggggtccggagaggatgggtggtgttgtgtaagagaggatgttgctgctgtagcagttgtgctctttggtatttatccaaatgagttaaaaacttatatccacacaaaaacctgcacagggacatttacagcagctttgtaattgcccaaacttgaaaacaaccaagmtgcccttcaatgggtaaatgaatgaaccaactgtggtacatccagacaatggaatgttattcagggataaaagaaagatatgagctattaagtcatgaaattacagggagagactttaaatgcatattactaagtgaaagaagccagtgtgaaaaggctgtatgattccagctagatgacattctgggaaaggcaaaactatggacacaggaaaaggatcagaggctgtcaagggttaaagggaagggagggatgaataggtggaccactggagagtttcaggacagagcaactactttgtgtgacactttatacatttgtcaaaatccaaagaatgtacaatatcaagagtgaaccctaatgtaaactgtggacttcacctaatcatgtatcactatgggttcatcaattatagtaaatgtactatgctaatgcaagatgttagtaacgggggaaactgggggtgaagtgaaagggtgttggggaattctactttctgcttgatttttctgtaaacctaaaactgattttttttaaagtcctttaaaaaaaagagcgtcatgaagtgtaatcacggagaaatgcataggtgttatgggagcaatctggggtagggggtggggagggcttgggagcatgggggtcactaatgaagtcaagacccttgtatgtaaagttagacagacaaagtttcaagttccacctctgccacttatccaccatgtagccttagccaagttacttaacacctcttaaacctcagcttactcctctgtaaaatggggctaatgacgcctgccaccaaattattatgtgatttaaataaaatgcaaataaagtacttggcactgccagtgatgagagtcagtgcttggcgaaagagagctccttttcatgccatggtgggtgaggaggctggctcaggtggagagcaggaggagaaagcatgccagcccgagaagtaatgtgggcagagccctggaggttcaaggaagagcagatgcagggggtttggctcagccaagaagggcatgtggagggtgggggctgtggctgcagaggcaaaagagttaggtagggtgctgtggcctggcgtgccatcccagggagttgctgtttcctcttgaggattgatggaaggcaggatgactggcaccagggagagccctgattggcttggcagtttagaatgtttcctccagtaggcacagaaaaatgatgggagagagtatgggggaggggggaagcaggacaggaatgacagcagcaatccagggacaatttttctgggtcaaagtagtgggaaaagttggactgtggggtctaggagcttgggatgtggcttgggaaagcagcttagctgaagtcacccgctggctggctgtgtgactgtaagtaagtcatttaacctcttagagtctcaattagttcttctttaagaatgtccatcttctaggaagatcctgaagttgaaataagatagtaagaatcaaagaagttctgggggcgggagagacatgaactgtatactgaagtctccaactatgggaggtggaagacgaaaatggcacaggctgaaactgtagcattcagagcaaggaccatggggctgacagtgctcagtttgaatactggccccgctgctcactagcatgaaatcttggtctcgccacttaatttatttgagcctcctttgtagcatctgcaaaatgaggatagtaatacctaccacacaaggttctgtggtggggtcacatgagacaattgccaagggcccagaacatagtgagggtttcaaagatgagaacagtcattactatcatcattattatcatcatccttggaggaatataatcaagaatatttttcttttattgcgatctgtgttatcaacatgatgtatgtatcgtgagtgtcttgatagtaaaaaat

SEQ ID NO: 689640 - DNA, 2152 bp, Homo sapiens
tggagatggagaaggacaagacacattctctgcttccgagagttctttggctggggtccggagaggatgggtggtgttgtgtaagagaggatgttgctgctgtagcagttgtgctctttggtatttatccaaatgagttaaaaacttatatccacacaaaaacctgcacagggacatttacagcagctttgtaattgcccaaacttgaaaacaaccaagatgcccttcaatgggtaaatgaatgaaccaactgtggtacatccagacaatggaatgttattcagggataaaagaaagatatgagctattaagtcatgaaattacagggagagactttaaatgcatattactaagtgaaagaagccagtgtgaaaaggctgtatgattccagctagatgacattctgggaaaggcaaaactatggacacaggaaaaggatcagaggctgtcaagggttaaagggaagggagggatgaataggtggaccactggagagtttcaggacagagcaactactttgtgtgacactttatacatttgtcaaaatccaaagaatgtacaatatcaagagtgaaccctaatgtaaactgtggacttcacctaatcatgtatcactatgggttcatcaattatagtaaatgtactatgctaatgcaagatgttagtaacgggggaaactgggggtgaagtgaaagggtgttggggaattctactttctgcttgatttttctgtaaacctaaaactgattttttttaaagtcctttaaaaaaaagagcgtcatgaagtgtaatcacggagaaatgcataggtgttatgggagcaatctggggtagggggtggggagggcttgggagcatgggggtcactaatgaagtcaagacccttgtatgtaaagttagacagacaaagtttcaagttccacctctgccacttatccaccatgtagccttagccaagttacttaacacctcttaaacctcagcttactcctctgtaaaatggggctaatgacgcctgccaccaaattattatgtgatttaaataaaatgcaaataaagtacttggcactgccagtgatgagagtcagtgcttggcgaaagagagctccttttcatgccatggtgggtgaggaggctggctcaggtggagagcaggaggagaaagcatgccagcccgagaagtaatgtgggcagagccctggaggttcaaggaagagcagatgcagggggtttggctcagccaagaagggcatgtggagggtgggggctgtggctgcagaggcaaaagagttaggtagggtgctgtggcctggcrtgccatcccagggagttgctgtttcctcttgaggattgatggaaggcaggatgactggcaccagggagagccctgattggcttggcagtttagaatgtttcctccagtaggcacagaaaaatgatgggagagagtatgggggaggggggaagcaggacaggaatgacagcagcaatccagggacaatttttctgggtcaaagtagtgggaaaagttggactgtggggtctaggagcttgggatgtggcttgggaaagcagcttagctgaagtcacccgctggctggctgtgtgactgtaagtaagtcatttaacctcttagagtctcaattagttcttctttaagaatgtccatcttctaggaagatcctgaagttgaaataagatagtaagaatcaaagaagttctgggggcgggagagacatgaactgtatactgaagtctccaactatgggaggtggaagacgaaaatggcacaggctgaaactgtagcattcagagcaaggaccatggggctgacagtgctcagtttgaatactggccccgctgctcactagcatgaaatcttggtctcgccacttaatttatttgagcctcctttgtagcatctgcaaaatgaggatagtaatacctaccacacaaggttctgtggtggggtcacatgagacaattgccaagggcccagaacatagtgagggtttcaaagatgagaacagtcattactatcatcattattatcatcatccttggaggaatataatcaagaatatttttcttttattgcgatctgtgttatcaacatgatgtatgtatcgtgagtgtcttgatagtaaaaaat

SEQ ID NO: 689641 - DNA, 3780 bp, Homo sapiens
gttctttccacgcctttctgaagcttggtgaatgcctgctaccttcttctgtgatgtgactccacggtcaaccagaaatgacacttcacattcactcatgtgctcacttgctcactactcaaactttattgagtttttctatatcccacagtgctggccactggaggttggatgcgagtccccacctgccgggtgtttacagccccctgagggagacagacaagcaaatgaaccatgaccacacagagtgatcagagctcagcaatgagactgtatccgtgggtcagcaacactgcctggaggaagcattaaggtttgagcccagagagaagagaagatactgaggttgggaagagaagcttccatgtggagaggggcacatatgcaggtctggagaatcacaagtacttcagcaaggcctagcagagagctgaggggctaggtggtcaacggcctcacatgctgggctttattctgagggtaacggggagccatggaagagtctggagctccagagtgaaatgttcagaaagtgttctttttctttttggctagaataataataactgagccaacactggttattctgtgggaaaacacacagatcattgcttaatagaagtggtctattcggaagaaaaagcctgctgaaaggtgggatccagagaaagaaccaaacaaaaggccaagcaaaaggtggtgatgacattggtgacctcaggcccataccatatctcttcaccccaccaccccagctttgcccccgttatttcagacagaccttccttcctgttgggacacgtgtgtgtgtggctgtgcctgtgacttggctctgtggtcacctgcctgtgtgtgccactgcccctgcctccctgctctccaccactccatctctccagagcccggttctgccacctcctccagcaagcctgccctgggcccccctggttcctgagaatattttgctatatccacttggaagaactttagtagggtttctaaggcaatgtgaatgctgcggttgggctgtgaggtagaataatcagtgctcagaccttaacctgcataaccaaacagtaagcaatttgagggcaggggctatgcctcattcctttcgggagacctcagtcatccagctctgtgcctgagaagcagcaggtcccatattaaaatgtctgttcagtggattcatgtttcattgtgtgcatcctaaacttgtccaggactactgtgagcctcctctttggaataagtgtaggacccccctaaatttctgcagggtcattctcttcagtgcctggtggcccagtctcctttctgagccttctggacttgccaggtacaatttactgtcccttttgctgggctcccatagattttggtgcctatctctattgtgtttcttattctattgggtcaaaggcattttgtaaaaagcgtccactctctccacctccccacccccacacccagcccagtgtctaatttgcagtaggagatcaataagtgtttgttgaatgaaaaaaaatgtactagcaagagtacaggaccactccttaggcatattaaatgggaacacaattaccaattgaattcgtttccttcaaaagagccatgtatcctggaagatccattccagacgtccagatggcaagactggggagagctgggagttattcctattgaaaccgtttcctccagaaggtctagagttcaaaagggaggcatttgccacaaacaattgggccagtgtgagacgatgtgggtggcacgttgccaaggtcttggtgggactttgagcagttaccaatgcaaataggagagaagacttatccccaggggcaactgtggtcacccagaaatggagcctttggcaacaaggagaaaaaaccaggtcagccactgcacggggattttcctagggctgtggagtggcctctggacttggagtcaggaggcctagcttctcagctgggatctgggttttagatcaagggttaagatgatctaatgccaaccttattttccagaggctttttctgagccaagaattaaatgcagggcacatcaaaggaattttcctgatttgtgaattgtttctgccaactcaagcttcagaataaagaccacttttctcattctttgagatttatctattgaatgctggactattctgaaaaactctatgccagtgaagctcatctcccagagctgtccctgtgcatcctactgtctgacctcactgcctttgctcacgcccttcctcctttcagagagtcatctcctgatattgcagcgtcatccagactttgttcaatgttaacttttctttgaaagctttctctgatcaccacaatttatagtgatccagagagagagagagagccaataagcatgtagaagatatggagcacctattactatgtagtattggctcagcacttaccatgtgccaggcatcgtgctaagctctctacaagtgtgatcacactcagctctcacaacaacccwtagaagatcattcttagacaattttaaaaatccccatttgtgggctgggtgtggtgattcacacctgtaatcccagcactttgagagacacaagtgggaggatcacttgagcccaggagtttgagaacagcctgggcaacataaagagaccccatctctcctaaaaaataaaaaaaaattagctgggcatggtgatgtgtgtctgcagtcccagctgctctggaggctgaggcaggaggattgcttgagtccaagagacagaggctgcagtgagctgtgatcataccactgcactctgccctgagtgacagagtgagatcctgtctcaaaaaaaaaaatccccatttatggtggtcattagtgctgtcatcctatacttctgattctctttcttctgagtacaacgtagaatttcacttcctgacccctttgtggttggtgaggtggagccatgtgaatagttctggccaatgccttgtgaaatgaagtaacacatcgttccagattggataatgtttcatgttccttccagaatggtgacaggccagcaatgtttgccataatggctacatcagccttctttttgctaagtgagtaggatgagcagaaactcctactaacccatgatgaacatgtagcatgagcaagaaatacattttgattgttttatgccactgagttttttggacttgcttgttactgctgcataatccagtctatgctgaccgatacacaattttacagatagagaaatcaagcttgcatggggaggcatggatgaccttggcgaagaggtagcttgagcccttattgtgccttattgtgtccagtgccctgactggctggctggctgtgaaaggccttgagagcctgaaatgacaggacttgatgctgttatccctaaagcacaagggagagtttaaacagggggcaacacagccatccttgggctttcagaaggatcgctctggcagctgcttctggctgagaggtcactctgtatctgtccacctggaaagatcagccctgaacccagttgaaagccaaactcccagcatacacagagaccctcagggcaggtctgccatgtgcttacaattccccagcacccagatcggcccatccgagcctccacacaatgggcaaggctggttggaagagggagctcccaggagggcttctccccatcaaggcaggcgtactggctccgttgtccttttaaatgaccataaaacagcacggaaatgaatgccaactaacaaggttaaa

SEQ ID NO: 689642 - DNA, 655 bp, Homo sapiens
actcatccggactgtgtggcagcaccaacctgggcttcaggagtctggaagatctgcaagatcttgggcaagaccccgaaactcctggggtctccatttttacctctgtaaaatgagaataatggcacctaatttcttacctggcaagaatctgcagaaagcttacctccaaaatctaaggaaagcccttgccttcgaaaacatacacaaggccagactgtccccagttccaggttgtattccaggctgtatctaggccctcagagttaaatagagcctgtgcagggaaatggtattgggtagaagggtgggggtggggagggactgggacwattagggaagctgcctatagagggtggcccttgctgtggctcagaggggaggaaggaagagagctccagataggagcaaaggtacccagccagggcactacagagaacactcactggggaatggtttggtttgctccatggcccaactagcagaggaagccactgcctctctccagaaagctttggaagccagactaccaggcgatgatttacaatgaggccctcatgcccacctgagactttgtgggggggcaggtgtgcagggtaggcatggaatgtgtttgttcacctgtctttagcagaagcataagcctggaaacatt

SEQ ID NO: 689643 - DNA, 655 bp, Homo sapiens
actcatccggactgtgtggcagcaccaacctgggcttcaggagtctggaagatctgcaagatcttgggcaagaccccgaaactcctggggtctccatttttacctctgtaaaatgagaataatggcacctaatttcttacctggcaagaatctgcagaaagcttacctccaaaatctaaggaaagcccttgccttcgaaaacatacacaaggccagactgtccccagttccaggttgtattccaggctgtatctaggccctcagagttaaatagagcctgtgcagggaaatggtattgggtagaagggtgggggtggggagggactgggacaattagggaagctgcctatagagggtggcccttgctgtggctcagaggggaggaaggaagagagctccagataggagcaaaggtacccagccagggcactacagagaacactcactggggaatggtttggtttgctccatggcccaactagcagaggaagccactgcctctctccagaaagctttggaagccagactaccaggcgatgatttacaatgaggycctcatgcccacctgagactttgtgggggggcaggtgtgcagggtaggcatggaatgtgtttgttcacctgtctttagcagaagcataagcctggaaacatt

SEQ ID NO: 689644 - DNA, 590 bp, Homo sapiens
ctcacacatttataatttctttgtggtgagaatattcaaaatcctcccttctaggtattttgaaatatacaatattgttaaccacagtcactctactgtgcaatggaacacctaattatgatatttaggtttttaattctgctctaggcctcatagttatgayatttaatactttcattccatttacttttaatagaagttaacttgattttttaaaatataacttgaaatatttagaagattttatttaactccaagatttaaagattggagggcagcttgtactattaatttttcataaatgttatatcattttcaaagagtaacagctgtgtgatttcttagctgtggacttcatcgtgggttttttatgtcttctagtaaatggtcaattattttaaatgttttatgaataatatcttgtttcttgtttaaagcttccattattttaagtttacattaagttaaaatgctgattttcaacaataatttcgatttaataatatatttttccaatttttttttacatcctataacttcctcattcttggatttaattttccatgttaatggaatacattctctgttgt

SEQ ID NO: 689645 - DNA, 1499 bp, Homo sapiens
aataaaataaaataaaattcagaccacaaaaaaaagaaagtagaatttctgttgcaatgaatgttgtaaaatgtaaacttttataaatatagagaaataaaaagtgtgaagtctctttaaaatcttagtagaatggtgctttctgatagctttgctgtcccatagtaaaaggattaatcagactgaaaacaaaatttatcctaaaagccagagaaagaacggtcctgttaggccaccttcaaaagcatggaatctaattccaccgcttactagctaaatcagcacaaaagttcaaattgcccaatcagactcacacatacaagagatgttacccactattaagcttttctaatacattcaaagatacaaataatcaagacacatgcatgaaatgaagcgttctgggacatcaatgtatttatcctggtcacttgttttctcacatttgacaagaatctttagcccagattaggagacgagacctttaagagagatgttacctcttgcaccaggacacatttcacatttgggatatcaagcacatttgttatacacagattggtgtttaagcgatgtgacattttccagggaaccatgcctcatgaatctataatttatagttttgtttatcatgatcaaacctacactggagacatctttataaaggattacccaactagaggcttgatagaagcatgaccaaaccatgggctttccttccgattttcaaggacatttcamtaccagtggattcacaaaaaaattagattgagttaactgatgtctttccttccccaggaagcactccaagccctggtaatcgggagagaaagggatcccaagccaactactttaactttttttgcctcactagctatgcaagtgtgggcaatttacttagcctagatatctatctgttttcttgtctttcacatggaaataaagggactccatgcatagatttttattattaggtggaatgcaacatgcaacttgctgagcacaatgcttggcacatagtaagtactcaaagaatattagttatcactgatagtattgttttttattggttttctgtatgaaaggagatattccccctttatcagaaaaaaaatcaaataagggaagaaaagtcagagacatagtgagtcaacgataatgttgaatacataaggcactttatatacatttgctttactgttctagcaggaaataacaatatgtcacactcagctactcaggtatcccaaaacatttccatttgagtaacagaagcttgaagattcatacactaatacaacatctctgaataatatgtttttaagttcgttgctgagaaaatccagaaatatagctcagtatctggtaacattaggggctactgaaattaaataaataaataaaaataaatttgcatcttcttttgagacttctgtcttgggaaacaataaatgaaatgagggactcatttcaaaggtgagacttttaatgaagcagta

SEQ ID NO: 689646 - DNA, 640 bp, Homo sapiens
attccgctcggttcacacagccctgcagcctgcatcctttcaagacatgcagacttttcaagctctgaagatggggagccacagttctgagaataactttggcaggaaaagtttaaaattgccagctgctgtgtctgatcccccttggtcaggccagagaggcgatggcacagaagcggaagccttcttgcctcccaacatggttttcggcccttgtggttgtacggggagaataaaaacttttaagggataagaataggaacaaacaccttggctgggacctgcagcctgggtatgtgggaagtggagctgggatggagatgccccagaaggaggtggagaaatgagtgtgtcttggggtccgccatgggctgtttccccaggctgctccccttgactgctatacgaggtgagtagacatttgacccagaagggaagtcgggaagtggaggccaagtgcatgaaggcttttgtcgtggagcacacgctgggcctcagtaccctgggagcctttgctctcagtgaccatagaaaggccagtgtgggcacctggcccagctctgggttaaataaacagtgacttttgtcacccagcaacaggcctcagcctggctgtragctctctagctctttgaggtgt

SEQ ID NO: 689647 - DNA, 572 bp, Homo sapiens
cacagttgagactttgttatagtaatttgccatcaactgaggtttaggtggttttttagacaaggagaatagcccgtgaatatcttccacagctttgaatgcttcctaaaattaggagtataaattaaagtcattgcattctataacacgaaaaaaatctaattcaaatttctatgaaacctacaacacagaaaacataaaaatagcaaataaaatacctttgtgtggttctctttactcatrtatatctattttagaaaactgccataattacaaaaacactaactccttaaacgttttaaagttctttaggaaataatgggaagtagacagagcagactcaagaaaatatttgcatattatcccatcacttcgggcaatataaagaaaaaatctagaaggatatacaacaggttatttctgagtgataagataatggatgaatatttctcttcttttaacttatggatttttttctataatgggcatgtttacttatcttctacaggtagtattttaagatgggtgtccctatagaaaaggaaacatgggcaagaacaagacatcaaatc

SEQ ID NO: 689648 - DNA, 896 bp, Homo sapiens
tgtgatttcctgtggatagccggtggtcgggagacactcgacggggtccaggcagtggtggtggcagcttggtgctttgggggacacctaaggccaggccagctaggggacagatgcccacacctgcagtcactcatcccatgcccctggacaagcaggagagggccagggtctaggagatcagggcatccaacccctcactgcacagacaggcacccaggtgctgagggaggtgcgggacatgggctgcacagagccaggtctgttctcttctcgctttgctggagaaatacctgccctctgatgactgacatctgccagaacctgcccccagccaatcacatctcttaggcaggggacttagggatttcacctctgagtcccgcagtctccactgcttcccgtaacctcagcgcagtgaccctgtgtggtcactgtctctctacttctctgctcccccatccaaagggaggggggcctctgtgacctcaggacctggcactcggcctggcacacactggatcctcaggacatgtgaggagagggagtgaatgaatgagtcagtgagtgaatgagtgagtgagtgaatgaatgaagttcaccagcttgccaacaccayggcccacggtgggaacgagacgcaccaaggtccatggtgcccagcaagctccgtggatgaaccagtgtccacgtcggggtggaacttgaccatgaaggcacttgcccagccctggctgttttgagacaccatgaggtgggtgtccacagtggagtcttgccagccccacaccagcatggaggaggagcctgccaagcagcagtccccaggagagtcagcagccttgctggacagccctgtgccccagccactttgacatacaggcagcagagaccac

SEQ ID NO: 689649 - DNA, 651 bp, Homo sapiens
tggcttgtacagtgtctcggtcacctccctggcaggctcaggcttagagtcccacagcgtcaccyggccccacagccatcttgtgctccctccagcctctctgcctgggtagaccgcgggtggggggaggcttttttgctgcaggtgaccctgtgctgggtgtgtggtctgcatgggcttgcgggcaaggcctggagctgggctggagctcacctttacagtggacactttgctgttggggttgggattttgtttcaggcaaattgacatttgtatcctcagagggcaatgtctgagcaaatccactgatcactggggtccctggcatagtgacgagggtgtggaatgtgcagggtaagtcatggtgattcgatgagaaagggacttggaggctgccttgtctaactctggcttctgggactctcccctgcatcaccctctctgggtcatccccatgaagtggagctccctactctgatcagagggaaagtccgcctctgacagaacctctgtgtcctttcctagtcccttgagtcaggcatggggatacagaatcattgaataagggtgttggacatttatatcagtgtctcattcagatgataaatggaaattctagaatcatcaaggcagctccatgcgcctctgtct

SEQ ID NO: 689650 - DNA, 651 bp, Homo sapiens
tggcttgtacagtgtctcggtcacctccctggcaggctcaggcttagagtcccacagcgtcacctggccccacagccatcttgtgctccctccagcctctctgcctgggtagaccgcgggtggggggaggcttttttgctgcaggtgacccygtgctgggtgtgtggtctgcatgggcttgcgggcaaggcctggagctgggctggagctcacctttacagtggacactttgctgttggggttgggattttgtttcaggcaaattgacatttgtatcctcagagggcaatgtctgagcaaatccactgatcactggggtccctggcatagtgacgagggtgtggaatgtgcagggtaagtcatggtgattcgatgagaaagggacttggaggctgccttgtctaactctggcttctgggactctcccctgcatcaccctctctgggtcatccccatgaagtggagctccctactctgatcagagggaaagtccgcctctgacagaacctctgtgtcctttcctagtcccttgagtcaggcatggggatacagaatcattgaataagggtgttggacatttatatcagtgtctcattcagatgataaatggaaattctagaatcatcaaggcagctccatgcgcctctgtct

SEQ ID NO: 689651 - DNA, 651 bp, Homo sapiens
tggcttgtacagtgtctcggtcacctccctggcaggctcaggcttagagtcccacagcgtcacctggccccacagccatcttgtgctccctccagcctctctgcctgggtagaccgcgggtggggggaggcttttttgctgcaggtgaccctgtgctgggtgtgtggtctgcatgggcttgcgggcaaggcctggagctgggctggagctcacctttacagtggacactttgctgttggggttgggattttgttycaggcaaattgacatttgtatcctcagagggcaatgtctgagcaaatccactgatcactggggtccctggcatagtgacgagggtgtggaatgtgcagggtaagtcatggtgattcgatgagaaagggacttggaggctgccttgtctaactctggcttctgggactctcccctgcatcaccctctctgggtcatccccatgaagtggagctccctactctgatcagagggaaagtccgcctctgacagaacctctgtgtcctttcctagtcccttgagtcaggcatggggatacagaatcattgaataagggtgttggacatttatatcagtgtctcattcagatgataaatggaaattctagaatcatcaaggcagctccatgcgcctctgtct

SEQ ID NO: 689652 - DNA, 651 bp, Homo sapiens
tggcttgtacagtgtctcggtcacctccctggcaggctcaggcttagagtcccacagcgtcacctggccccacagccatcttgtgctccctccagcctctctgcctgggtagaccgcgggtggggggaggcttttttgctgcaggtgaccctgtgctgggtgtgtggtctgcatgggcttgcgggcaaggcctggagctgggctggagctcacctttacagtggacactttgctgttggggttgggattttgtttcaggcaaattgacatttgtatcctcagagggcaatgtctgagcaaatccactgatcactggggtccctggcatagtgacgagggtgtggaatgtgcagggtaagtcatggtgattcgatgagaaagggacttggaggctgccttgtctaactctggcttctgggactctcccctgcawcaccctctctgggtcatccccatgaagtggagctccctactctgatcagagggaaagtccgcctctgacagaacctctgtgtcctttcctagtcccttgagtcaggcatggggatacagaatcattgaataagggtgttggacatttatatcagtgtctcattcagatgataaatggaaattctagaatcatcaaggcagctccatgcgcctctgtct

SEQ ID NO: 689653 - DNA, 2103 bp, Homo sapiens
accacgtcaattccagaggtgacaccactctgagtccatttctagggtctttgttctagttgagcttttcattgttaaggtctaaaatcttgtcacatggagtttttaagatttttagggatgtctattaagaaaagcatggctgcttttcccaactgttcagaattcattcagttgaaaagttacccaggatgagttcctatgtttgacttgaagagggaaggaaaaaataacacaaaaacaaaaccaaaaacgaagtgaaaacatgttcttcttgcctcttgctgactcactgttccaaccaatcaagacatcttccacctgggcctccaatttgggaggctgggagacattgcagggacgctgggagctggcctgggagaggtggagtaagaagttccaagcagagcctttgggaggcatggcgatgagcctgctaagaactcaccggagagggcaggggcaggacagggcaccctcccaagtacctgtgctcaagcaactctggtcagaagacctgcctatccggttctgctgtttacttgctgtgtggctttgggcaagccatccaacctctctgagcctcaatgtttctcagctgtcaaatggagaattcatcgtatcctcatggggttattgtcaggatgtgcgaaataggatggtgggttaaaagacgttgtcaatgtgagttgtggggacagcstactcctgtgctggttagtaagtgatgtatcatcaattccataaaagggtctgtcaggtgggctgagccacatgtgcttagaacaagtgggcattcaagatgagtgaatgttgcacttttcaacacactgttttgctattgtgtaggcataacctacgccgctgattgggtttttgcttcatggcctgggctgggagctgttctctcctgagctgagcaaccacctctcctgcagtctctgcataaacaggacccagaggagattttgcctttgtggttagcctcagcccagcctggacaagcttaatgccttagaaagaaataccctgcctcaaaaagacacctgcctctaaactggctcgagccccatcgccttctgccagccattcctctgtagctcgaaccccagcctgtctcagccagcttcgtgcattgagcagaaccttcagggtggagcccgctgaccgccttgttctttctcctcagcctgtcaaggaagtcccagaaagcacagctgacttagggaaggtctgggaaaaatctccctgcttttgggggggcaggggcgggggatgagccagggccgagaaggaactctgaagactccgtagattgctctagaccgcctcagacactctcggcgcagcgtggagaggatttgtgcaaacatttcctctgtggaccaagaggaatgcaagaggaggctgcctgcggtgcatcttggacggctagagagatgtacccctacttgtgaaggtgcacgaggaagatgaagctgggatcgagcagggcagggcctgggagaggaagcgcgggactcctgcctggcgtccacgagctgcccatgggcatccctgccccctgggggaccagtcctctctccttccacaggaagtgctctctctgggcccctgggaggcccttcctcactctggtcctgctggtttccatcaagcaagtaagagcagttcattattattattattatcagttgtatttcctgatttttttttaaagaagcaatttaggcctcatgtaagcaatttggaaaagagaaaacagtattaagaaaataatgagccgccataatcctagcattcaaaggtaatcactgttcatattttggcatattgtcctcaaaccttttctctatgcatttgtttttttttacaacagctgatattaggaagcataaaacatgttgtgtcctggtccccccaaccagccccgcatcatattataagcatttccccacgtcaatgtgagttctgcaaatagcatttacaattgctgcacatatccttctgtttgtcttcagtattctcccagctttgagtatttaggttgagcaaatccatttttctttttcctttcctttgctttcccttctgtttcctttt

SEQ ID NO: 689654 - DNA, 2103 bp, Homo sapiens
accacgtcaattccagaggtgacaccactctgagtccatttctagggtctttgttctagttgagcttttcattgttaaggtctaaaatcttgtcacatggagtttttaagatttttagggatgtctattaagaaaagcatggctgcttttcccaactgttcagaattcattcagttgaaaagttacccaggatgagttcctatgtttgacttgaagagggaaggaaaaaataacacaaaaacaaaaccaaaaacgaagtgaaaacatgttcttcttgcctcttgctgactcactgttccaaccaatcaagacatcttccacctgggcctccaatttgggaggctgggagacattgcagggacgctgggagctggcctgggagaggtggagtaagaagttccaagcagagcctttgggaggcatggcgatgagcctgctaagaactcaccggagagggcaggggcaggacagggcaccctcccaagtacctgtgctcaagcaactctggtcagaagacctgcctatccggttctgctgtttacttgctgtgtggctttgggcaagccatccaacctctctgagcctcaatgtttctcagctgtcaaatggagaattcatcgtatcctcatggggttattgtcaggatgtgcgaaataggatggtgggttaaaagacgttgtcaatgtgagttgtggggacagcctactcctgtgctggttagtaagtgatgtatcatcaattccataaaagggtctgtcaggtgggctgagccacatgtgcttagaacaagtgggcattcaagatgagtgaatgttgcacttttcaacacactgttttgctattgtgtaggcataacctacgccgctgattgggtttttgcttcatggcctgggctgggagctgttctctcctgagctgagcaaccacctctcctgcagtctctgcataaacaggacccagaggagattttgcctttgtggttagcctcagcccagcctggacaagcttaatgccttagaaagaaataccctgcctcaaaaagacacctgcctctaaactggctcgagccccatcgccttctgccagccattcctctgtagctcgaaccccagcctgtctcagccagcttcgtgcattgagcagaaccttcagggtggagcccgctgaccgccttgttctttctcctcagcctgtcaaggaagtcccagaaagcacagctgacttagggaaggtctgggaaaaatctccctgcttttgggggggcaggggcgggggatgagccagggccgagaaggaactctgaagactccgtagattgctctagaccgcctcagacactctcggcgcagcgtggagaggatttgtgcaaacatttcctctgtggaccaagaggaatgcaagaggaggctgcctgcggtgcatcttggacggctagagagatgtacccctacttgtgaaggtgcacgaggaagatgaagctgggatcgagcagggcagggcctgggagaggaagcgcgggactcctgcctggcgtccacgagctgcccatgggcatccctgccccctgggggaccagtcctctctccttccacaggaagtgctctctctgggcccctgggaggcccttcctcactctggtcctgctggtttccatcaagcaagtaagagcagttcattattattattattatcagttgtatttcctgatttttttttaaagaagcaatttaggcctcrtgtaagcaatttggaaaagagaaaacagtattaagaaaataatgagccgccataatcctagcattcaaaggtaatcactgttcatattttggcatattgtcctcaaaccttttctctatgcatttgtttttttttacaacagctgatattaggaagcataaaacatgttgtgtcctggtccccccaaccagccccgcatcatattataagcatttccccacgtcaatgtgagttctgcaaatagcatttacaattgctgcacatatccttctgtttgtcttcagtattctcccagctttgagtatttaggttgagcaaatccatttttctttttcctttcctttgctttcccttctgtttcctttt

SEQ ID NO: 689655 - DNA, 2103 bp, Homo sapiens
accacgtcaattccagaggtgacaccactctgagtccatttctagggtctttgttctagttgagcttttcattgttaaggtctaaaatcttgtcacatggagtttttaagatttttagggatgtctattaagaaaagcatggctgcttttcccaactgttcagaattcattcagttgaaaagttacccaggatgagttcctatgtttgacttgaagagggaaggaaaaaataacacaaaaacaaaaccaaaaacgaagtgaaaacatgttcttcttgcctcttgctgactcactgttccaaccaatcaagacatcttccacctgggcctccaatttgggaggctgggagacattgcagggacgctgggagctggcctgggagaggtggagtaagaagttccaagcagagcctttgggaggcatggcgatgagcctgctaagaactcaccggagagggcaggggcaggacagggcaccctcccaagtacctgtgctcaagcaactctggtcagaagacctgcctatccggttctgctgtttacttgctgtgtggctttgggcaagccatccaacctctctgagcctcaatgtttctcagctgtcaaatggagaattcatcgtatcctcatggggttattgtcaggatgtgcgaaataggatggtgggttaaaagacgttgtcaatgtgagttgtggggacagcctactcctgtgctggttagtaagtgatgtatcatcaattccataaaagggtctgtcaggtgggctgagccacatgtgcttagaacaagtgggcattcaagatgagtgaatgttgcacttttcaacacactgttttgctattgtgtaggcataacctacgccgctgattgggtttttgcttcatggcctgggctgggagctgttctctcctgagctgagcaaccacctctcctgcagtctctgcataaacaggacccagaggagattttgcctttgtggttagcctcagcccagcctggacaagcttaatgccttagaaagaaataccctgcctcaaaaagacacctgcctctaaactggctcgagccccatcgccttctgccagccattcctctgtagctcgaaccccagcctgtctcagccagcttcgtgcattgagcagaaccttcagggtggagcccgctgaccgccttgttctttctcctcagcctgtcaaggaagtcccagaaagcacagctgacttagggaaggtctgggaaaaatctccctgcttttgggggggcaggggcgggggatgagccagggccgagaaggaactctgaagactccgtagattgctctagaccgcctcagacactctcggcgcagcgtggagaggatttgtgcaaacatttcctctgtggaccaagaggaatgcaagaggaggctgcctgcggtgcatcttggacggctagagagatgtacccctacttgtgaaggtgcacgaggaagatgaagctgggatcgagcagggcagggcctgggagaggaagcgcgggactcctgcctggcgtccacgagctgcccatgggcatccctgccccctgggggaccagtcctctctccttccacaggaagtgctctctctgggcccctgggaggcccttcctcactctggtcctgctggtttccatcaagcaagtaagagcagttcattattattattattatcagttgtatttcctgatttttttttaaagaagcaatttaggcctcatgtmagcaatttggaaaagagaaaacagtattaagaaaataatgagccgccataatcctagcattcaaaggtaatcactgttcatattttggcatattgtcctcaaaccttttctctatgcatttgtttttttttacaacagctgatattaggaagcataaaacatgttgtgtcctggtccccccaaccagccccgcatcatattataagcatttccccacgtcaatgtgagttctgcaaatagcatttacaattgctgcacatatccttctgtttgtcttcagtattctcccagctttgagtatttaggttgagcaaatccatttttctttttcctttcctttgctttcccttctgtttcctttt

SEQ ID NO: 689656 - DNA, 3126 bp, Homo sapiens
tacttcatcatttttatatcagcttttcttaaacacattccttgttgccctaccctttttcatccctctggggttccagtgtcatgtatgcttactgactagttcctcttgatttcctggggagtagaggagaataaattccaacaagtgattccccatttcccaggagactactgccctcctcagtatgcccagctggccctcataaggggcctccttaccattttcttgaggaaccatttctcccatggtcctgctcaagggcttgtgcatcagactctgtcaccctaaaacaccaaaaattatgatgggggtttggaagcagacccaacttcccatcagtcagcccttcccacctcactcaggacttgagatctcttccatttgtccttgtcagacctctcctgtatcctgaacctaacacaatgttctaccggcttgtcaagtgtctcccagccctggtctctcctggctaaggggcctgggttctatggcattagaaggacagtttgctgagtcccgtgtgcctgatccacagccacatgtagctgtctgaccgtttattcatcttctgtttctctaagactctttaaaattggtgtttcagatgtattcttttcttctcaatcctcactccttcttgcaaagcaggtgacctccataatacctacagcaaaaacagatgatctcaccgtccccatttctctccatgtgagaacactgcaattgctcatctttctatcagccttggagttgaggtgtctttccatttctctgccttggtctgggttgtctcctatcctacctactgggagatccatcccagtcatcccacctcttctttatccccagccttcctcttcccaccgcctcattcttgtctactttctgatcctcacagtactaccctgaaaacaaaaatccccagaaaacccaaagtccttggctgatgtttctgcctaagtagacttcgctttgacattgcccccctttttttgagacagggtctcactgtttcccaggctgaagtgttgtggcacaatcttggctcactgcatttttgacttcctgggcttaagcaattctttcacctcaggctcccaggtatctgggactacaggcatgagcctctgtgctgggctaatttttctatttttttaaaaaaagttgctgttgagctggggtctcactatcatgcccaggcttgtctcagactcctggactcaagtgatcctgcctccctcagcctcccaagtgctgagattacaggcctgagccactgtgcctgccctgaaattgcttgttctatgagagatgttctggatgtttatcataacctaattttatccagcgggggaaaaagtgaggctccccattgcttcctctgggcctgcaacctcctgtgctgacactcagtctctaagccctgttattgtttcttcatagactctgtcatctgtctttgtcatctatttctgtttctctcccctccctctttgtccaggtctctatcatctcaaacatgggatactacctgagctttctaaccagtctcttctatttgagcccatgtgataagtagctggcaggtaaacagcactttggctgtgccacacctctgctaaaaaaacaaggatgaccctcgattccacacaggacaaagtcaaaactcctaaccttacacaggcagaaccacctacaatcagcccatatcctatttccagtcacatttcttttaaacccaagtctactccaattacttgtccccgaaacccacctaataattcctagtgtttatgccattattaatctcatctcccttttgaagtgaattttccttccagttcactcrttgaaagtgcacacatcctgctagacctgactccagcaacatctcttcctcatgttccctcctgaccttaccatctggacataacctctctctcttattgtcatactttgtgtctcttgagcattcttcctcctcccaaataaaaaaaaattattcactttattagggaattttaggtaaaatctatttgggctaaaaattcatcatttctctgtatatatctagactcagcattttctctccattctttacctttaaaaattattttgagaataaataatactgtttattagaaaaatttttagaactacagataagtaaagacaaaaaaatcttgaaacacagagatgactgttgttaatattttggtgcataacttttcagtcttttttcatggcacatatgcttattcattgatcaactactaatatttctaaccaactatgtactgaacaccaggaataaaatgacaaatcagatatacatgcattttgtcaggttgtgctcatattctattgtgtataaatataaaggtagtataaactatataaatgtaatacacatgtatagatgtatacaaatacatatgcatatacatgcttatgtatatacatacacatatatttacaaaagtgggattatgttacacattatttgtaactttctttttgtaactttctccttgatgtttttttaatcagcatgtcttaatatcataagtacatacacatcattattttcaccacctgaaccgtttttaagtatacagtacagtagtgttaactatatgcaccttcttgtgcaatagaactctagaacttttttatcttgcaaaatggaaacgctatacttagtgaacaacatctcccccttttcctcccctccaccagccctggcaactgccattctaccgtttccaaaaatttgactattttggaaactttaagtggaatcatgtaatatttgtgattttgtgactggcttatttcacttagcataatattctctagattcgttaatggcgcaacatatgacaaaatttcttttattagggtgaataatattgcattttatgtatataccacattttctttatccattcatctgtctatggattcttgaattgtttgcatatcttagctattgcaaataatgttgcagtggacactgttgtgcaaatatctcttcaaggtcctattttcaattccttttgatataaaaccagatgcaggattgttggatcatgcagtaattttgtttttaaaattttcaag

SEQ ID NO: 689657 - DNA, 3126 bp, Homo sapiens
tacttcatcatttttatatcagcttttcttaaacacattccttgttgccctaccctttttcatccctctggggttccagtgtcatgtatgcttactgactagttcctcttgatttcctggggagtagaggagaataaattccaacaagtgattccccatttcccaggagactactgccctcctcagtatgcccagctggccctcataaggggcctccttaccattttcttgaggaaccatttctcccatggtcctgctcaagggcttgtgcatcagactctgtcaccctaaaacaccaaaaattatgatgggggtttggaagcagacccaacttcccatcagtcagcccttcccacctcactcaggacttgagatctcttccatttgtccttgtcagacctctcctgtatcctgaacctaacacaatgttctaccggcttgtcaagtgtctcccagccctggtctctcctggctaaggggcctgggttctatggcattagaaggacagtttgctgagtcccgtgtgcctgatccacagccacatgtagctgtctgaccgtttattcatcttctgtttctctaagactctttaaaattggtgtttcagatgtattcttttcttctcaatcctcactccttcttgcaaagcaggtgacctccataatacctacagcaaaaacagatgatctcaccgtccccatttctctccatgtgagaacactgcaattgctcatctttctatcagccttggagttgaggtgtctttccatttctctgccttggtctgggttgtctcctatcctacctactgggagatccatcccagtcatcccacctcttctttatccccagccttcctcttcccaccgcctcattcttgtctactttctgatcctcacagtactaccctgaaaacaaaaatccccagaaaacccaaagtccttggctgatgtttctgcctaagtagacttcgctttgacattgcccccctttttttgagacagggtctcactgtttcccaggctgaagtgttgtggcacaatcttggctcactgcatttttgacttcctgggcttaagcaattctttcacctcaggctcccaggtatctgggactacaggcatgagcctctgtgctgggctaatttttctatttttttaaaaaaagttgctgttgagctggggtctcactatcatgcccaggcttgtctcagactcctggactcaagtgatcctgcctccctcagcctcccaagtgctgagattacaggcctgagccactgtgcctgccctgaaattgcttgttctatgagagatgttctggatgtttatcataacctaattttatccagcgggggaaaaagtgaggctccccattgcttcctctgggcctgcaacctcctgtgctgacactcagtctctaagccctgttattgtttcttcatagactctgtcatctgtctttgtcatctatttctgtttctctcccctccctctttgtccaggtctctatcatctcaaacatgggatactacctgagctttctaaccagtctcttctatttgagcccatgtgataagtagctggcaggtaaacagcactttggctgtgccacacctctgctaaaaaaacaaggatgaccctcgattccacacaggacaaagtcaaaactcctaaccttacacaggcagaaccacctacaatcagcccatatcctatttccagtcacatttcttttaaacccaagtctactccaattacttgtccccgaaacccacctaataattcctagtgtttatgccattattaatctcatctcccttttgaagtgaattttccttccagttcactcattgaaagtgcacacatcctgctagacctgactccagcaacatctcttcctcatgttccctcctgaccttaccatctggacataacctctctctcttattgtcatactttgtgtctcttgagcattcttcctcctcccaaataaaaaaaaattattcactttattagggaattttaggtaaaatctatttgggctaaaaattcatcatttctctgtatatatctagactcagcattttctctccattctttacctttaaaaattattttgagaataaataatactgtttattagaaaaatttttagaactacagayaagtaaagacaaaaaaatcttgaaacacagagatgactgttgttaatattttggtgcataacttttcagtcttttttcatggcacatatgcttattcattgatcaactactaatatttctaaccaactatgtactgaacaccaggaataaaatgacaaatcagatatacatgcattttgtcaggttgtgctcatattctattgtgtataaatataaaggtagtataaactatataaatgtaatacacatgtatagatgtatacaaatacatatgcatatacatgcttatgtatatacatacacatatatttacaaaagtgggattatgttacacattatttgtaactttctttttgtaactttctccttgatgtttttttaatcagcatgtcttaatatcataagtacatacacatcattattttcaccacctgaaccgtttttaagtatacagtacagtagtgttaactatatgcaccttcttgtgcaatagaactctagaacttttttatcttgcaaaatggaaacgctatacttagtgaacaacatctcccccttttcctcccctccaccagccctggcaactgccattctaccgtttccaaaaatttgactattttggaaactttaagtggaatcatgtaatatttgtgattttgtgactggcttatttcacttagcataatattctctagattcgttaatggcgcaacatatgacaaaatttcttttattagggtgaataatattgcattttatgtatataccacattttctttatccattcatctgtctatggattcttgaattgtttgcatatcttagctattgcaaataatgttgcagtggacactgttgtgcaaatatctcttcaaggtcctattttcaattccttttgatataaaaccagatgcaggattgttggatcatgcagtaattttgtttttaaaattttcaag

SEQ ID NO: 689658 - DNA, 656 bp, Homo sapiens
tgtgtctgcatgtcaagaaccactcagaagctccaagtatctgaatatttggtgccctatagacaacatatctstgtgactgtctaaatttccctaatttaattttgatgtttggcctcacaaagatgcagccaaagcctgaccagctatatcactgaatatgtcaattacagtgggatctgagggttgtaagttaaagatcatgcgttttttttttttttgtttgtttttgttttcccagactgtgtttgatgaccgcagtcacattttggtgcatgttagcccatgttttgaaaacataagagtgtttttgaaaagataaggcctactttctgaagagtgggcgtgtgtactagaggtggtcggcagtgctgcagcctgtcagtcaaaatctgccggcaatgtcattcaaggtcagagacccagtgaaccaccaatcaaagtcagcagggctgctcatgttcacttgtcagtgttggaaagaggtcacacgctcagtggtgtggctagtgtgtgaacaatgagagtattttagtggtcagaagcacattctgctacctaccccctggcaatttcaggatgcttgcctgggtttttcctatcctacagggatagaaggcagagtagtggaaaaagccaacagtgattttataact

SEQ ID NO: 689659 - DNA, 656 bp, Homo sapiens
tgtgtctgcatgtcaagaaccactcagaagctccaagtatctgaatatttggtgccctatagacaacatatctctgtgactgtctaaatttccctaatttaattttgatgtttggcctcacaaagatgcagccaaagcctgaccagctatatcactgaatatgtcaattacagtgggatctgagggttgtaagttaaagatcatgcgtttttttttttkttgtttgtttttgttttcccagactgtgtttgatgaccgcagtcacattttggtgcatgttagcccatgttttgaaaacataagagtgtttttgaaaagataaggcctactttctgaagagtgggcgtgtgtactagaggtggtcggcagtgctgcagcctgtcagtcaaaatctgccggcaatgtcattcaaggtcagagacccagtgaaccaccaatcaaagtcagcagggctgctcatgttcacttgtcagtgttggaaagaggtcacacgctcagtggtgtggctagtgtgtgaacaatgagagtattttagtggtcagaagcacattctgctacctaccccctggcaatttcaggatgcttgcctgggtttttcctatcctacagggatagaaggcagagtagtggaaaaagccaacagtgattttataact

SEQ ID NO: 689660 - DNA, 1356 bp, Homo sapiens
tcagtctgatgtgcttttgaggatgcctcttcctggctaccgctctttagaatagtcaagaaagattacatccaatgttacaaaattatatccaatgttataatacttactgaatgcccactatatgccaggtgttgggtgaaatatgaaaataaactttgtgatgaaccttgccatcataaaatttattgtctgatagggaaggcagacatgtacatgtctaattatgtgacagacagaaagagttaaatgctgttagttaaagagcaaacagaagggagagatgaactctccttttgtaggaagttccagaaacaatttttgacattagacctcatttgatttataaactaaacaatctccaaaatgtggctgccttttgctttgtttcttctagaaaaatgatgcagcaaggactttgtagctctctacaacttggttggctcagctgaaaagactctcaagtagtcctcatgggcatgtgcccagtaatgagcttagagacctgatccaagttgttataacagttgcttcacactgtcatccatgcaatagttagaagctcttctctgctctttctggcatggcctggtcttgtgtagcaaacaagttaagcttctctaagggctacgaaatgagatcagaggaaaccatcataggcaataaaacatgttgctcatctagagataaaccttttaaaawatataatgtataatatttcatattaagtctgcatcagagttaatgaatcattcttctcttaatagagatcaaagtggtacacacaccttttttgaaaagcttttttttcttgatattttgctcagttaacaagtgtgaggtaaaattattgttattagtttctattcaacctcattgaattcagttttctctcagtttttaaaaattcttttaatgaaatcaaagcacagaagttagagatctgataatagatgggatggatcttgagaagttacaggttttactcccctgcctttaattattttatatttaaactatttctaatactttcaaatccatgttgagctaatactactcgtctgggttttggtagagccacaagctcctatcttcttctttgttagtaaatataaacaatattgtattcaggtaacatgttaaatattttgacttttctttgcatgtatattcaaacacagcttctgttccagattttgcctactgtgctcatgtagcagcagttgtgtgaagcatatggtaagaaaataatagtaatcaatagtgaatgaacatgtggttcccatggtctgagggcctaaaactggggaagatgtgcaggaacgcttgcttgtcctcccctttcacacatccaca

SEQ ID NO: 689661 - DNA, 1356 bp, Homo sapiens
tcagtctgatgtgcttttgaggatgcctcttcctggctaccgctctttagaatagtcaagaaagattacatccaatgttacaaaattatatccaatgttataatacttactgaatgcccactatatgccaggtgttgggtgaaatatgaaaataaactttgtgatgaaccttgccatcataaaatttattgtctgatagggaaggcagacatgtacatgtctaattatgtgacagacagaaagagttaaatgctgttagttaaagagcaaacagaagggagagatgaactctccttttgtaggaagttccagaaacaatttttgacattagacctcatttgatttataaactaaacaatctccaaaatgtggctgccttttgctttgtttcttctagaaaaatgatgcagcaaggactttgtagctctctacaacttggttggctcagctgaaaagactctcaagtagtcctcatgggcatgtgcccagtaatgagcttagagacctgatccaagttgttataacagttgcttcacactgtcatccatgcaatagttagaagctcttctctgctctttctggcatggcctggtcttgtgtagcaaacaagttaagcttctctaagggctacgaaatgagatcagaggaaaccatcataggcaataaaacatgttgctcatctagagataaaccttttaaaatatataatgtataatatttcatattaagtctgcatcagagttaatgaatcattcttctcttaatagagatcaaagtggtacacacaccttttttgaaaagcttttttttcttgatattttgctcagttaacaagtgtgaggtaaaattattgttattagtttctattcaacctcattgaattcagttttctctcagtttttaaaaattcttttaatgaaatcaaagcacagaagttagagatctgataatagatgggatggatcttgagaagttacaggttttactcccctgcctttaattattttatatttaaactatttctaatactttcaaatccatgttgagctaatactactcgtctgggttttggtagagccacaagctcctatcttcttctttgttagtaaatataaacaatattgtattcaggtaacatgttaaatattttgacttttctttgcatgtatattcaaacacagcttctgttccagattttgcctactgtgctcatgtagcagcagttgtgtgaagcatatggtaagaaaataatagtaatcaatagtgaatgaacatgtggttcccatggtctgagggcctaaaactggggaagatgtgcaggarcgcttgcttgtcctcccctttcacacatccaca

SEQ ID NO: 689662 - DNA, 649 bp, Homo sapiens
ataaggtcataatactgcatattgatccatattctaataaaatcttcctgcaaaatttacatcttcagaataaacattattttttcacaaattttttatagataataaatacacattttcaaacttaactccaattttttctctaaatttgcagaagtttttctctgtatccctgtcaatgctgttatttgtttccttgagatttcactcatgtgttaactcaagtatctttaaacagctgactataaaatactatgtggatttcatgatttacctgctcaattatcaggccaggtggtacggggtttatcagccaagctgaattctttccaccacccatgccccttctccctgtgactcctgggaatgctttgtgaggagcagggttcagttagcagcactgccaggggtcacaggaggtaatcatgagtgcttcccatcctgtgacaacaaatgtactcccagcaatttttcttcaacaagaatcatgagacttcaaggaagtcaaaatcacccttcagttaaaaaaaaaaaaaaaggcctatcttctcattgatgagaccttcctgccataatttatgtgtggctttatcaaaaactgtatttagattcaataaatatmatttcctaaaaaatccttttggtctac

SEQ ID NO: 689663 - DNA, 1395 bp, Homo sapiens
tggcatatcagagcaggggagaatgtatgccttctggaagttatgtgccccacgaagaaaaatggaggagctgcactgagcatgactagttcatgcttccaaatttacctattataaatgcatatgtgtcattctattttctctgcactggagtttgtagagagagagagttcaaaagcattagaggaactgagtccacgttactgaggtcagtcaataagcttcatacaataaatttgaatgaataaaaggaagaacaagataattgagaagatctcactggaaaaatgtatattcagatagaaaaatcgttgtagaattgctaggtatcacccttaaaatagtgttttaagcaccaaaatttttaaaaagtattatctttaggggttgtggctaaatttacttttcaacacctctactaagctctaggcctgcctgagagtagctgaacagtagcagtatggtcaatatgcacccacaccaagcagtgctcacatgattataaatttagaattgtgcaatgaagtaccacggtattacaagaataatgacaataggggctcacatttaagagcccccttcctgtgtgccacaaatgtgctaastgattacatattaccatgtttgatcttcaaaataattctatgagttagatatcaatattcctatctataatcagggaaaacaacgctaagcaacataccacagctcataaagctgaaagcagcaaagtcagtatttgaccccagattgactgactatgaaccctgtgttcttttgcatatgccaaagtaaacacatctgtaaatattatgggactggattacgagaactctaggaccttctgactttctatgtttctgtggcccgacagtgtgaaaagctcctgctagttaaacgctaccccagatcatcgtttttcttctttcctcttttcattcttttctgtttctcttctgtttgagagttccagtgggctaattggaaagatcttgcataaatacagtaaaagtcattatgaggttatccaaaggacaaaatggggagggaaggtatggtacaagtggaaaattgttgtaagtttgaattacaacgtggttggatctgctcagggcttagcagaggaagacattatattgctaggacattgctaggttttactttaagtttactttaaattctaagatacaaagaaggctttaacttaaaaatggaagataaatatttcacaaatatgttcttatatctcataatttgaaagattaatctctgaagaaactatggagaatactgatcatcatcatcgtaagaaatattcctggcaattcttaaaacacagttgtattcccccagtttaagtagtattatgctggaaagaggagctggactttcaac

SEQ ID NO: 689664 - DNA, 1277 bp, Homo sapiens
caccagtggagggcatcttccagggaagctactgttctcctgattaaaaaaggaaaaggacagactcagttaattgatggctattgttcaaggcccttccattttcttctcattttgtgattgcaaggaagagttgcatgctaaagatagaagagsaggaagctgagaggaacattggtccttcgtgactcaggccaacattgtcacttgcttccaacagctaacccaggcttccttttactgagaaaaatgaaagccagtttagctaatccacagtggatgggcctttgttaaattccttgcatgcagtcctaacaaacctactagagctgtgatctgaacctggctttgtacctgcaaagcctgtgcatgaaccatggaagtgaggcttcccaacaccaaaagctggtccaaaaaccagtgttacacaggccaatgatcttgtcttttacactcacaagaaacacctttttaaatctcttttccaaaacctgcttggatctgattgctggaattggttggtcaattaagacacatttgagggagtaaatgctagtagtagtttagattcacctagcaagctcatctctcctgctggaaaagataataagagaccagtgaggggtaaaatgtggtatggattcatgttctgaaaaccaattcccactacagctctaactcaaagggccttaagaaagaagtagtgtccagattcttgggcaaaagcaacattaggattcagggactaaataaaacttaaataaatcattgtttccacctttccactaacatctgtccttgtccagcttttttcactgttagcaacaaaaacaataatagtttttacctactgagtatgttctatgtgctttagaatcataatctgtttaatttttaaccttcaagataaagattacaactccttgtgaaaaatgaagaaactgagcttcatagagatgaaataacatatccaagtcgcagagttgataaatggtagaggtacaattcaaactgagacctgtctcaatccaaacaccacgttcctaaccactcagctccaactactgtgtcctgttaactgaacatactttgtgttttccaacagccttgcatctgttcacaatgaacaggaatacctatactgacggccaccataacttcaaccaaattcacttcagggctcattttaagtaagatttttaagtacgattttctccacgaaaatgtttccaatctctccttctttactttttaccaaatatggagtctccttgccc

SEQ ID NO: 689665 - DNA, 1277 bp, Homo sapiens
caccagtggagggcatcttccagggaagctactgttctcctgattaaaaaaggaaaaggacagactcagttaattgatggctattgttcaaggcccttccattttcttctcattttgtgattgcaaggaagagttgcatgctaaagatagaagaggaggaagctgagaggaacattggtccttcgtgactcaggccaacattgtcacttgcttccaacagctaacccaggcttccttttactgagaaaaatgaaagccagtttagctaatccacagtggatgggcctttgttaaattccttgcatgcagtcctaacaaacctactagagctgtgatcygaacctggctttgtacctgcaaagcctgtgcatgaaccatggaagtgaggcttcccaacaccaaaagctggtccaaaaaccagtgttacacaggccaatgatcttgtcttttacactcacaagaaacacctttttaaatctcttttccaaaacctgcttggatctgattgctggaattggttggtcaattaagacacatttgagggagtaaatgctagtagtagtttagattcacctagcaagctcatctctcctgctggaaaagataataagagaccagtgaggggtaaaatgtggtatggattcatgttctgaaaaccaattcccactacagctctaactcaaagggccttaagaaagaagtagtgtccagattcttgggcaaaagcaacattaggattcagggactaaataaaacttaaataaatcattgtttccacctttccactaacatctgtccttgtccagcttttttcactgttagcaacaaaaacaataatagtttttacctactgagtatgttctatgtgctttagaatcataatctgtttaatttttaaccttcaagataaagattacaactccttgtgaaaaatgaagaaactgagcttcatagagatgaaataacatatccaagtcgcagagttgataaatggtagaggtacaattcaaactgagacctgtctcaatccaaacaccacgttcctaaccactcagctccaactactgtgtcctgttaactgaacatactttgtgttttccaacagccttgcatctgttcacaatgaacaggaatacctatactgacggccaccataacttcaaccaaattcacttcagggctcattttaagtaagatttttaagtacgattttctccacgaaaatgtttccaatctctccttctttactttttaccaaatatggagtctccttgccc

SEQ ID NO: 689666 - DNA, 583 bp, Homo sapiens
tgtgtgtgtatatatataaatataaaaacttagttttttatatatatacatatatgtatatatatatacatatatgtatatatatatatacatatatgtrtgtgtatatatatatatatatatatatatatatatatatatatatatatataaaactaagttttttggagtccttttaaatatatgtagttgtagctagctcacatgcatcacctaccacagtgcctagcacataagatacacttaataaaatgtttgttgaatgaccattcaaataaatggcttcctataagtaagatggagatgacaaggttacactatgcccacctagaacccctttgagtgccttggatgctggagggcttggtgcaacggaaagatctgtgatcagtagatctgaacttgaaacctggcttcaccattcattagctgtgacgaccttggtcaatgtatttaatctttctgcaactatttcctttaataaggtcaatactaccaaatgtgcaggtctttagtgagattatagatctgcaaagtgcttcataaagagtctgcctcatagaagaaacttggtggatgtgca

SEQ ID NO: 689667 - DNA, 583 bp, Homo sapiens
tgtgtgtgtatatatataaatataaaaacttagttttttatatatatacatatatgtatatatatatacatatatgtatatatatatatacatatatgtgtrtgtatatatatatatatatatatatatatatatatatatatatatatataaaactaagttttttggagtccttttaaatatatgtagttgtagctagctcacatgcatcacctaccacagtgcctagcacataagatacacttaataaaatgtttgttgaatgaccattcaaataaatggcttcctataagtaagatggagatgacaaggttacactatgcccacctagaacccctttgagtgccttggatgctggagggcttggtgcaacggaaagatctgtgatcagtagatctgaacttgaaacctggcttcaccattcattagctgtgacgaccttggtcaatgtatttaatctttctgcaactatttcctttaataaggtcaatactaccaaatgtgcaggtctttagtgagattatagatctgcaaagtgcttcataaagagtctgcctcatagaagaaacttggtggatgtgca

SEQ ID NO: 689668 - DNA, 583 bp, Homo sapiens
tgtgtgtgtatatatataaatataaaaacttagttttttatatatatacatatatgtatatatatatacatatatgtatatatatatatacatatatgtgtgtrtatatatatatatatatatatatatatatatatatatatatatatataaaactaagttttttggagtccttttaaatatatgtagttgtagctagctcacatgcatcacctaccacagtgcctagcacataagatacacttaataaaatgtttgttgaatgaccattcaaataaatggcttcctataagtaagatggagatgacaaggttacactatgcccacctagaacccctttgagtgccttggatgctggagggcttggtgcaacggaaagatctgtgatcagtagatctgaacttgaaacctggcttcaccattcattagctgtgacgaccttggtcaatgtatttaatctttctgcaactatttcctttaataaggtcaatactaccaaatgtgcaggtctttagtgagattatagatctgcaaagtgcttcataaagagtctgcctcatagaagaaacttggtggatgtgca

SEQ ID NO: 689669 - DNA, 583 bp, Homo sapiens
tgtgtgtgtatatatataaatataaaaacttagttttttatatatatacatatatgtatatatatatacatatatgtatatatatatatacatatatgtgtgtgtatatatayatatatatatatatatatatatatatatatatatatataaaactaagttttttggagtccttttaaatatatgtagttgtagctagctcacatgcatcacctaccacagtgcctagcacataagatacacttaataaaatgtttgttgaatgaccattcaaataaatggcttcctataagtaagatggagatgacaaggttacactatgcccacctagaacccctttgagtgccttggatgctggagggcttggtgcaacggaaagatctgtgatcagtagatctgaacttgaaacctggcttcaccattcattagctgtgacgaccttggtcaatgtatttaatctttctgcaactatttcctttaataaggtcaatactaccaaatgtgcaggtctttagtgagattatagatctgcaaagtgcttcataaagagtctgcctcatagaagaaacttggtggatgtgca

SEQ ID NO: 689670 - DNA, 583 bp, Homo sapiens
tgtgtgtgtatatatataaatataaaaacttagttttttatatatatacatatatgtatatatatatacatatatgtatatatatatatacatatatgtgtgtgtatatatatatatatrtatatatatatatatatatatatatatatataaaactaagttttttggagtccttttaaatatatgtagttgtagctagctcacatgcatcacctaccacagtgcctagcacataagatacacttaataaaatgtttgttgaatgaccattcaaataaatggcttcctataagtaagatggagatgacaaggttacactatgcccacctagaacccctttgagtgccttggatgctggagggcttggtgcaacggaaagatctgtgatcagtagatctgaacttgaaacctggcttcaccattcattagctgtgacgaccttggtcaatgtatttaatctttctgcaactatttcctttaataaggtcaatactaccaaatgtgcaggtctttagtgagattatagatctgcaaagtgcttcataaagagtctgcctcatagaagaaacttggtggatgtgca

SEQ ID NO: 689671 - DNA, 1567 bp, Homo sapiens
agacatagaaaaagttctaggaaattttaatttaacatttgtaatttgttgtggaagaatgtagaaacacagatgaatgagcttaggaaggaaatgaactagaggagaatacgtaaccacggtgattgtctagtcatttattttctataagaaacactgcttggctcacacctgtaatccaagcactttgggaggctaaagcgggcggatcacaaggtcaggagttcgagaccagcctgatggtgaaaccctgtctctactaaaaatacaaaaattagctgggcgtgatggcggttgcctgtaatcccagctactcaggagactgaggcaggagaatcgcttgaaccgggaggaggaggttgcagtgagctgagattgcaccactactctccagcctgggtggcagagcaagaccctgtctcaaaaacaaaattaataaaaaaggaaacactgctrtgggactcactgacatgaaaaccagtgacctagagtctaaagccattgcatcccattagcaattttgtcagtcatcttaaagaaaatctgaagggcaaatgaacatggtccagggtactctggaactatgaactgaatgagaaaatggaacgagaaatttgacttgctgaaatgaagaagctgacacctcacatacttttctctgagagttgtaccattggcatgaaaaatgtgagtgcagtctgaataaattgttttggtaatgttttggagttctgttctcccacacaatttcaaagactttcacttcttcccactcatcttcacctaactttccattttgtgttttaagttttgcaaacgttatatataaatacaaagtttgagcaattctgtatctaggattttatcttattgacatacttacacatgcaggtaagtatgtatgttcatccttgcagaaatatctgtaatagcaaaagaaagaaacgatgtaaacatccatcacccaggtagcatctacaagtcagagggataatatttaaaatattattcctgggcatgcttcttttctctgggtccataagcatttccagttagtttgagaagcccatctacctgagaggagagcattattagtttctgatatgcaaagtaggatcacccagcaaggtgatagcctggaaagccaggctgttatctggagagaggattttgaaaagatcattatctccctccttcaacataggaaggaaccaaaaatgatactcctgcctatgacagcaaagccacggggctgccttctatatctttcatggtagaagaagcctggagagcagaggagataagaaaaaagcctgacccttttctaccttgggaaatttggggaagaggaagtaaaggaaggaagccagtgaaataaaatctgtgtatcccagttttcccccttgctgatttttttccaggcagggaacagaaagttagttaagggaggctgaccctgaaggcagggggtattttgcttccccttctttttttttttttttgccctactcccctgctttcccttcttatgtagaatctagagatctcttgtgggactctggcccat

SEQ ID NO: 689672 - DNA, 623 bp, Homo sapiens
aagtatattgtatcataagcagttgccactgtgagcaactgaagctcaccctgcaggggagctctgggtgacagtgtagagttaggccatccagggaggagcaagctgaagtatgtcttccggttcccatttgccattggctgagggctgagggctgctcctggaagtactgaatgaatccctgtgagtctggcctgtgctatgctgtgaaaagaagactggtggagaattgcagatgggctcagtaggatgcacaggcataaactggagcagtgagagccacggagggtgtgtatcaggcaccaatagcatatgttgcattgtccccaacacacacacacacacacacacacacacacayatattctgggggctgtgcttctgtaggttgagggtaagaaactgcttgtccatttctgtaccctttgtgtcctaatgtagtactcagcacacagtaactattcagtgaacatttgttgaagtagcaagtgtagaatgattgagtgcctctgttagactgccccatcctgagttttgatttccagtgcttcctcataagcacattctgccaatcattgaggcaccttcatctgcctactcagctctcatggttcagagcgtca

SEQ ID NO: 689673 - DNA, 656 bp, Homo sapiens
taaaattggccacaggaaggaaacttttgaataagaaaggaagaagttggaaagaggcaaaagtagaatgaggaaaaggcactttggtatatgcatattaaaacaaaggcaattttgaacaataattttcaaaatgacttcattccttcattctttttagaattcctataacatttttgtcatgtagacgtttttacatatytggaaatattctgtaaacatttgttcattgtctccatgaaaactggtttttaaccatgtagaagcttttgcataaaaaaaatagaggcaagatggatttttaaacaacataagctacaaacattaagtataaggctcactgattgttaacttgtaatttgtggatcatatgttgatttttgcctgtgggattaggaaagcagtaggtagcacatgtgctattgattactttcttcaagtagttgttttttttttcaattacttctgagttgtacacttttttttctgaccttcagagtaatttataatcaatacctacttagcaggaaaaaaaatccctggatatttagtgtataataacttcagtgttcaaagtcaattgaccattataacatgacccagggctaaatgaagtgttagaaaaaaggatgttagtccagtttgttaggcctgtt

SEQ ID NO: 689674 - DNA, 2204 bp, Homo sapiens
caattcttctaatatattatgtatcatctttaagtcttggttcctgcttatcatagatgactttatattttaattttctaattgagatttggtttgtttttttctcaaaggaaatcatttatggtctgaatcttagtataatttggaatgaatttcttttatttgatatgctatattctctttatcatatttttatgtgtactctaattcaatgctttgcgactagtggattacagttgccttttacagatgtgacaagccactgatttctttagctcttgaagctgctgagcaggttatgggaaggtgggagtccccttgtctatcacccagatcagattgttagcatacaggttgataaaatgcttattttacaacttaagatgtgtctgttaattctcattttcactgtctgaagtaactggcaatgactatataagttcttttgaayacatagattaatacagcttcataatctaataactgtttatctactaataagcccattgctgccatagatattgtataagaacaaaggattatttgatgggaattctcttcccctccatcttcaaagagtatattcctcttttactcttaaatgacatttaacaatgtagaggccagataattagggaagatgaaatgagagataattggaacagtttttgttgaaatttgtcagttaaagaaaggagcaaaatgggttaacagtttgaaggaatagttgagtcaaaggagtgtgtttgtgtgtgtgtgtgtgtgtgtatttactggagtttgattatacttgttgtatcagtggaaaataggtaggaaaagaggaaagataaaagatgcaatgaaaaacttaaatggtcaataatacaaggtttatagtctcttccaactcaacaatgtagaaaacatagccatctgttaagaaggaaggttttggacagaataagattctgaaaactggtagatgcatggaaaagccacaacgagcatttgctagcaaatcattagattataccttgactaaattggacggtaatgaggttctgggaagaagtggagatgggtagtccagtgagcattgcatagacattgaaatataagactgtcttgagtaaagtgccagagggactataggctattcatgatttggggcttccctagttacaagcttggaggaaatgctcgtgagaccatcttctctcaagcattaggtcctcttgcttcctgttgggaaagaggggacagtctcccctgccatagagccacctcctgcaaactcagctgataggcttgttgcagttttcttcatttccatctgtggttttggccctactaatcctatttcaggtacagtagttgaaaaagtgaacaattgtatttagaacttgcacataataatgaatagactgcagatcatattctcttccaaagatatgctggaaacatacttcgtgagttgagtatttatcagcatagttgtcatgccaacactgggcaggccagagaggccagagcctggaatttagctaaactaataagacactagcaggtcaaatgtcagatataggaaggaggaaagagtaggtgggcggtaatgagccaagcaaaggtcatgctcaaggaacagatagtgagacatttgacctctattcttagtatttttggcacatgacagaatggagaaataatttgacatttatatggtttcatgcaggttaggaagatatccttgatggttcacacaatagtcttttggttgataagttcagatttgattttttccaacagaaaagcaagtgattgtcaaaagggctttgaagaaggtggaaatatactctcttacgcccataaattgatatagtctgattggagtgcaagttgtaagacaggggtaaattggttaagtagattttttttttttgatttccaaaaggaaaggtattttttaaagactatgaagatagcttgggggaaaggtgattttcagttataacagtaagtatgaattttgagtagtggcagttattataaagacttggcaggtctttcggtctttccagaaaatgtaaagtatatgattaggagaaaggtgatactggatagagaaacatgtttctagtatgacctgaaacatgacatgtggcagacattagatgtgaagtaatcaaggaaatgcattttaaaatctcggtgaaatgtccttt

SEQ ID NO: 689675 - DNA, 345 bp, Homo sapiens
gaagaatgagttagaagtcttaaaatggaagccttgagatggaagtaaagtaggtgtttgccaggtagacaggaaaaggacattcaaaagagaaggaatacgatgggcaaagtcataaaggcaagaaaaagcacagtacagtgtttcatttaaggaactgcaaattgttttttagctgaagaattagatcgtttgcaacagttacaagagatgggaaaaaggatataggatttagatgtcagtgaacctgatatgccgtgcgtgagagtttgaaatgtcttcctcaacacagtggaaagctgttgatgagrgcaacttgagtatatttatttgttaaaggcagga

SEQ ID NO: 689676 - DNA, 663 bp, Homo sapiens
ctggctcctcttaactctccaaagatgaatggtctgcaacagaagacttctgaccaaaatgaagggaaaggaaaggatgtgaggrtgtctagataggtgtagagggtggtggaagaaatgtagtaagagaccccagcatgggagggggaaggggaaaagagatagtctctttaatttcttgtcatttcttaaacactttttaattccccagtcttacagttttagaagtgagttaaatgaaggatgtgagactagtcttctttatttatgactaccttttatttcccctgaactttcacatactctaataaaagtgtgttttcattactcttcagcctgagtgtgttcaggttttcttgggagagtgtgggggatgcaatatttcatttatccaacatctttggtcttatttatatacatgacctgatataattttcacatgtgttaggttttaatatgttttatatttaatatacagaaaactctattaaaaggaaagggtgcggcaaagtttgagaacttgcttggattcatgtggctaatcaaagtggacctaagatttgagctgagatcaccagacagtaattcagttaacccagagttcctttgtttgtagaaacaaatctggatttggaatcagggagaggaatgtaaggtcgacag

SEQ ID NO: 689677 - DNA, 316 bp, Homo sapiens
cccacctccccacttcaagtgattctcatgcctcaacctcctgagaggctgggattacaggcacacgccaccacgaggcagtgtttcrcagtgttggccaggctggtcttgaactcctgggctcaagggatctgcctaccttgtcctcccaaagtgttaggattacaggcgtgacccactgcacccggcctcaaaaaattttatagttatttggcactgctatgacattttatttatttatttatttattttttgagacagagtcttgctctgtcgcccaggctggagtgcagtggcgcgatctcggctcactgca

SEQ ID NO: 689678 - DNA, 639 bp, Homo sapiens
gttattagaagtggctcagaaaatattttgtgattagcagtcattttcacttacagtgctttatctcttgcaggaaaaagcagttgatcctaagacacgtttacttatgtataaaatggtcaactctggaatgttggagacaatcactggctgtattagtacaggaaaggagtctgttgtctttcatgcatatggagggaggtaaatgagcaaaatatgataccatgatatgaaaacttagtctcttctccccaagattaatgaatttacacagaatcaaagataatgctgcatggcaagcagagtaatttttaaagtgttattgtagaaagtctaggcagtataggaaygtataaaaaacacagtcatcctaataccaccacccagagataatcattaataattttgggtagacttctccagtttttttcaatgcgtatattattattattattattattattttttgagatggagtttcactcttgttccccaggctggagtgcagtggcgtgatcttggctcactgcaatctctgcctcccgggttcaagcaaggtctcctatcccagcctccagagtagctgggattacaggcacatgccaccacgcctggctaatttttgtatttttagtagag

SEQ ID NO: 689679 - DNA, 594 bp, Homo sapiens
ctgcctcagcctccccggtagcggggattacaggtacacactaccatgcccggctaatttttgtatttttagtagagacggggtttcaccattttggccaggctggtctcaaattcctgaccttgtgatccaactgcctcagcctcccaaagtgctgggattacaggcgtgggccactgtgcctgggtcaaagctctggtttctgtcactctcaggttggtcaggcaatcaacaattattcmaacagtaatttgtgctagattactcagggaataaaatataagacatattttttactctcaaagagcttaagctttagctaaaaggagaacattacagtaagaaccattatggtcaatgaaagataattacataatagagtacccagttatgcaaacgagaccttatatgggataggaatagcgaatagaacaagatcattgccaggcacattcagggaagatatcataatgaagttggatctcaatctggattttaaaaataggttaaaaaaagaaatccgttggaggaccgatgggggcggatcacgaggtcaggagatcgagacgatcctggttaacacggtgaaactcc

SEQ ID NO: 689680 - DNA, 594 bp, Homo sapiens
ctgcctcagcctccccggtagcggggattacaggtacacactaccatgcccggctaatttttgtatttttagtagagacggggtttcaccattttggccaggctggtctcaaattcctgaccttgtgatccaactgcctcagcctcccaaagtgctgggattacaggcgtgggccactgtgcctgggtcaaagctctggtttctgtcactctcaggttggtcaggcaatcaacaattattcaaacagtaatttgtgctagattactcagggaataaaatataagacatattttttactctcaaagagcttaagctttagctaaaaggagaacattacagtaagaaccattatggtcaatgaaagataattacataatagagtacccagttatgcaaacgagaccttatatgggataggaatagcgaatagaacaagatcattgccaggcacattcagggaagatatcataatgaagttggatctcaatctggattttaaaaataggttaaaaaaagaaatccgttggaggaccgakgggggcggatcacgaggtcaggagatcgagacgatcctggttaacacggtgaaactcc

SEQ ID NO: 689681 - DNA, 1357 bp, Homo sapiens
tgggctgttatcctgcccagccacggtgcacacctgaccgcacactatcatcctcctacccgacttccagggcctttttccctcaaaccaagcaggtctcacttcttggggcatccccccttgcagtatatacaggatgcttctttcctcatgtgttctggtcactcacatagaatcctggacttycctcatgtagaatcctaatatttaactccatgaggtcaccaaagatgtttctccatgggaacttctgggtcagacctgaccagatgaccaagagccataaaagctgaattctgaccccacctcggatatcttattttttagacaactccagttttccctctctgtgccaggaggaagatgcattctggggcacatgttgctgccttttgcatacatatgtgagccctgataagatacttttcctcttcctagtgatgggtttctgtttttgaaaatgggccttcttggcttctggtgttttgtaacaaatacctaatgagtcatcactaaacactagctctttactgacactgtggactataacaaagaaatttaaaaccaggctccagaggcctaggggattggctaagtaaactgaggtaggtgaatgccatggaattctatatggcagttagaaagcagttatctagatggacatttcagcaacaaagacagtgtaaaaagcaaagggaaaacccagtaacatttatgtaaattacatgtctgtatcacattagtgtaggtgcttgttgggatagccagggactgatggtggtggaatctggcataaagggaaaaataagacaagacaggtggaccttatacaacaaaattgccacaggctaaagagtctgattaattcacctttctgctcctgaggttaaaaaaaaatcttgagaaacttaaatatggcatttagcatagcaaaaaaaaaaaaaaatcacaaaagcaattgattaaacatcaaagaacagggcatagacactaagattagggatgagagttagaagcaggagctagcagcacgggagacagaggagcggtaatggggccattaagtgactggcccttgaacaagaccccccaccaccatgagagggggctgccagcattacttggcaatatctattgagtgtctgttggtcaggtactaaatgagacagggctcctgccctgtgaaaaacttacagcaggctgggcgcagtggcttatgcctgtaatcccagcattttgagaggccaaggtgggaggatcacttgagcccaggagtttgagaccagcctgggtaacaaagcaagtccctttctctacaaaaaaattaaaaattaactgggcatggtggtgcacacct

SEQ ID NO: 689682 - DNA, 1188 bp, Homo sapiens
tggaatggatacagaatgaagtaaatggtggcraggaaatgcaagaaagtgggtcgaattcttcccaaacaaaggtactcttctctgtacttacttctacttttgggaagaagtgtttaatctgggacagacagaaaaatgtttggccaaaatagagttgctgcattttatagaaagataagaatagggttctttagagaacaagcatttatattctgttcctgcctcaaccacagaaattggctgtctggagatggcttccatgcttaaaagttgcattaatgaatattccttgtattacgaggatagagaaaagggtctatttattgagtttatggtctagtctacatgcagcaaacccccattcagaccatagacagatatcagttacagatatacaaagcccagatgagctatacctataccccacataaaaggaggcatgttgctcagcagggaatttggccaaaatatgatactattttccacctaatcaggactggtttattggagtacagagttctgcatggaacctatggtttagatgagatatgatcctgtgtgtgcacagaagaaacccttcagaacacaatagctggtgaaggtatggattcataaataagttgcagaggaaaaaaatgaagatgtagtcagtttagttttgcttgggtggatgtagaaagctgtgaaaatgagagggtctagataaggaagagaaatttaatagattgtgacttattttatatatgtggctccatatgtatcttctggctaaagattaagttgtaatagacaattgataaacccatacatcctcctcctatttatgtcttaattcttcaaatcagggtttcgtaaagtggttctgaatctgcaggacttaaaaaaatgttaaaaattgaaaaaacaaacaatggatccagggacaagtttgggaaatgttaaatgataccaaattaaccaagtttccttagtgcaagatatcctagaggctttactatgccagcgagccttatgaatctccaagaggggcacataatacacggcatttcttgaatttacttccatataaaactcttcccatgcaagactcacaggatttgaggttctgaaacatgctttgggagaggctgcttttcaccacctctgcttatacaaatactacacccttgactagggccattaaca

SEQ ID NO: 689683 - DNA, 1188 bp, Homo sapiens
tggaatggatacagaatgaagtaaatggtggcaaggaaatgcaagaaagtgggtcgaattcttcccaaacaaaggtactcttctctgtacttacttctacttttgggaagaagtgtttaayctgggacagacagaaaaatgtttggccaaaatagagttgctgcattttatagaaagataagaatagggttctttagagaacaagcatttatattctgttcctgcctcaaccacagaaattggctgtctggagatggcttccatgcttaaaagttgcattaatgaatattccttgtattacgaggatagagaaaagggtctatttattgagtttatggtctagtctacatgcagcaaacccccattcagaccatagacagatatcagttacagatatacaaagcccagatgagctatacctataccccacataaaaggaggcatgttgctcagcagggaatttggccaaaatatgatactattttccacctaatcaggactggtttattggagtacagagttctgcatggaacctatggtttagatgagatatgatcctgtgtgtgcacagaagaaacccttcagaacacaatagctggtgaaggtatggattcataaataagttgcagaggaaaaaaatgaagatgtagtcagtttagttttgcttgggtggatgtagaaagctgtgaaaatgagagggtctagataaggaagagaaatttaatagattgtgacttattttatatatgtggctccatatgtatcttctggctaaagattaagttgtaatagacaattgataaacccatacatcctcctcctatttatgtcttaattcttcaaatcagggtttcgtaaagtggttctgaatctgcaggacttaaaaaaatgttaaaaattgaaaaaacaaacaatggatccagggacaagtttgggaaatgttaaatgataccaaattaaccaagtttccttagtgcaagatatcctagaggctttactatgccagcgagccttatgaatctccaagaggggcacataatacacggcatttcttgaatttacttccatataaaactcttcccatgcaagactcacaggatttgaggttctgaaacatgctttgggagaggctgcttttcaccacctctgcttatacaaatactacacccttgactagggccattaaca

SEQ ID NO: 689684 - DNA, 1188 bp, Homo sapiens
tggaatggatacagaatgaagtaaatggtggcaaggaaatgcaagaaagtgggtcgaattcttcccaaacaaaggtactcttctctgtacttacttctacttttgggaagaagtgtttaatctgggacagacagaaaaatgtttggccaaaatagagttgctgcattttatagaaagataagaatagggttctttagagaacaagcatttatattctgttcctgcctcaaccacagaaattggctgtctggagatggcttccatgcttaaaagttgcattaatgaatattccttgtattacgaggatagagaaaagggtctatttattgagtttatggtctagtctacatgcagcaaacccccattcagaccatagacagatatcagttacagatatacaaagcccagatgagctatacctataccccacataaaaggaggcatrttgctcagcagggaatttggccaaaatatgatactattttccacctaatcaggactggtttattggagtacagagttctgcatggaacctatggtttagatgagatatgatcctgtgtgtgcacagaagaaacccttcagaacacaatagctggtgaaggtatggattcataaataagttgcagaggaaaaaaatgaagatgtagtcagtttagttttgcttgggtggatgtagaaagctgtgaaaatgagagggtctagataaggaagagaaatttaatagattgtgacttattttatatatgtggctccatatgtatcttctggctaaagattaagttgtaatagacaattgataaacccatacatcctcctcctatttatgtcttaattcttcaaatcagggtttcgtaaagtggttctgaatctgcaggacttaaaaaaatgttaaaaattgaaaaaacaaacaatggatccagggacaagtttgggaaatgttaaatgataccaaattaaccaagtttccttagtgcaagatatcctagaggctttactatgccagcgagccttatgaatctccaagaggggcacataatacacggcatttcttgaatttacttccatataaaactcttcccatgcaagactcacaggatttgaggttctgaaacatgctttgggagaggctgcttttcaccacctctgcttatacaaatactacacccttgactagggccattaaca

SEQ ID NO: 689685 - DNA, 1188 bp, Homo sapiens
tggaatggatacagaatgaagtaaatggtggcaaggaaatgcaagaaagtgggtcgaattcttcccaaacaaaggtactcttctctgtacttacttctacttttgggaagaagtgtttaatctgggacagacagaaaaatgtttggccaaaatagagttgctgcattttatagaaagataagaatagggttctttagagaacaagcatttatattctgttcctgcctcaaccacagaaattggctgtctggagatggcttccatgcttaaaagttgcattaatgaatattccttgtattacgaggatagagaaaagggtctatttattgagtttatggtctagtctacatgcagcaaacccccattcagaccatagacagatatcagttacagatatacaaagcccagatgagctatacctataccccacataaaaggaggcatgttgctcagcagggaatttggccaaaatatgatactattttccacctaatcaggactggtttattggagtacagagttctgcatggaacctatggtttagatgagatatgatcctgtgtgtgcacagaagaaacccttcagaacacaatagctggtgaaggtatggattcataaataagttgcagaggaaaaaaatgaagatgtagtcagtttagttttgcttgggtggatgtagaaagctgtgaaaatgagagggtctagataaggaagagaaatttaatagattgtgacttattttatatatgtggctccatatgtatcttctggctaaagattaagttgtaatagacaattgataaacccatacatcctcctcctatttatgtcttaattcttcaaatcagggtttcgtaaagtggttctgaatctgcaggacttaaaaaaatgttaaaaattgaaaaaacaaacaatggatccagggacaagtttgggaaatgttaaatgataccaaattaaccaagtttccttagtgcaagatatcctagaggctttactatgccagcgagccttatgaatctccaagaggggcacataatacacggcatttcttsaatttacttccatataaaactcttcccatgcaagactcacaggatttgaggttctgaaacatgctttgggagaggctgcttttcaccacctctgcttatacaaatactacacccttgactagggccattaaca

SEQ ID NO: 689686 - DNA, 1188 bp, Homo sapiens
tggaatggatacagaatgaagtaaatggtggcaaggaaatgcaagaaagtgggtcgaattcttcccaaacaaaggtactcttctctgtacttacttctacttttgggaagaagtgtttaatctgggacagacagaaaaatgtttggccaaaatagagttgctgcattttatagaaagataagaatagggttctttagagaacaagcatttatattctgttcctgcctcaaccacagaaattggctgtctggagatggcttccatgcttaaaagttgcattaatgaatattccttgtattacgaggatagagaaaagggtctatttattgagtttatggtctagtctacatgcagcaaacccccattcagaccatagacagatatcagttacagatatacaaagcccagatgagctatacctataccccacataaaaggaggcatgttgctcagcagggaatttggccaaaatatgatactattttccacctaatcaggactggtttattggagtacagagttctgcatggaacctatggtttagatgagatatgatcctgtgtgtgcacagaagaaacccttcagaacacaatagctggtgaaggtatggattcataaataagttgcagaggaaaaaaatgaagatgtagtcagtttagttttgcttgggtggatgtagaaagctgtgaaaatgagagggtctagataaggaagagaaatttaatagattgtgacttattttatatatgtggctccatatgtatcttctggctaaagattaagttgtaatagacaattgataaacccatacatcctcctcctatttatgtcttaattcttcaaatcagggtttcgtaaagtggttctgaatctgcaggacttaaaaaaatgttaaaaattgaaaaaacaaacaatggatccagggacaagtttgggaaatgttaaatgataccaaattaaccaagtttccttagtgcaagatatcctagaggctttactatgccagcgagccttatgaatctccaagaggggcacataatacacggcatttcttgaatttacttccatataaaactcttcccatgcaagactcacaggrtttgaggttctgaaacatgctttgggagaggctgcttttcaccacctctgcttatacaaatactacacccttgactagggccattaaca

SEQ ID NO: 689687 - DNA, 1081 bp, Homo sapiens
cccattccctcaatgagacagtcccccagccactgctctctgttcaaattccctgcgtgactgatgccctggggaagatcccttctcctaaatcttatggggatttaagaatattacttgtccagctgcagccaaagtggacatggcattgggacgcagatgtgcttgtgcttacctaaatactcattctaaagatggcaaagactgggactttcatgtattcatttccgacactctcattcccagatactgagctagaagctggtgatgcagatacaagactggtgttcccaaggaacttaaaaaaccatcctccctgtcactgtagtggctgccatgggttgactataccaagtactctgctaactgctttacttatgcaatcccacctaatcctcacagcaacccagtgaggtggctactaggattatttctttttctttttcttttttttttttttttgagacggagtttcactcttgttgcccaggctggagtgcaatggtgcgatctcggctcactgaaacctcctcctcctgggttcaagccattctcctgcctcagtgtcccaagtcgctggaatcacaggcgtccactgccatgccctgctaatttttgtatttttagtagagatggggtttcaccatgttggccaggctgatctagaactcctgatctcaggtgatccgcctgccttggcctcccaaagtactgggattacaggcatgagccacygtgcccagccagattctttcatttcacagatgatggagctagttttttgtggaagggcataaaccaagctgggagtctggtaagcagtggacattggactagaccaggcttatctgttgttaaatcccatgcccatatccattctgctactctgactttcctgttatttaactgccagtctagcagagggaaatagacaagtttacaatttttgataatcataacccagcaggaaactaaatgaactgaaagacaaatattaataatttatacaaatatccatttgagctgtatgtttcaaggaatccaaatttgtcccttcaaaagaaatactgctttcagcagg

SEQ ID NO: 689688 - DNA, 597 bp, Homo sapiens
tgtccatccatagaacgttgcttaagatggttctaacactggccatccacacaatggaataccaagtgactcgaaaaagaatgagctaggtcggtgtgtgtgggtatggaaagaattccattatacatttgtgaatgaaagaaaaattcagaacagtgtgtttggtataatcccgtttgtgcayacttttaaataaaagcatagacagaaaatatatacataaaatgtttagagaaggatagtcacaaaactattaacatttgggacaggaactggggtttatgttgagatgggagataagaagggagacatttatttctcatttgatatctctttactgccctttacaatttgttttaccatatgcatgtattaccttctttaaagtttaaacattttgaatcaatgtaacggacatggtacaagcagaaatacttgtgaaagatattttctcttttttataacttcttcttacgatcccattcacacatcaaaaatgcagaattgaggtaggttctggccacgattttattgctttgaatgggaatatcgtagaagaggttatcatctggtaactaaaaagtccattaaagaacc

SEQ ID NO: 689689 - DNA, 597 bp, Homo sapiens
tgtccatccatagaacgttgcttaagatggttctaacactggccatccacacaatggaataccaagtgactcgaaaaagaatgagctaggtcggtgtgtgtgggtatggaaagaattccattatacatttgtgaatgaaagaaaaattcagaacagtgtgtttggtataatcccgtttgtgcacacttttaaataaaagcatagacagaaaatatatacataaaatgtttagagaaggatagtcacaaaactattaacatttgggacaggaactggggtttatgttgrgatgggagataagaagggagacatttatttctcatttgatatctctttactgccctttacaatttgttttaccatatgcatgtattaccttctttaaagtttaaacattttgaatcaatgtaacggacatggtacaagcagaaatacttgtgaaagatattttctcttttttataacttcttcttacgatcccattcacacatcaaaaatgcagaattgaggtaggttctggccacgattttattgctttgaatgggaatatcgtagaagaggttatcatctggtaactaaaaagtccattaaagaacc

SEQ ID NO: 689690 - DNA, 597 bp, Homo sapiens
tgtccatccatagaacgttgcttaagatggttctaacactggccatccacacaatggaataccaagtgactcgaaaaagaatgagctaggtcggtgtgtgtgggtatggaaagaattccattatacatttgtgaatgaaagaaaaattcagaacagtgtgtttggtataatcccgtttgtgcacacttttaaataaaagcatagacagaaaatatatacataaaatgtttagagaaggatagtcacaaaactattaacatttgggacaggaactggggtttatgttgagatgggagataagaagggagacatttatttctcatttgatatctctttactgccctttacaatttgtttyaccatatgcatgtattaccttctttaaagtttaaacattttgaatcaatgtaacggacatggtacaagcagaaatacttgtgaaagatattttctcttttttataacttcttcttacgatcccattcacacatcaaaaatgcagaattgaggtaggttctggccacgattttattgctttgaatgggaatatcgtagaagaggttatcatctggtaactaaaaagtccattaaagaacc

SEQ ID NO: 689691 - DNA, 597 bp, Homo sapiens
tgtccatccatagaacgttgcttaagatggttctaacactggccatccacacaatggaataccaagtgactcgaaaaagaatgagctaggtcggtgtgtgtgggtatggaaagaattccattatacatttgtgaatgaaagaaaaattcagaacagtgtgtttggtataatcccgtttgtgcacacttttaaataaaagcatagacagaaaatatatacataaaatgtttagagaaggatagtcacaaaactattaacatttgggacaggaactggggtttatgttgagatgggagataagaagggagacatttatttctcatttgatatctctttactgccctttacaatttgttttaccatatgcatgtattaccttctttaaagtttaaacrttttgaatcaatgtaacggacatggtacaagcagaaatacttgtgaaagatattttctcttttttataacttcttcttacgatcccattcacacatcaaaaatgcagaattgaggtaggttctggccacgattttattgctttgaatgggaatatcgtagaagaggttatcatctggtaactaaaaagtccattaaagaacc

SEQ ID NO: 689692 - DNA, 1166 bp, Homo sapiens
aggttttaataaactcactgaagcaaatacatacctagatgaaaaatatgtggattgagattgaaatatgtggattggatttaaatcttaattgagatttaaattgtatataatattcaactagctaatatgaatctcaggttatctaatatcctttaactttcccatgtccaccaatttgaactaatatcaaaaggcatatgatctttgacctcaaatgcaattgttataggaaacctctgctaatgattttagccatatgattcaaagcatttgctttttctgctatttgcatacagataccagcttgtataagattcttctgtatttcttcttccgattttcaggatggaactagatttttcggcaaatgtggagggtactgtggaaagtgtcttcctcacatgactactggtctcccaattcaagtcatatgaacatttagaagggggaagtatgccctaaagaggggatattctctggaatattcaaataactggtgctcatttctttatatctcccttcccgagatttccatgtccaatatgtctctgcctttttttcagggtgctcatcagggattcaaatcactgcttaataaggtctataaaagaaatttaagagctatcttaatttattttatatctaatcaggatattttttaaagaacataataatttataatagagaataccaggattgaatgaattataccaagacagtgttgctcttaacatcttggcctggaccacacttattttatacctataaacacacatgtaaatctctgctcagttttgtactgtacaatgaaatgtttattctacttgctaaaatgaagcaagtaaatattaggataataaacattcaaaattactataaacattattgaatctttccgacaaatagcaaatcaatagttacataaaaaagcacagagccattgtactttgtactcatacagtttagataccttcttttattttttcttkaatttttgcttgtggattatggggcttcaattaaaaaatagtcctcaaaatgaggtacaaattgtgtattaaaaaggtatgtttgggttaaatagtaaataaaaaattttgtgggtataataaagatatgatataatttaatttttaaaatctacctcaaatttgattgtactt

SEQ ID NO: 689693 - DNA, 3149 bp, Homo sapiens
gggcaggtctttcccatgctttcttgtgatggtgaataagtctcatgagatctgatggctttataaaggggagtttccctgcacatgctctctctcttgcctgccaccaggtaagatgtgactttgctcctcctttgccttctcccatgattgtgaggactcccaaggcacatggaattgtgagcccattaaacctatttttctttataaattacccagtctctggtatgtctttattggtagtgtgagaacagacgaatacaccaggatacgaccaatgttaagcttaaacattctcaagtgggaaattcagaagtcatttaggaagacaataaactatatattggtaagattacaaactctggagtcaggcagcctgggatgagtcctgcctctgtttttatttaactccttcttaaatttccttctcattaaaagactgttgtaaaaattaaattcagtaatgtaaagtgtttagtgcagtgcctagcaaaaaataatctcctctccaaatctcccatttttcagctgtttgacattgggcaattaacttacttctatgtgccttaattttaattattatataaaaacaggaaaaataatacaaattttgagggagttgttaacagaattagaaaaactcatgtaaaatttctgacatttagaattaattaatggtaattgtgattaatattaagtaaatctcaattctgtaacatattattaaattaaactaaatttggcttaaggttgccctctgtaccttcaacccctttctaatgaactacaacctatgttagtaggtagacaaactaaaagcctaatttagtagtacagtatatttttggtaacttctttatctcagccaacgacagcagctgagtgtcagccaatcataggctggtaagtgatcagatcatgccccaataaggcaaatgcagaaccgtaaccaatgaagctgattctgtacctgctttgcgatttctgtctataaatgcagcctgcctacattgctgagtggtgatctctgaacctcttctggttcctgtaaaagtattttcaaattttcacattttagaagaggcaaacacccttcttctgcgttctgagctaggcaagcagaacccttaattatttgaaaaccaatttttatatttctgtattctggatgttccttttgaccctttcaaattctttttcttgttttttgtccctttgatctttggtcaatagtacaatgatttgcatctttgtcccagtaaaggaggatttcttgaagtccctcttgtcttctgttggttttccttttactaaatacaatgccatctgtcaataaacaccatctaagcatgagaaactatttttaaaagcttgctattctattgtagattacagaaaaaatatttaaaaattgacaaaggtaaaagcctacatatgttccccccaaatttaagcaaacaaaaaatgtaggctgctctctataacttcatgttctacattcatggattcagccaactgaggacctaaaatatttgggaaaaaaaccataaaaataacaacaatcaaatacacataaacaatacaatgaacaactatatatatagcatttatattatacaaagtattataagtaatctacagatgatttaaagtatatggaaggatgtgcataagttatatgcaaatataacaccattttatatcagaatttgaatttcatataagaattttggtgtcctcttgggtggggaataaatttcccacagatgctgcatgatgactgtagatgcaaacagcaagctggtatggtttcatattcaatcccaaagtcatcataagatgaccacagcagatcctttctgtttatcccacaagagtgtttcctatgcgaaaaagttcttacatccacttgggttgcggattttttgattggtttgatttgcatgctcatccatgaacctgtgctagaagaggatggaccttgctcattggtttaggcctaggttacaactccatttcttagctacacaatgggacccatcaaaccacctggtcagagaatacgaaagagttggatccctaaactaacatcaggggtgatggacagaatgaggaataaggacctcaggatagtcaacaakcaatgtttgtcactaaacattcatactacttcacaaaattagttcaagcttctctccatgactagctggcacagttaccatcacagcctgtatcagtccattctcaagctgctaataaagacatacctgacactgggtaatttataaagaaaaaagaggtttaatggactcacagttccacatggctggggaggtttcacaatcatggcagaagctgaaggagaagcaaaggcacgtcttggccggatgcggtggctcacgcctgtaatcccagcactttgggaggccgaggcgggtggatcacgaggtcaggagatcgagaccatcctggctgacatggtgaaacaccgtctctactaaaaatacaaaaaaaattaggctgggcttggtggcgggcgcctgtagtcccagctactcgggaggctgacgcaggagaatagtgtgaacccaggaggtggagtttgcagtgagccaagatcgtgccatggtactccagcctgggcaacagaatgagactccatctcaagaaaaaaaaaggtacgtcttacatggtggcaggcaagaggcttgtgcaggggaactgccctttataaaaccatcagagctcatgagacttattcactatcacaagaacagcacaggaaagacctgcccccatgattcaattacctcccactgggtctctcccatgacatgtggggatcatgggagctaaaattcaagaaaagatttgggtggggacacagccaaagcatatcacagcccctgataggcaatagacatccaagcagtgcacctacaggctttgttctcaacgtagcaggcaaagtgatcttgtaagtaggctttgtcaatcttagtgtccttctagctcatgctaagtaataaccaaatgtatgacagtgaccaaagggcccttcagagcttggtctccccattacctctctgtccttatcacctactacctctttatcacaatctctgctccaaccatgctggcctccccat

SEQ ID NO: 689694 - DNA, 628 bp, Homo sapiens
tgtgccctgaccacctcaggcatatgttgttacaacctcctaaggctgtgycacaggtgtgtgtcctcaatcttacaaaacaaactttctgcctgggtgcagtggctcacgcctgtaatcccaagactctgggaggccgaggcgggagcatcacttgacatcagaaggtcaagaccagcctggccaacatggtgaaaccccatctctactaaaaatacaaaaattagccgggcatggtggtgtgcgcctgtagtcccagctactctactcgggaggctgaggcaggagaatcacttgaacctgggaggcagatgctgcagtgagccgagattgtgccactgcactccagcctaggtgacagagtgagactctgtctaaaaaaacataaaaataaaaattaaaaaaaaataaactttctaaattaactgagacctgtctcagatattcaggttcacaaatatatggcctgaaacctgtcaagtctgccagtaaagtttgcaaatgaactcataatgattttcagttttctttgatagtgaagtaatactcaacagtgtacaaaaaaatctgtccgtacctagactcaaagtaaagtaaaagctaagcagctttaattgcaaaaacaaac

SEQ ID NO: 689695 - DNA, 2535 bp, Homo sapiens
tcattttggctagggttagcttgtgggcttaccaaaactgtgactgagacaaatgcacagtgcaggaaagagacatggatggaagtggtaaataagtaatgggcaggccacatgcagattaaatgtcagattctgacttaaaacctgccactagatgcagcttgttacttgccactcactgagagggttttgatatgagtctgcaagcagttgattgattacggtctctgtgcagtcaagcctctctgctaatgttaatctgtttttgcagccactccccattaccacctcagctccaattcagatcatcaggcattagattctcataaggaggcacaacctagatccctggcttgcacagttcacaatagggttcatgctcctatgagaatttaatgctgccaatgatctgataggatgcggagctcaggtggccatacaagccattgggagcagctgtaaatactgataaagcttctctggcttgcgtgccactcacctcctgctatgtggtccagtttctaacaggccagggatgggtaccggggattgggagctcctgctttaaagctctcagttttaaaagagtaaatgtggcagttgaaatatttttccattctgcaaagttcaggaattgttttttgccttatgtagcaatacaaatcaatttgaagtaattgtttaacactagaaaaataaaagatctatgaatttctaaaatgtgctacatatgctgtgttagcataatttaaataacttaaagttttgttaaacataatctaggtcaatgtgtcttttattaatatgtgccttttattactaatgtccaagattagggtcagttttaaataggcaaaaatttcacttttcagcacaccaaatacccaaattcattttcagtttttatttaaaaatgttcttccctaaaattattttaaaagcttatttctttaggccctgcaactagtttatattcttcaaagattttaaaacaaaatttagtgaatacacaaaaccaaatgccaactatgacattatatgctaatatacaaagaacaaaaattctgtacataccagagttaacaagttgaggcataaaacctcactacaattaaaatatatgttctgaatcagtaaaaatggagacagaaaaaggttagtttcttggttagaatatcataatgacatatactctctcatcttttaaaaatcaaagtacatgataattgatactttatatatgtaacatgtttacctattatacatttctaatttttttttttggagacagagttgcactctgtcactcaggctggagtgcaatggtgctatcttggctcactgcaacctccgcctctctggttcaggcaattatygtgcctcagcctcccaagcagctgggattacaggtgtgagccaccacaccaggctaattttttttttttttttttttttagtagagacacggttttgccatgttgaccaggctggtgatttgcctcaagtgatcggcccacctcagcctcccaaaatgctgggattacaagcataagccaaggtgcccagcatttttttctctcctttttttttttaaatttaagagatgaggtcttgctctgtagcccaggctggaatgcagtggtgcaatcatagcttcattgcagcctcaaactcctgggcttaagtgatcctcccactttaacctcccaaataaccgggattacaggcattaagccactgcacccagctctaattataatattttaataatttacacaattacatgccaaagtagaatatcctgaaacatgaacacatacttcatattctgaatttagcacttccattttaattacactttactttcttaccggttcggaagtgagatgttgatttgtgatctcctataacaagacgaccagtatgttctttctataagaaggttgaaaatgtattagcatttgagaccactaatttaaccttattgggtatctactatgtgctgaaaactattctaggcttctgggacacagtgaagacaaaagattaaattagaatctctgcctttaaggaccttacattctagcaagggtaggaatggggaagggagacaggcaaacgtaatcactatttatactatgttagaaagtactaagtgtgattaaaacaaaacagacctgagtaaggagtagagcaggttggaattttaaataagatgaatagataactagaaaattgagtcaatctaaacattttctttcctaaaggccagttaaatgagttgctttaacttcccacctgctctttctgctgcctcaagtatatctcatggagagaaagcaaatgagatttagcctgacaaaaatgaaataattgaaacttataatgtatcatataaagtgatagatcttattacagtatatcacaatcattagctatctctttactatttgacaataaactactaatctcaacttgtcaaaaagaacaatttaaaacaatcctgtactctaaacataaaaatacatatgattc

SEQ ID NO: 689696 - DNA, 1078 bp, Homo sapiens
aaaaatttgctgggtgttgtggcgcgtgcctgtaatcccagctactcaggaggctgaggtacaaaaattgcttgatcctgggaggtcaagtgttctgtgagctgagatcacaccattgcattccagcctggtcagcccagcgagattccttttcaaaaaaaaaaagaagaaagtgatatttcagtatgaggctggctaaataaattatgttacatccatacagtggaatactatgtagccattgaaaagaaagatgaagctctgtaggtactgatatggggcagtttccaaaaaaaaaaaaaaaaaaaaaagcaaggtgaatatagcatataaagtgaagtacatatattaaattgtgtctgtattaaaaagatggaaaataatcaatgtatattcatgacatatttccccaaaaatatccaagaaacccatcacagttgtagactccatggttggagtagtggtagatgggggttaggtgtactggtagcaaggaggtttttcaccatgctttttctgtcttttgaactttgaattatctgaatatattaactaaaaatttaactgtaagttaatacacaagtaagtaaaattggattttaaaaaagtcagggtcacaaatataagcagactcacacaaaaataaaatcattcgttggaaaagacatggaaaataaaaayacaaaaaggaaataaaatcacttagtaatgccatagttctgaggttatcacggttaatatctaagcataattccttctagtctctttattctagtgattttgaggatattacattttggtcttaatactttgttttcaatggttatattttagtttttgctctaatcaacagtaaagcaatatctgagtgtctcatcagtccccatatttgtgaataatttagaacctttacttttgccctgttcttccctccctgacttccaggataatataatttagagttttaaatatagattattgttattgcataaattgttatatcacatgtattttccatcaataataatatcttggcatgtgcctttaggctttttaaataatagctttactgaggtaa

SEQ ID NO: 689697 - DNA, 813 bp, Homo sapiens
  misc_feature 2, 3, 4, 5, 6, 7, 8, 9, 10, 11, 12, 13, 14, 15, 16, 17, 18,19, 20, 21, 22, 23, 24, 25, 26, 27, 28, 29, 30, 31, 32,33, 34, 35, 36, 37, 38, 39, 40, 41, 42, 43, 44, 45, 46,47, 48, 49, 50, 51, 52, 53, 54, 55, 56, 57, 58, 59, 60,61: n = A,T,C or G
  misc_feature 62, 63, 64, 65, 66, 67, 68, 69, 70, 71, 72, 73, 74, 75, 76,77, 78, 79, 80, 81, 82, 83, 84, 85, 86, 87, 88, 89, 90,91, 92, 93, 94, 95, 96, 97, 98, 99, 100, 101: n = A,T,C or G
annnnnnnnnnnnnnnnnnnnnnnnnnnnnnnnnnnnnnnnnnnnnnnnnnnnnnnnnnnnnnnnnnnnnnnnnnnnnnnnnnnnnnnnnnnnnnnnnnnnaattttaggggtagactaacatgtaaacaagtgagtgtcaaaagatgcatagtataagaaggcattaatgatataacgaagaagaaagttgtcacttttttttttttttttttgagatggagtctcactctgtcacccaggctgcagtgcagtggcacgatcttggctcactgcaagctccacctcccgggttcacaacattttcctgcctcagcctcccaagtaactgggaccacaggcgcctgccaccatgcccggccaattttttttttttttttgtatttttagtagagacgaggtttcaccgtgttagccgggatggtctcgatctcccgacctcaagatctgcccgtcttggcctcccaaagtgctgggaatacaggcgtgagaaaagtggtcacttttaattgaaggattagaagaagccccaacttaagaggtaatgcttggagtttggaaggatcagaagtagttgataatcctgcacacctatgatgtaccagcctttgtgctaggatacgttatttccagtcctgataaggtctctgcaattcattctttaytgaggtttaactatgagaaaactcaggcttggatagctgaagggcctggctgatggctctacgctgagtaagcagcagaggctggatttaaattccagaaccatcatggagactcctctaagcaaaggaagtgacattaatttgcagag

SEQ ID NO: 689698 - DNA, 547 bp, Homo sapiens
tctataagtgttctaattatatatatttcctttccatggaatcaaatgtatactgcatttacctgcgtcaaagagaaatgcttagttatttttccaattcatttaatttatctgatagaggtatgagaaagtacaagggaaaaaaaagaaagggaataaacatgatgccgagagcttctggaataacactaaactacgggatactcttccttgccaaatgcaaaaggaaraaaagcaccatctccagccttccagctcccaggctcagtccagacgctgccgatctgaacacctgcgttctgtgccacacactcatgtccccaggccctctctgcaaccggtgccaataataccccatgtgctccctgctccaatgcccccattcatccatatttacatacatgacccttaaaacagcaaaacattgaattgttcactcctctttttagtggaaattgaatatttcttaagatcctaaagtgaggcaacaggaagtacagagataagataaactgacactaacctccagcactctcctgtgtgccat

SEQ ID NO: 689699 - DNA, 674 bp, Homo sapiens
caaatagttcaaaaaaagacagtctggtttttttttgtattttttttttgagatggagtcttgctcttctgcccaggctggagtgcartggcacgatctcggctcactgcaacctctgcctcccaggttcaagtgatcttcctgcctcgtccctcctagtataggcatgcgctactatgcctggctaatttttgtatttttagaagtgacaaggtttcactatgttggccaggctggtcttgaactcctgatctcaggtgatccacctgtctcggcctcccaaagtgttgggattacaggtgtgagtcaccacacccggccaaaaacaggctctttggggacaaggtaaaaaaaaaaaaaatacaggcgtgagccactgcgcccggccctttttttcctcttttctaaattaaagttttttattgtattacattcctcgattaaacatgggtcgctgaaccgagagaagtcatattcaaagcagcccaagaagaagaaagatcccccagaactttggacttggagcttaacctgctgttaaatacatcaaattgttttgctgtgggaaagggggtgaatatattttaggtatctgtatgagggctgtgtgatttccaggaactgtcttggaatactattatgggaggagagtttgtattagactaagcagtcaa

SEQ ID NO: 689700 - DNA, 674 bp, Homo sapiens
caaatagttcaaaaaaagacagtctggtttttttttgtattttttttttgagatggagtcttgctcttctgcccaggctggagtgcagtggcacgatctcggctcactgcaacctctgcctcccaggttcaagtgatcttcctgcctcrtccctcctagtataggcatgcgctactatgcctggctaatttttgtatttttagaagtgacaaggtttcactatgttggccaggctggtcttgaactcctgatctcaggtgatccacctgtctcggcctcccaaagtgttgggattacaggtgtgagtcaccacacccggccaaaaacaggctctttggggacaaggtaaaaaaaaaaaaaatacaggcgtgagccactgcgcccggccctttttttcctcttttctaaattaaagttttttattgtattacattcctcgattaaacatgggtcgctgaaccgagagaagtcatattcaaagcagcccaagaagaagaaagatcccccagaactttggacttggagcttaacctgctgttaaatacatcaaattgttttgctgtgggaaagggggtgaatatattttaggtatctgtatgagggctgtgtgatttccaggaactgtcttggaatactattatgggaggagagtttgtattagactaagcagtcaa

SEQ ID NO: 689701 - DNA, 644 bp, Homo sapiens
tccttcacaccttgaatccaatctaaccagacattttggccaatgtgtattactctttttttttttttwaaaaaaagatactactgcaatttactgttatttttaaggaagctatgactacatatcttccaacaattatgttaaaagagtccacaaatggtgattgccaaggtgtaatttccaagacttgtaggagatctagccaagtgaaatatgacacctccaaaaggaacctggactacaatctatctgacatatgttatatacctggattcatttcttagggctgctgtaacaaagtaccagaaatttagtggcttaaaacagcagaagtgggccgggcgcggtggctcacacctgtaatcccagcactttgggaggccgaggcgggcggatcacaaggtcaggaaatcgagaccatcctggctcacacagtgaaaccccatctctactaaaaatacaaaaaattagtcgggtgtggtggcgggcacctgtagtcccagctacacagaaggctgaggcaggagaatgacgtgaacccgggaggtggggcttgcagtgagccaagatcgcaccactgcactccagcctggatgacagagcgagactccgtctcaaaaataaaacaaaagaaaaacacagaa

SEQ ID NO: 689702 - DNA, 644 bp, Homo sapiens
tccttcacaccttgaatccaatctaaccagacattttggccaatgtgtattactcttttttttttttttaaaaaaagatactactgcaatttactgttatttttaaggaagctatgactacatatcttccaacaattatgttaaaagagtccacaaatggtgattgccaaggtgtaatttccaagacttgtaggagatctagccaagtgaaatatgacacctccaaaaggaacctggactacaatctatctgacatatgttatatacctggattcatttcttagggctgctgtaacaaagtaccagaaatttagtggcttaaaacagcagaagtgggccgggcgcggtggctcacacctgtaatcccagcactttgggaggccgaggcgggcrgatcacaaggtcaggaaatcgagaccatcctggctcacacagtgaaaccccatctctactaaaaatacaaaaaattagtcgggtgtggtggcgggcacctgtagtcccagctacacagaaggctgaggcaggagaatgacgtgaacccgggaggtggggcttgcagtgagccaagatcgcaccactgcactccagcctggatgacagagcgagactccgtctcaaaaataaaacaaaagaaaaacacagaa

SEQ ID NO: 689703 - DNA, 651 bp, Homo sapiens
ttttwaaatgacctaaggaaactttaaacagggatttgatgtcagatataaaaattgaaattgggaggaaggataattttctcagtaggaggctgtgctccattttttttgtctttaaatattttagatgagtattcagaattgtaataaattatgcatgttcttttttcagaaattaaaatcacacattctgactttatgtcctggtttaggaggttgcattgtttctcaaaataggaaatgctagcatatcacaatgtgagcatattttttatgcttgaaactgttgatttaaagatcataggaaaatggggaggggaaaaatcctaatgattttggtttgtttgttcatttgtttgtgttttttcagttacagtcaacttgtttgtctttgatgttaatctgtacacgtttagcagcttctgccgtttttatggaatcaattgtgtattgctgtggaaagaagttcattgtcagcagtgcctttcaaagtagacttgctgctgttccatctacagaatttcagtggttgctccatatattgtttgaaagcttgaaacaatttccatattttcttgcccttttttactttttaggaaaaggattgaatttgttctattgttttaattatatggacattaagacatattt

SEQ ID NO: 689704 - DNA, 636 bp, Homo sapiens
cgtgtgtgctctgcaaatacatctaaaaagagaatcagttacagcaaataacattctaaytcaaactcaaacacatctaaagtaaactccaaagtacaaccttaaactctcccccaattacaggacatgaagtagtccaaaatgtcattcccagtggaggctcttccatcaacttgtttttagacatgagaatacttcataaccactgagaaaagtatcacgagaggggagaaaatacatagtaagctactttttttcattagcaaccccaaaaggctgcagcttctaactctatggtgtccgaaatccactgtaaaaaaaagtgagctcgcttcaactgtttgtttggcatctgcagaaccagtggaaccagcctggcaaatttcaccatcaccaccaacaaaaatcagcaaaaacactcctgtgtgttcagaaattggagggttaagggatgccagtaaagtccatgccctcaggaaaaacaatacttggtccttagctcttgtcaaggtaactgccaagacaaaatacccaattctgtgtattgttttctccagattaaaaaactaactcgctgggcgcggtggctcatacctgtaatcccagcactttcagaggccgaggcaggtggatcac

SEQ ID NO: 689705 - DNA, 1840 bp, Homo sapiens
ttctcacagagacactgtttatgaattgatagttttgggagaggaacatgaaaagtttttacagttcccttgatgaagtttcttagatattttatctgggtcagatttctttctattgccaaaatagactaggattttgaaaatcataagcacatacatacaggtagcttttttctctatattctgccatatgctctttcccctaatgagagaatgatcatattgaatgcatgggaaaaggtgtaatgggagtcagaaataacataccaaggaaataaaacagttaactttttcaaagcactaagcacattaacatcaacaaaaaatgatttataatgaggggaaaatatgggatgtttatatgacattatcttgttaaattaacaaaagggaaaactataaaaaacaaagactatatatatattttttccaaataatatttaatatttcatatgcactggtactcattcagcacctttttatgtaatcatatactatcgacacctttctaaaaacatcacctatagatccatgtttgttctttttaactgctatatttattccatgttatataagcaacatactgaatggtagcaatattttacaagcaaatacacattgtttccatatttattgcaattagtgtaacaaatttattgtaccaatgatatgacacatatgtttgagtagacaacgattattgtaatagtctcttctgaacaatatgaatttggatataatgggattgggaaattgatttcaatcatttttttatcttgaactgggatacattcccaaaattcctctggtccaaatatcttgtgtggcatagattggtaagaagtgtattaactacttaggagattgttgcaattactgccaccttttggaagtagccaaccacaggtcccagaaatgttctcatcaatacttaatccagaattcacaacttctaccagatggcataaaacatatcacaggttgaatttagagagatttggattgggcatctggatcaccaaaactaacctgatagctatgaatgttaactatgttaattaactttcttgatatcacttattgtgttcagatggagtttcactttgtgtctgtaagacatatttgtagaaatgagattttagggtaaatgtgtgaacacaaattaaattttgatagattctggcaaacttctctaaatatatgtataaataatatatttgctcactaaacttaattcctcctcctattctgcacgtaactatatttctcagtttcctttgcattgatcaggccatgtcactggtttcttactaaaggaaatgcagacaacagggatatgcatcacttccacagaggatcccccattatctttacagctggaaaggactccaaggtcatgagtaaagcggagctacaagaaggaaggatcctggactggaaaaacccatggataaggccacatgctgattggattttatgtaaataaatactattctattttattaaactgctgagatttttggagttgttacagaagttagccttttgaaacaatgtaatgaattttccacaacattttattggacttccttccatcaggtgatgataatgagctagaaacttagctaggaaagcacttacctcatcatcttagctttcccagtgggaatagtaccgctgagttccccaacaagacttaaaacaagggattcagacaatgcatccagagagagagaaatggagagagagcaagagagacttagctttttaaatgtcctcaacctgtcaattttctgcacatatttgaaagtattagatattaccaattaaaaaacakttt

SEQ ID NO: 689706 - DNA, 1424 bp, Homo sapiens
tggaggccattatccttggcaaagtcacataggaacagaaaaccaaatatcacatattctcacttataactgggagctaaatgacaagaacacatggacacatagagaggaagagcacacactgtggtcttttggggcatgggggatgggaggaaggagaaaatgaaaaaaaaaaaaaacctaatgcatactaggcttaatacctggctgataaaataattggtacaacaaatccccatgacacaagtttacctgtgtaagaaactggcacctgtacctctgaacttaaaataaaagttaaaataaaaatctgcaatttattattttactgttttgaagaccaggcatctaaataggtcagaaggctgcactccttcttgaggctctaagggatttttctttgctacccaaaccctcatttttaaaaatgttgttagcaaatattttacatactcattaattaataaacaattattacctttaacagtgagtcacaagtgaatcatttaaaaaggagatttccctgtgcatttcaaataaaaacttgtttcagaaatgtgatttacattcaactattttataagtatcacacagagtggttattgttgaaagggtgtacaaaattgattttacctgtatgacttatttctttatttttacatgtagttctttaataaggcctatatttagtactcactttaatactaagtgagtgcacacagagtattttaaaagagtttaaaattcacaagaatttatttaaataagatgttagagtcatgttctttattctatttacaatcaaaagacacaagcaccctggccaaatagtagagaacacaattttacatacgctatttataaatatgtctagtttttcatacccatagaaattagataaatataagtgttttcaaatctcatctgagaattttattctatgtaatacacaaagtctttgatgtcaaaggtataacactttaacactagaaagaatagtatacaaatacatacctgaagtgtaaagataagagagttaaccttaaaaaatttcaacatctgtggagattactctgatgttacaggcagaactggctattttatattcattgtatcttttaattctcatactaatctctgaaataactatcatttggactccccaagagatataaaagaaagttaagtaacttgcttacaaaataatgttccgttaatccagaattcaaaattataatactcataacacaactgtctaatttttaattaattaattaaataattggtattcataggcataattgtaaactaatgaaaactatgakgaaacaaaattatttggaacatggctttgtataaatatttaaattgtaataatttgataaccctaccaccagagacaaccaaatttgttttgttgtatt

SEQ ID NO: 689707 - DNA, 670 bp, Homo sapiens
caattgatttctgggtgtgttcctattttgtcacaatttaggaagcttgaatgtatttcttagctttttagagaagattctccttatgaaacaaacatctttctttgagctaaaaacaaaacaaaacccataggttattaaagggaagtaaaaagtatttggtgtttaagaatttcactattgtaaaagagaaacattgtgatgttagcaatgcttcctctgagactgaaaattgttcctgaactagcatcacaytcttcaacacaaataaacaaaaatataatgcaaacatattaagcccaaattcttaaggtccaatctgccatttctctaaggcaaagaaaaatttcagtgaaaaagggcagcggaactactagaagaacacggtaaaaactcaattatttttcttaataatatgttgtgtaacctaatacatctaaagtatttcaagttgtaatcaatataaaaattagatattataaataaaaatatatacacatacacatatttagtaattcttttttaaattaagtttaggcgcaaagttgtacagccaatctctaaatggattaaagatgtaaacataaaacctgaaattgtaaaactcttgaaagaaaacataggggtaaagttttatgacattggccttgacaatgatttcttggatatg

SEQ ID NO: 689708 - DNA, 570 bp, Homo sapiens
tctcatttgatctttacaataaccctgtcacccactatacaggcagagaaactgagattgcttttcttacgacgtttaggaataaagccaggactccaccctacatcccctgactccaaagctcttcagggatggtctccctaagagctcccctggtcttaactgtatagtgtctaccacagatgtagatactgaaacagaaatataatggcccaatttgttcatgtctccctgtatctgcacccttgggtactccccattgcacactgactctaggattggccatgtgacttgctttcaccagtgggacagcataggaaacaygtcacaaacagacacttgcaaagtgcatgcctcatgctgttcttggattcattccttcaactaccatgtgagtaagctcaggctggcctattggaggatgtgggacacatgggtcaatcgccctcatcaccctggccaacagctcatcagccaccagacccgtgtgtgaggccactggagtccatccagaccagccagcacacaagtgactcagctgagatcagccatgctgagcccaggccacag

SEQ ID NO: 689709 - DNA, 625 bp, Homo sapiens
cccaggtgccctgacaccaaaccttctcactggtcttatgaggtggccttgcttgaggccaggcctggatccctctctccagacagtgctggccccagtcatgytcctgtaaccagcttcatcctcttaacagctttgtgactttagcaagttactagtgcctttgtgtttttgtttgcccctctgtaaaatgggtataataatagtacctacctcatggggctatgttgaggttcacatttacatatgtaaagaacttacaagagtgcctggcacaaagtaagtgctatgtaagtaccacttcccactatacctactataacgtctcctgttataattatggtgctggttattcttgtttccatgtctcaggggaaggggcctggaggagaaaggacaggttcgtgctcttggtttcaagcccttacgttagcctcctggaggtccctttagcctgctccataggttcaggacacacaaaacaccctcttttccctgccttccttttcctgacctaagcccagcacgtggtctgtgctcattagtcggaaggttgttctcagatctacactcaaggctggttctcattctggggcaaggacagcctttctaccacagttcaatc

SEQ ID NO: 689710 - DNA, 625 bp, Homo sapiens
cccaggtgccctgacaccaaaccttctcactggtcttatgaggtggccttgcttgaggccaggcctggatccctctctccagacagtgctggccccagtcatgttcctgtaaccagcttcatcctcttaacagctttgtgactttagcaagttactagtgcctttgtgtttttgtttgcccctctgtaaaatgggtataataatagtacctacctcatggggctatgttgaggttcacatttacatatgtaaagaacttacaagagtgcctggcacaaagtaagtgctatgtaagtaccacttcccactatacctactataacgtctcctgttataattatggtgctggttattcttgtttccatgtctcaggggaaggggcctggaggagaaaggacaggttcrtgctcttggtttcaagcccttacgttagcctcctggaggtccctttagcctgctccataggttcaggacacacaaaacaccctcttttccctgccttccttttcctgacctaagcccagcacgtggtctgtgctcattagtcggaaggttgttctcagatctacactcaaggctggttctcattctggggcaaggacagcctttctaccacagttcaatc

SEQ ID NO: 689711 - DNA, 600 bp, Homo sapiens
ggtacttacattttcttcattagaagttatatgccacttcaattattaacaattatagggcaataagtttttctattattttaattgagtcgtttatctcccctaggaattttattatttggtctaagttttcaaacatactgctctaaatgcttaattttctcttactgtcttctaaaactctattatatttgtagaactgccttgatttaggcctaacgttgtttggtctgagccttctcaccaaagttttatcatttttgtgagtcttttcaaacaatcaacttttgatatkgctaatcttgcctgtgtatttttttaaatctttaatttctactttcatctttagcttcctcctacttttaaataatttgtttttttaaactatcattgaatgcttgttatttttaaatctttcttctttgatatcttaaatttccatctaagtaatgtcttagcctcatcccacaactttttttcattttgtttttgtttttgagacagggttgcactctgtaatccatgctggagtacagtgacatgatatctgcccattgcagcctcaatatcccaggctcaagtgatcctcccacctcagcc

SEQ ID NO: 689712 - DNA, 679 bp, Homo sapiens
acaccatgggctccagatctagggtcaaaaacctatcttcagaggctatatgggaagttccaagccagtctctgaaccccactaaaaatcccccatggcccttccggcctggatgtgatctttccataggcagcctccataggccaggcctacaggaacggaagaggaaagggatggaacagacaatgtctgcaggaaggcctgtgtgggtccacactccccagcgagctgcttcccttcatttacagctccactcagcaaagaggcggctccttaatgctatcaactctcccatgcttccaggacataccctgccaagtcccttccaccaacctcaatcacagaccaataaaagatcactttccagtttagtgacktctcagtgtcacagcgggtgacacaaataggattaaattcctctattcagttgctaaagagacagacaacaaagcctctcctaacacccaatctctttttcctgataggagtaaatctccccaagacaaagtgggccttgggaggcacagaactcctaatccagtttacacagggggaggacaaataggagacactgacagcatcgtgaacgtgaacttcccaatggaacaactctcctgctctccagattaaacatcacgatcccctgccgtgcatcccctgcctggggtccccagctgtg

SEQ ID NO: 689713 - DNA, 1346 bp, Homo sapiens
aacatccatcctgtccagaagctgaagttaatagcacaagctgtttctagacaatacaattattcccgaaacagtgatcacagacacatcagataccaaaaattcagtgtcacatatttgacccctataaaaaggtatgctggcttctgccaaatcttattatccaaaacataggctagttaaggttaagaaactgacattttttttgtggcaaagargatcacaataattcaaagtgtaagcatttctgacattagtttaaaaattttgtcctcatcaaagaagggcagcaagtttaataatttagattattctaagtgatatttatttaatctcttagctaagtggcaaaatacatgtaaatgatactgtagaaacattcagagctatacattgaaagataactagcaaatttgaataggattgagatgttattctatgttttctttgtctctctctacccctcccttccttcttctatcaaaatatgagatggggagaagaagcaaagcctgactactgcataaaaatgtattgacaatctcaagcttggtgtacttatctattactgttgccattgaaaatagtaactacaatttactgagcaaactgtagaccaagcattaagcaaactatggtatattatctaattctaatgttctctagaagcaaattaaggaaacaactaaaatttagaaaggctaggtaactttttaaaaattatgggtttttttcttagtttgtttttttttttgtttgtttgtgtgtttgtttcgcttttttttttttttagatggagttttgctcttgtcgcccaggaaggagtgcaacggcgcaatctcggctcactgcaacctccccatcctgggttcaagcgattctcctgcctcagcctcccgagtagctgggattacagggattaaaggtacctgcaaccacaccatacccggttaatttttgtatttttagtagagacggggtttcaccattttggccaggctggtcttgaactcctgacctcagatgattcacctgcctcgggctcccaaagtgcagggattagaggcatgagccattgggcccagcccaaattctgaattttttatagctttaatttttaatttatttagcttttatttgaagttcaggggtacaagtgcaggtttgctgcataagaaaacttgtgtcatgagagtttgttgtacagattattgcatacctcaggtattaagcctagaatccattagttattttttctgatcctctcccttctcctgccctccaccctccaaaacgtcccagtgtgtgttgtccctctctatatgtgtatgtgttctcattattta

SEQ ID NO: 689714 - DNA, 1346 bp, Homo sapiens
aacatccatcctgtccagaagctgaagttaatagcacaagctgtttctagacaatacaattattcccgaaacagtgatcacagacacatcagataccaaaaattcagtgtcacatatttgacccctataaaaaggtatgctggcttctgccaaatcttattatccaaaacataggctagttaaggttaagaaactgacattttttttgtggcaaagaggatcacaataattcaaagtgtaagcatttctgacattagtttaaaaattttgtcctcatcaaagaagggcagcaagtttaataatttagattattctaagtgatatttatttaatctcttagctaagtggcaaaatacatgtaaatgatactgtagaaacattcagagctatacattgaaagataactagcaaatttgaataggattgagatgttattctatgttttctttgtctctctctacccctcccttccttcttctatcaaaatatgagatggggagaagaagcaaagcctgactactgcataaaaatgtattgacaatctcaagcttggtgtacttatctattactgttgccattgaaaatagtaactacaatttactgagcaaactgtagaccaagcattaagcaaactatggtatattatctaattctaatgttctctagaagcaaattaaggaaacaactaaaatttagaaaggctaggtaactttttaaaaattatgggtttttttcttagtttgtttttttttttgtttgtttgtgtgtttgtttygcttttttttttttttagatggagttttgctcttgtcgcccaggaaggagtgcaacggcgcaatctcggctcactgcaacctccccatcctgggttcaagcgattctcctgcctcagcctcccgagtagctgggattacagggattaaaggtacctgcaaccacaccatacccggttaatttttgtatttttagtagagacggggtttcaccattttggccaggctggtcttgaactcctgacctcagatgattcacctgcctcgggctcccaaagtgcagggattagaggcatgagccattgggcccagcccaaattctgaattttttatagctttaatttttaatttatttagcttttatttgaagttcaggggtacaagtgcaggtttgctgcataagaaaacttgtgtcatgagagtttgttgtacagattattgcatacctcaggtattaagcctagaatccattagttattttttctgatcctctcccttctcctgccctccaccctccaaaacgtcccagtgtgtgttgtccctctctatatgtgtatgtgttctcattattta

SEQ ID NO: 689715 - DNA, 1346 bp, Homo sapiens
aacatccatcctgtccagaagctgaagttaatagcacaagctgtttctagacaatacaattattcccgaaacagtgatcacagacacatcagataccaaaaattcagtgtcacatatttgacccctataaaaaggtatgctggcttctgccaaatcttattatccaaaacataggctagttaaggttaagaaactgacattttttttgtggcaaagaggatcacaataattcaaagtgtaagcatttctgacattagtttaaaaattttgtcctcatcaaagaagggcagcaagtttaataatttagattattctaagtgatatttatttaatctcttagctaagtggcaaaatacatgtaaatgatactgtagaaacattcagagctatacattgaaagataactagcaaatttgaataggattgagatgttattctatgttttctttgtctctctctacccctcccttccttcttctatcaaaatatgagatggggagaagaagcaaagcctgactactgcataaaaatgtattgacaatctcaagcttggtgtacttatctattactgttgccattgaaaatagtaactacaatttactgagcaaactgtagaccaagcattaagcaaactatggtatattatctaattctaatgttctctagaagcaaattaaggaaacaactaaaatttagaaaggctaggtaactttttaaaaattatgggtttttttcttagtttgtttttttttttgtttgtttgtgtgtttgtttcgcttttttttttttttagatggagttttgctcttgtcgcccaggaaggagtgcaacggcgcaatctcggctcactgcaacctccccrtcctgggttcaagcgattctcctgcctcagcctcccgagtagctgggattacagggattaaaggtacctgcaaccacaccatacccggttaatttttgtatttttagtagagacggggtttcaccattttggccaggctggtcttgaactcctgacctcagatgattcacctgcctcgggctcccaaagtgcagggattagaggcatgagccattgggcccagcccaaattctgaattttttatagctttaatttttaatttatttagcttttatttgaagttcaggggtacaagtgcaggtttgctgcataagaaaacttgtgtcatgagagtttgttgtacagattattgcatacctcaggtattaagcctagaatccattagttattttttctgatcctctcccttctcctgccctccaccctccaaaacgtcccagtgtgtgttgtccctctctatatgtgtatgtgttctcattattta

SEQ ID NO: 689716 - DNA, 1346 bp, Homo sapiens
aacatccatcctgtccagaagctgaagttaatagcacaagctgtttctagacaatacaattattcccgaaacagtgatcacagacacatcagataccaaaaattcagtgtcacatatttgacccctataaaaaggtatgctggcttctgccaaatcttattatccaaaacataggctagttaaggttaagaaactgacattttttttgtggcaaagaggatcacaataattcaaagtgtaagcatttctgacattagtttaaaaattttgtcctcatcaaagaagggcagcaagtttaataatttagattattctaagtgatatttatttaatctcttagctaagtggcaaaatacatgtaaatgatactgtagaaacattcagagctatacattgaaagataactagcaaatttgaataggattgagatgttattctatgttttctttgtctctctctacccctcccttccttcttctatcaaaatatgagatggggagaagaagcaaagcctgactactgcataaaaatgtattgacaatctcaagcttggtgtacttatctattactgttgccattgaaaatagtaactacaatttactgagcaaactgtagaccaagcattaagcaaactatggtatattatctaattctaatgttctctagaagcaaattaaggaaacaactaaaatttagaaaggctaggtaactttttaaaaattatgggtttttttcttagtttgtttttttttttgtttgtttgtgtgtttgtttcgcttttttttttttttagatggagttttgctcttgtcgcccaggaaggagtgcaacggcgcaatctcggctcactgcaacctccccatcctgggttcaagcgattctcctgcctcagcctcccgagtagctgggattacagggattaaaggtacctgcaaccacaccatacccggttaatttttgtatttttagtagagacggggtttcaccattttggccaggctggtcttgaactcctgacctcagatgattcacctgcctygggctcccaaagtgcagggattagaggcatgagccattgggcccagcccaaattctgaattttttatagctttaatttttaatttatttagcttttatttgaagttcaggggtacaagtgcaggtttgctgcataagaaaacttgtgtcatgagagtttgttgtacagattattgcatacctcaggtattaagcctagaatccattagttattttttctgatcctctcccttctcctgccctccaccctccaaaacgtcccagtgtgtgttgtccctctctatatgtgtatgtgttctcattattta

SEQ ID NO: 689717 - DNA, 1885 bp, Homo sapiens
tttacactctcaaacaagtcgtggcctctgtctactgagattcaaacaaaggtccttccctattcgatcagaaggaagatgacccagatagcatgttagtgtcaccaacaggaaactgaaactcctattcaacatatttctgtggctctctgttcacacccacctataaaggattccttagtgaaacgcagccagtacctcctccacgcaacatgctgatacccaggggaagagagtgagctattctaatattttccctttggtcacataacaagtgaaaatggacaaaaaactaaagatttctgtcctcagtttgttttatgtgtgaaatgggattattaataactatctccacttcagtgaccctaactcaccacctaagttctgtatctagataacataatatataaatatataacataattaataagagtcagtcctttgaagtcagacaggaccagtttagactttgcctcctatttgcaaattaactcaggggagttatttaactttttgtaaacctgcataaaatgggaataataaattgtttattcggaggttataatagaataaagtgagaatatatataaagggattaatacagtgtccaccacttggtaagtactcaatatatagtacttagtatatatattatagatagttttgtgtttatgttatcatatggaagtattgctatttggggccttttttttttttttttttttttaagacggagtctacctcttgtcacctagactggaatgcagtggcacgatctcggctcactgcaacctctgcctcctgggttcaagcgattctcctgcctcagcctcctgagtagctgggattacaggcgcccgccaccacgcccagtgaatttttgtgtttttagtagagacagggtttcactgtgttggccaggctggtcttgatctcctgacctcgtgatctgcccaccttggcctcccaaagtgctgggattacaagcgtgagccactggacccggtgggggccattttttacccctaaaaggcaacagtttcatacggttcaacctcatatttgtgttacacacctctgtctgcttacgttgagccagaatctgcttctctataacttttaccactcaattaagatgttgtccctagggaccatacacacaatgcatcaatttctttttcccacctggaacatttcaaaagaataaactagtcacaaataagttacccaacaaaagacgattttctgctctgtgatacagtatgctggctgtgcccattattaagctattgtctgtcaactgtggactgccgtgctgctctctgctttgtgataatggagctaggagtcagctgtcctcccttctgtttgtccatctgacttcttatcaggctctgccagcagggagcaatagagaacgggagatcaagtctggaggaggaaggaggacacacgttttcctgtttgcttcctgtaagcttcttgtttatgcctgcatggtccctgtgacctctttgaccrccactgagtaccagagctccctgtcatcttacctgactctggtttgctggttgaactgccagttgatgatatctggtcctaagggtctatctgtacccacattcgttgaatacccaatgcagcatgtactgcattgtatattaggcactttttgcatattcttccttattgaattctcttaccagtcctgcaagacatgtgttcttttcctgttgcagttcttttcatgggctcagagttgttagttgtgtcacagttgggtctggctgcagaccataggcaccttctacctcatggtgcacattggggttcttgtcttgtgccacacagcctctcattcttctgtggctggttcagacatcta

SEQ ID NO: 689718 - DNA, 634 bp, Homo sapiens
caaaatgtcatattttagcatatttagagctgtcagcaactgggtcatcaacagcaaaataaccagtatggatttttcagctacgttaattagatttgcytcttagaatcgcttgtatgtaatgatgttaatcagtgaatgacattccctttagactggccagccctgcctctccagtccctgctgaagtggacaataatttgtggcctgaaatggcttcttttttatatagagtgagtgtgaactgataatcaatgctagtagctgagccaaagaaatagaggtgattgaagtgtgaagatggaaaaattagcatctcattctatcaaagttgtaggagaccagggcacaaacaccttgtgcttactaggtggaggaactggggaagcaacaggggataagggtaggttctttcacgggatccactccaataagaaaaaaaaaaaatgaactttctcctcaccttgaaaaaaaaaaaaaaaagaaaaaggctacaattactaaagaaaatgtaggtacatataaatatacatgtaaatacataaaaagagaactgcaaagagactgacagtatgtggcaaagacacagaccacagaaaaatggatccagaaaaagaagccatgaagggaataa

SEQ ID NO: 689719 - DNA, 599 bp, Homo sapiens
ttactggggtgttttttttaatcaccagcatcactgatgatttttattaccactattccagacctttcgtagtagtggagaatgtgatcatgccaaagcacttccccttctcatgtttgttttggtccctcttcattccctggctaagacttggattgccatttaccatgtctgacctttatttcccccgcaagaaaactgaagtcaggtagattgaagcacagatcctacgtccaaagttagaactctcaacaccaagtattccaaactgtyattttgctatccatattaacaaataaagtaatggatatttcattgatgactgaatctacatcaagacaattgaaaacttccagataaaaagtagaaaatccatgtattcctatttttaacaacacaaaagtgaagccagatttcaggggttcagaagatagtattgttcttaggatattttagttggccccattttaaggaaagctctttctaggccaagtcataatttatttccatctttaattaactactgaggaaaaaccttagggtaaaatgaccagccattccactggacagaacagccctgagtttgggttcttttgttt

SEQ ID NO: 689720 - DNA, 1350 bp, Homo sapiens
atagaaacattataaagatgctttcaatggtaaagagaagactcattaaagatagaatactattcacctataagcaactgacaacatagtcccatattatctagcacaaaaattgacaaaatatgaggaaaaattcaaaatccataattattacagaggatttggagtacctctatcagaaaacaataaatcaagtaggccaaaaagcatatgaagaatatggaagacttaagtaatatattaagaattgtgatctctgaaaaacagtgacccctgaagaatagattgtttccaagcacatttcaaatacttacaaaaacttgaccattccctagaccacaaagaaagtttcagcaaactcagatcctatcacatagaccagattttctgacctcgtaattccagtagaaatctatgaatttattcattttctacacatacatacacgttcgaaaatcaaaacacactctaaataattcatgagtttacatacatctgagaatgggcaagacccaattatgtctgttgtcttygtgtgattattaatagcactcttccactcactgtcaaacatgtcccagtttggttgatacgttatgtggacatcctatttaaaaggaaaattataaaacatttggaattaaatgacaagaattccctgtcaaacttctgctttactcctgaggtaataatttgagggaaaacagcctggaaaaaataaactggagtttcaactcaaagagtaggataaaaagaatcaaaagggaaatcacaggcaccaaaaaatacataaaaaggggtgacaaaagtaaagacagacactgatgaaaatgagaactattgcattagttttctgtctagctgcattcgaagctggaaagataaaaatgaagaaaagttgattgttgaaaagatgagtcaaatatatatacttctggcaagtctcatcagagaagaagaaaagaaaggtgctaaaagagaaaaatatacagtattataaatgagtgagggtgagggtaaaacttatatgttcataattttgaaagcttagaagatataaacaattttctaggaaactaccagaaattaacttaagaaaaataaacaattagaatagttcctagtctttcaataaactggccagtaggcaaaaatctctttcaaagataggagagacataagctcggacagttttttatactaattgtttaaaaatcaaacattaaagaacaaataatttcaaacttacccagatacattcagagactagaaaaagaagaaatacatcccagctcattttgaaagagcagtataacttttatatgaaaatcatcaaggacaatacaagaa

SEQ ID NO: 689721 - DNA, 1350 bp, Homo sapiens
atagaaacattataaagatgctttcaatggtaaagagaagactcattaaagatagaatactattcacctataagcaactgacaacatagtcccatattatctagcacaaaaattgacaaaatatgaggaaaaattcaaaatccataattattacagaggatttggagtacctctatcagaaaacaataaatcaagtaggccaaaaagcatatgaagaatatggaagacttaagtaatatattaagaattgtgatctctgaaaaacagtgacccctgaagaatagattgtttccaagcacatttcaaatacttacaaaaacttgaccattccctagaccacaaagaaagtttcagcaaactcagatcctatcacatagaccagattttctgacctcgtaattccagtagaaatctatgaatttattcattttctacacatacatacacgttcgaaaatcaaaacacactctaaataattcatgagtttacatacatctgagaatgggcaagacccaattatgtctgttgtcttcgtgtgattattaatagcactcttccactcactgtcaaacatgtcccagtttggttgatacgttatstggacatcctatttaaaaggaaaattataaaacatttggaattaaatgacaagaattccctgtcaaacttctgctttactcctgaggtaataatttgagggaaaacagcctggaaaaaataaactggagtttcaactcaaagagtaggataaaaagaatcaaaagggaaatcacaggcaccaaaaaatacataaaaaggggtgacaaaagtaaagacagacactgatgaaaatgagaactattgcattagttttctgtctagctgcattcgaagctggaaagataaaaatgaagaaaagttgattgttgaaaagatgagtcaaatatatatacttctggcaagtctcatcagagaagaagaaaagaaaggtgctaaaagagaaaaatatacagtattataaatgagtgagggtgagggtaaaacttatatgttcataattttgaaagcttagaagatataaacaattttctaggaaactaccagaaattaacttaagaaaaataaacaattagaatagttcctagtctttcaataaactggccagtaggcaaaaatctctttcaaagataggagagacataagctcggacagttttttatactaattgtttaaaaatcaaacattaaagaacaaataatttcaaacttacccagatacattcagagactagaaaaagaagaaatacatcccagctcattttgaaagagcagtataacttttatatgaaaatcatcaaggacaatacaagaa

SEQ ID NO: 689722 - DNA, 1350 bp, Homo sapiens
atagaaacattataaagatgctttcaatggtaaagagaagactcattaaagatagaatactattcacctataagcaactgacaacatagtcccatattatctagcacaaaaattgacaaaatatgaggaaaaattcaaaatccataattattacagaggatttggagtacctctatcagaaaacaataaatcaagtaggccaaaaagcatatgaagaatatggaagacttaagtaatatattaagaattgtgatctctgaaaaacagtgacccctgaagaatagattgtttccaagcacatttcaaatacttacaaaaacttgaccattccctagaccacaaagaaagtttcagcaaactcagatcctatcacatagaccagattttctgacctcgtaattccagtagaaatctatgaatttattcattttctacacatacatacacgttcgaaaatcaaaacacactctaaataattcatgagtttacatacatctgagaatgggcaagacccaattatgtctgttgtcttcgtgtgattattaatagcactcttccactcactgtcaaacatgtcccagtttggttgatacgttatgtggacatcctatttaaaaggaaaattataaaacatttggaattaaatgacaagaattccctgtcaaacttctgctttactcctgaggtaataatttgagggaaaacagcctggaaaaaataaactggagtttcaactcaaagagtaggataaaaagaatcaaaagggaaatcacaggcaccaaaaaatacataaaaaggggtgacaaaagtaaagacagacactgatgaaaatgagaactattgcattagttttctgtctagctgcattcgaagctggaaagataaaaatgaagaaaagttgattgttgaaaagatgagtcaaatatatatacttctggcaagtctcatcagagaagaagaaaagaaaggtgcyaaaagagaaaaatatacagtattataaatgagtgagggtgagggtaaaacttatatgttcataattttgaaagcttagaagatataaacaattttctaggaaactaccagaaattaacttaagaaaaataaacaattagaatagttcctagtctttcaataaactggccagtaggcaaaaatctctttcaaagataggagagacataagctcggacagttttttatactaattgtttaaaaatcaaacattaaagaacaaataatttcaaacttacccagatacattcagagactagaaaaagaagaaatacatcccagctcattttgaaagagcagtataacttttatatgaaaatcatcaaggacaatacaagaa

SEQ ID NO: 689723 - DNA, 1332 bp, Homo sapiens
tgggaaggaagtttgctattgctgtttcttttcagcatgggaatactgggtaaacacagtttcctgataaacatttgcccgtttgagtaatcrgctgggaagcacctcccacacagagattaggtgtaaaacgcccataccatgaaaagtgatctttccaaagctaacagtttaaacctcaacatcaatgatttaaaaaaaaagaaaaaaagttgaaaattgaggccaaacagaaactatacaatattttttttaattttttagtaaatgagattttttgatatatgcaaatgagatctttacctgatcaatattagcttaagaaaatatcagacttaaatttaaaagcaaagattcttccatgttcagaaagctaacttctcagcaccaccttgtggtaacttttacttaagccaggatgtttgtttattgtaagatttatattaatattacattgtacaatggagaaattaaaaatgtaattggaaatagctatctaacttctttatcatcaaaggggaaaattaacagtttagtataaacattttacttcatgttatcatcaaacctatattttgtggtagcctaagtaccttaatttagggatagcatggtagagaaaattttttttttttttgagacacagagtcttgctctgttgcccaggatggagtgcagtggcacaatcgtggctcactgcaacgtctgtctccctggttcaagcaattctcctgcctcagcctccctagtagctgggattacaggcgtgtgccaccgtgcccagataatttttgtatttttagtagagatggggtttcaccatgttgaccaggctggtctcgaactcctgacctcaaatgatcgcctgccttggcctcccaaagtgctgggattacagacgtgagccactgtgcccagccgagaaaaatatttttatataggagctgttccataaatagtaattaaatgaatgaatggataaacagagcataatgtgaaaacagttgcatcaagatcattgagcacagctgtcttatcccctttccaaaactaacatgaaattaactacagtaataacttttaaaaaatacatttgcgataaaaatgccatctactaaccagaaatttgaacaacccctaacatgaagtaaacagacagaattcgattgactgagaaacaaactgggagaagatcacagcccacaaaacgctgggggttgcagcagaggtaggagctgtcgtgaggtttgctccaagcaaaggggacagcaaggaaaagaagagcctcaaagtgagcaatcgtcagcctaggaccagcagaactatatggcc

SEQ ID NO: 689724 - DNA, 608 bp, Homo sapiens
tgttattattatccttttatgactataaaaaaatgaacttccaataatgaaattattgacaaaacttaccgtatacccaggaaatacactagtgtgattctattataataataatgcatttgcaaagaaataaactgaacatctatttatgttcaagtaaagaaacatttcttaaagaagcaaagttccaattttgaatccaaaattctaaatgacatttttccttttatatatcatcatcttaatcaacactgatctatcagtgcaatttgtttctccatgaaatgtttctaacttattgacatgattcttaattatttattttttggcaacaaaaatttgaatcaayagagaataaaaaatgtaggtgatcgccccaaaataagctatcaagtagattaaatttcaattaacaaatgccaatggtaaatgtttacagaggtttgaattaaagtagaaagaaaaaaaaaacaggggaatttaactgcaagatattttatgagcctaactttctctagtgaagcagtttttccggatttaattgtttatttataatgataagtcatgcatttagttcccaggatgctagctttaatgaagcaatataa

SEQ ID NO: 689725 - DNA, 1896 bp, Homo sapiens
tttaaaaatccatcttctgatctccatacctataaacacacacagatgtataaaccataccacattttaaaggtaaatcacataagagtaaaatttggcttattctggcttgattccaatcccaagaaaactgtatttgagtatttaatgtatttcataatcactagaaagttataaaataaactaacaatatggatggcaggtatgtgcattttctgagtccaggcaaactggtttgggaatgccaccttcccactgagtcctaaagtcatctcatcacgccaccttcccactgagtcctgaagtaattacacaataaagtacaattatcacaaggctcaaactcaaaggctgaaggcactggactatttgaagaagatgatgttctgacctttatgccttttatgagcctaatgtctccagcaccccaggaggaaggccctcaaagcatcctcgtctcaaaagctaccaatagagcaggcctcattccaactgctagcaatttctcagttactgactgtggaacaaccacaaaatgtatctttggatatatccaattttccctcttaacttgaaatttcacgsacatctgaatttatggctgtgacatttattgtcaccaaatagctgagttcatgcaagtggcctacggcagtgcctttttttgaggctggattacagagatattagagttccacatttatacacatacacacacacacatatatacacatatgcatgtatatgcgcactattttaaatatattttatgtttatgttatttaagcacatatttaaatgtatcctataccaaattctgactcatcagagcctcaactcattaacatttgttgctagactttaaaataaagcttttccttccaattttgcataaatcttaccttgtatttgaaacactattgaggaaaacctttgttctgcatggttctcctctcctcttaatttgtgctgactcatacaaaaccaacaagttagcaccttcaataagcaagtgcctgctttccgctcaagctttacttctctcagagcctaacgccgaatcaatagggcggtaatagatgaactggaagcaagcttgtcatacagtgcaagagagagttttagcagagagttctgaatactgtttatctggctttcatgttcaggccaaagaatgtgagaagtttttacacactgtagtgagtcgacctagaaacaaagtatttttgttctgcttcatcataaatgaaatgcaatctgaaattttaagcaagtttttaaaaatatagggtcttttttttttttgaaatggagtgtcactctgttgcccaggttggagtgcagtggcacaatctcagctcaccgtaacctccacctccaaggttcaagcgattctcctgcctcagattcccgagtagcgggattacaggtgcctaccacacccagctaatttttgtgtaaaaactatggatatttttaacttatctctgtaactcaggattttcctaacatccagtcaaaatgaaatacagtaataaactgaatactgaaagcgatgagacaatcacccataaactctaacttccagtgtttgtgtttagcagaacagcttcgttggtctgacaaaataatatataaatattgaatatgtaaacataaaatgttttatgctaataaaatacccctttaatctcttttatatgttgaacgccctgatgagactgctgaaaaatagacgtgttaacagagttacagatccagttgggtccactcaggacaaaaacaagctctggtctaatccttagcatcagaggaggtacaggacaagaaatacagcaggaaccctcctcgtctcatcataaggcctggcagtggctaccctggcacacggcttct

SEQ ID NO: 689726 - DNA, 658 bp, Homo sapiens
agtttggtcaaatatattgaataaagaggaaagcagtattttgctcatagaaagcttacatttcaaaggaaaagaaagacacataagtaggtaayttattataaatgcagatatggaaacatgctcaagattctgggccccatacaggaagaatatgttagggatgtcatcataaaagagatagtatctgagctgccttgtaaaatatccaggtacttcctatgcaggggtgaagtaaggaggggatcccaggaaaaataatagcatggtcaaaatatagacttgaaaaacattattagatgtatgtagcatttaaaacagtgtagaacttcaggattataaaggacaggcaaggaagtggtggacgataacgttggagaggtaaataggttcaattcatgaaggatgagatattcacaggtaaagagtttgaacttcatcttgtaggtgatgaagaaccatggaaaagattttcatagtagaatactattgaaaaaaatctttaggcaaaataaatttaataaagtttatttgagcaaagaacaattcataaattggatagtactttgaatcaaaaaaagattcagagtgctgtgatgcagcattgtcatattggggtggagagggggtgattcctttcctccccatcttaagggtc

SEQ ID NO: 689727 - DNA, 631 bp, Homo sapiens
tgcagattcctttgcacacaaatgacaccacaacaccaaagctctaggagcaagcagcaaattctataccttggtaattctgccaacaagatacagcattgcaagctaatttttcttttccttaaggaaaaaaagcagaaaggatagaatgaaaagctctctataagccttgacaagaaaacatactcacatatcataagagagcaataggctttagagctttctatgatttttaatgcttggttgactctacaacagccccctcagacttatcacttgccacaatatcagaagatcttggatgctgagaacagatgtaattagcatgactaactcttatagtcccaaagcttcagacatcagcagcagagaggagccaagcagacacaggatgaataatgaataatgagaaaggttgcaaaatatgctttaaaattatatgtctaatttttcttaaatccacaaaacttctgttaaatgaagytatgccatttcattaaattatctacatgttatttaagaaaaaaaaaagaaaacaactttagtataatttcaaatgtctccttcacacagacacaatcatgctcatggccctctgttgtataaagatttccccgttccaggccgggtg

SEQ ID NO: 689728 - DNA, 1746 bp, Homo sapiens
ccaactaactgaaagattctaggcttgtgatgtgtgagtgctggtggtggtggcataggttgctgtagcaaggctaagaaactgaaaacagaaatccactatattattttccacaagagagtcactccccttaattttaacataaagcagttagggccatctcagaggaactcatgcaggcagagggcattaagtgaaaagagcaagttacctgtaasagcccacacatttccctccgaggtactaaacatagaagagaatgttttctacttaatttgctattgctacattccttcctctaccttatttcaagtaatttagagcatctcagttgtctcctttttcaagctacttgtctgtggtgcaatcaaaacacatttctcagtatttatctgcacaattcatggtttcaatcaagtgttgacttctttgatacaagtaagttgataaccttggaaacctttgcactgattgtaaatagggagctgaagtctctttaccactaacaggtcagtactgtttgtttcacactaataaatgtacatgtacatatagatatatatgtgtatctatatatacatgcatacatatatatagatatgtatgtatatatacaggtatatatacatacacagacatatatacacatatatattgacttaatttttaaactttactcctacaaatttaagggaaatactgttaatgttttaaattttatcctgtgcattagcaatacctgatcgacagagttgttttaaggcttaaataataataacatataatgtacttaacacagcctaaccaaagcagacacttgctcataactccaccctcctcacttctagcagattagaaatggacatcataaatttcatactatatttgactggacagtatcaggcaaaaaatagaagtctacttcaaactatcttaaataaaaaaggaacttttttggcttttgtaaaaggaagttcagaaatggctaaagccaggtcctggattggattaaatatatcaaatctttcattctcctccctcctcttctttcttttcttccttccttcctcttccttcctcagtactggctagatactcaggaagcttatcctcaagagtggctaggatggctgccagcagctctagacttaaacttcaccagctaagcaatttcaaaatagaaaacatttctttccaatagcttcatcaagaatatcccaaaaggctggcataacctaaaagaaatagaaatcctgaaaatcattagaaaattataatcacaatgggtacattatgcctagaatactgcatggaattctggtaaattcaaatcaggaaaaagaaagctgacaaatattcaactaaaggcaattactctgacccagagtataaagaagtttccatattgggccatgaaataaagatttgactcaaacccagaaaaataagggcctgaagcttgcacataacaagcctgggcataggagaataaataaggaaaaaaaaaaaaaaggcatcttagcctcttgggaatatgacctggcaaattggtagtgtgtttgtaagaagaaaatgtgttcttattgttcatctcccacttatgagtgagaaaatgtggtgttttgttttctacacataccggggcctgtcggggagtggggggcaaagggagggagagcattaggacaaatacctaatacatgtgggcttaaaacctagatgacagattgataggtgcagcaaacc

SEQ ID NO: 689729 - DNA, 673 bp, Homo sapiens
atggtgtatacctaacaaaggctaaatcccatttttctccttttttattaggtacagaattccaaagagattaaacaagatgtgggaggcactgaggccaattacaagtcatgaggagacagtgaattcatgggaggaaggaaatgaaaggcggaggtagatgatgacagaaaggaagaatcaccactgtcagatgagagttatctctccttccacagatgacaaaaagagtccatggaatactccttgggtacagccctaccaatccaaggcttctaaaaaatcacccttttgatcaaaaagaacattcatatctttctcttccaaaacaatgyttacagactcacaccattagaaacactgatttgtctttgcacactgtcagtttttatttatgtgcatatcttaaaatactttccccaagtcttagttgacaaagaggatcgcagttctgtagttgagtttcaaggcttctgttatagttagcagggttgatgtggagcgtgaaggagcgctagagcagggatccctgggcattctgttcttggtgaaatgcgggttctctttcactcttctcaaagtcactctgtcttcattttttaaaaaagagtatttccccctgtataattcaggttgactcttaacttcttaccttttcttttcactatatagg

SEQ ID NO: 689730 - DNA, 613 bp, Homo sapiens
taaaacccttttgagaagagatgacattcaaattgagtcttcagkttgaatagcaacgtttcagatggagttggcagagtagccttccaagcacagagtagtgaaaaaaaagtttcattgtagtaaaggcaagtcatttagtgtgactagagccaatgattagtgtgactagagccaatgattagtgtggaaacgttgagctggaagcacaatgccagggtgtttgaattttcttccgcaggctgtaggacgtccttgaaggaggtagagcagaaaagtgacataatcaaattagggatctacaaagtttaaaacaagagcaatttagagaattaaagtaaagctctgagttagaaggctgttatagtaatttaatcaaaatgcaatgagggtttctaaataagaccattcagtgagaataaaaaatagggaaggcattttggaaggatatatgccagaactcattgactaactgagggtgaggaagagggagaagagaaggctaggatgaccactggctctagtgactgtgaggacaatgagcaggtgtgaagaaaaaatatgtcctatatcggtttgccaaggtgttgtaatgttccctgatttctttcca

SEQ ID NO: 689731 - DNA, 613 bp, Homo sapiens
taaaacccttttgagaagagatgacattcaaattgagtcttcaggttgaatagcaacrtttcagatggagttggcagagtagccttccaagcacagagtagtgaaaaaaaagtttcattgtagtaaaggcaagtcatttagtgtgactagagccaatgattagtgtgactagagccaatgattagtgtggaaacgttgagctggaagcacaatgccagggtgtttgaattttcttccgcaggctgtaggacgtccttgaaggaggtagagcagaaaagtgacataatcaaattagggatctacaaagtttaaaacaagagcaatttagagaattaaagtaaagctctgagttagaaggctgttatagtaatttaatcaaaatgcaatgagggtttctaaataagaccattcagtgagaataaaaaatagggaaggcattttggaaggatatatgccagaactcattgactaactgagggtgaggaagagggagaagagaaggctaggatgaccactggctctagtgactgtgaggacaatgagcaggtgtgaagaaaaaatatgtcctatatcggtttgccaaggtgttgtaatgttccctgatttctttcca

SEQ ID NO: 689732 - DNA, 613 bp, Homo sapiens
taaaacccttttgagaagagatgacattcaaattgagtcttcaggttgaatagcaacgtttcagatggagttggcagagtagccttccaagcacagagtagtgaaaaaaaagtttcattgtagtaaaggcaagtcatttagtgtgactagagccaatgattagtgtgactagagccaatgattagtgtggaaacgttgagctggaagcacaatgccagggtgtttgaattttcttccgcaggctgtaggacgtccttgaaggaggtagagcagaaaagtgacataatcaaattagggatctacaaagtttaaaacaagagcaatttagagaattaaagtaaagctctgagttagaaggctgttatagtaatttaatcaaaatgyaatgagggtttctaaataagaccattcagtgagaataaaaaatagggaaggcattttggaaggatatatgccagaactcattgactaactgagggtgaggaagagggagaagagaaggctaggatgaccactggctctagtgactgtgaggacaatgagcaggtgtgaagaaaaaatatgtcctatatcggtttgccaaggtgttgtaatgttccctgatttctttcca

SEQ ID NO: 689733 - DNA, 657 bp, Homo sapiens
tcagagagccagatggagaagtcaatgtgtctccgaagagaagatccaaaagcagaggctgcaagaacgatgaacaagagccaggaatcggagtccaataagtcaggataaaagggaaagaggtaagcttgaggtaagatggcracttgaacaaagtatatcacctcctgcccggccccttgtgatagtgacacaatgattttgaaaatggtgaaaaagttctgtcaacacttgaacaacagaaaattcccccacatgtcataacttcaaagagttacagctgaggtggaacaagatgataataagtacaggaggtcttggggaaaccccagcaacatcctccaagttggaaggccacatatcaaagaaaaggacggatggtggagcaagcaggaagcatgtcccagggaagcacaattacttggaagcaactatgccatgaccccaagagtgcaggctgaccttcctaatggagagttggtggcggctgggctggatgatgtgacgggcagaagaaactggaaagaacggccaccacttgtgcccagagtagaaggttgagccacatcaaaatcttggacatagatatttggcccctggaaaacagtcagcagagattcaacatgtagataaatgcttagaactgaactcatatca

SEQ ID NO: 689734 - DNA, 657 bp, Homo sapiens
tcagagagccagatggagaagtcaatgtgtctccgaagagaagatccaaaagcagaggctgcaagaacgatgaacaagagccaggaatcggagtccaataagtcaggataaaagggaaagaggtaagcttgaggtaagatggcgacttgaacaaagtatatcacctcctgcccggccccttgtgatagtgacacaatgattttgaaaatggtgaaaaagttctgtcaacacttgaacaacagaaaattcccccacatgtcataacttcaaagagttacagctgaggtggaacaagatgataataagtacaggaggtcttggggaaaccccagcaacatcctccaagttggaaggccacatatcaaagaaaaggacggatggtggagcaagcaggaagcatgtcccagggaagcacaattacttggaagcaactatgccatgaccccaagagtgcaggctgaccttcctaatggagagttggtggcggctgggctggatgatgtgacgggcrgaagaaactggaaagaacggccaccacttgtgcccagagtagaaggttgagccacatcaaaatcttggacatagatatttggcccctggaaaacagtcagcagagattcaacatgtagataaatgcttagaactgaactcatatca

SEQ ID NO: 689735 - DNA, 657 bp, Homo sapiens
tcagagagccagatggagaagtcaatgtgtctccgaagagaagatccaaaagcagaggctgcaagaacgatgaacaagagccaggaatcggagtccaataagtcaggataaaagggaaagaggtaagcttgaggtaagatggcgacttgaacaaagtatatcacctcctgcccggccccttgtgatagtgacacaatgattttgaaaatggtgaaaaagttctgtcaacacttgaacaacagaaaattcccccacatgtcataacttcaaagagttacagctgaggtggaacaagatgataataagtacaggaggtcttggggaaaccccagcaacatcctccaagttggaaggccacatatcaaagaaaaggacggatggtggagcaagcaggaagcatgtcccagggaagcacaattacttggaagcaactatgccatgaccccaagagtgcaggctgaccttcctaatggagagttggtggcggctgggctggatgatgtgacgggcagaagaaactggaaagaacggccaccacttgtgcccagagtagaaggttgagccacatcaaaatcttggacatagatatttggcccctggaaaacagtcagcagagattcaacaygtagataaatgcttagaactgaactcatatca

SEQ ID NO: 689736 - DNA, 642 bp, Homo sapiens
tgtatcattattttattcatttcattttctcataatactgcaacaatacttcaaaagtgaaaaatcaggccaaacaccagtgaatctaattgtaacgaacctataacttttatctgcattggaatgtctcaagtgttatattacttgacattatctatttacattcttttagtagtgaaatgctcagttcattttgaaaattaaataaaaatgtaaatacaacacaaaatgtggttttcccaggcaagcaatatgctattttactgtttgtcacatactcacagtagaaataaaaccatatgtatatatatataatcatgaaggttcatgttacttgttttgacagtgtttaacaaagtatttgagattgtgatattagcacatgttctaatcagtcaaatatttattcatgtcagaaataacaaagactctgcattctagacaatgggttatcccattatctggtataaccacccttaagataaagcaaacctcttttgagacaaattaagaaaataaaggatgtttgaacagacatgctgctttaagtrggagttagatgactacctaaatgcatattatctttttaatgaaaagacaacttttgtaggcttccttaattgtaagtgaacagaatttcct

SEQ ID NO: 689737 - DNA, 624 bp, Homo sapiens
ggttgtgatttgctatgcagcaccaagtccacaagcagcggggcccccttaaggggttgcctttgagagtgggacataaatccaaaatctcctatggaagtccaggagtcaaatattctcctcaaaccacaaaaatgtccctcctacttggctatttcaccccatccggaaagaagctaccatttggcctttacatgcrtcagctcatcctattcccacaaatggtcccatgatgtcctactctacagattgggaggcagaggccctgggggtctgggaggtaacttggcaacaaggacacatctctgctaagtggcagatacacaatgatatttttattcatttcacacacatttattgagattgtgatctgagacactcccttatcaaccaagatggatcctaaggttaagaaaacagaagttacctacaggttgggttgagggtttggagcaactggcatggtagctccctgaattccaacagctataagaaaaccacgctcttgccaaacaccctaacaataggagctatcaggaaaatgatccctgatagctcctatttcaggagctatcctatcaactgttgatattcctatcaactcctgatagaggagttgacccc

SEQ ID NO: 689738 - DNA, 685 bp, Homo sapiens
gaaagaggcaacaggggagaggggagaggccatatggaggagtacagggttccaggactcaatggaacagaaaatgcacacatctgtcccctaccattgaaaactaatgaatcattgctgttttaagattcaaagttttgagatttttttttttagaaaacattagatagttcaaacagggtaattagtagttaaataaccataacatagtaaactcttttttgttaaaaatttactgttatataatattattatatttaatatattttataaaatatatttcatgctttaaaactggccatttttgcatttctattgcattttttttttttttgagacggagtctcactctgtcacccaggctggagtgcagtggcccgtctccgctcactgcaagcttcgcctcccgggttcacaccattctcctgcctcagcctcccgagtagctgggactacagaygcctgccaccatgcctggctaattttcttttttttttttttcttttttttttttttttgagacggggtcttgctgtcgcccaggctggactgcagtggcgcggtcttggctcaatgcaagctccgcttcccgggttcacgccattctcctacttcagcctcccgagtagctgggactacaggcgcccgctaccacgcccggctaattttttttgtatttttagta

SEQ ID NO: 689739 - DNA, 791 bp, Homo sapiens
gttgagttagaggtagaaatattaagcctgaaacaatctcagaggtccctcaaggctgacctaagtgtgtaatttttgttttccctgcagaatatagccttaaaactactcattttttaaatgatgaatatcgccagtctttgcttctttctagccttccaactcatctgcactttcagccagcttccaacacacayatattatctacattctgttctttttatcaccactatttatgcttgttttcaacataggctcatcaggagctgtttttttatatgtctcagaaataggtgcttcttgacaagcagagtttaaaggaaaatgattgtttatgcctttgtccttaacatgcattttaaactgaaaaaactcccaaatatgaaaatgcctatgtgggcagaagcccattatgaagcactttcatctattccccctgcctgtgttgagcctgtgggtggataatgatcgtctgtctattgttctgctgcaaatgcaaaggaaacgctcagcttgtgcaaaggattgaagacgtggtttctaaactacttggtctaaagcagtgctcagaacagtagttacagagtgagtgcatctgattcattaaacaggagcctcaagttcactgtgcatggagtagtacgtgtaaattagaatatttgccaccagatctttcttcacagtgtctgacatatgcaatgtttggcatcaagtttgccactaaacagaatattgggttctctggacctggtaccttttcttaaaagtatttaaagagaagctttaagcat

SEQ ID NO: 689740 - DNA, 791 bp, Homo sapiens
gttgagttagaggtagaaatattaagcctgaaacaatctcagaggtccctcaaggctgacctaagtgtgtaatttttgttttccctgcagaatatagccttaaaactactcattttttaaatgatgaatatcgccagtctttgcttctttctagccttccaactcatctgcactttcagccagcttccaacacacacatattatctacattctgttctttttatcaccactatttatgcttgttttcaacataggctcatcaggagctgtttttttatatgtctcagaaataggtgcttcttgacaagcagagtttaaaggaaaatgattgtttatgcctttgtccttaacatgcattttaaactgaaaaaactcccaaatatgaaaatgcctatgtgggcagaagcccattatgaagcactttcatctattccccctgcctgtgttgagcctgtgggtggataatgatcgtctgtctattgttctgctgcaaatgcaaaggaaacgctcagcttgtgcaaaggattgaagaygtggtttctaaactacttggtctaaagcagtgctcagaacagtagttacagagtgagtgcatctgattcattaaacaggagcctcaagttcactgtgcatggagtagtacgtgtaaattagaatatttgccaccagatctttcttcacagtgtctgacatatgcaatgtttggcatcaagtttgccactaaacagaatattgggttctctggacctggtaccttttcttaaaagtatttaaagagaagctttaagcat

SEQ ID NO: 689741 - DNA, 977 bp, Homo sapiens
tatatatatatatatatatatatatatatatatatatatatatcataccaaatatgtgctaattgactgcatatgttattggtaaggcttctaatcaacagcaggctattagaagttaagttttgggggaatcaaaagctttatggggattttcaactgctccagggatggtgctcttaactctagagttcttcaagtgtcaactgtattcttgaatattctgttagagcagtaaggtgtccaatttagaacagtaggagttgttacaaacttttctgtttgactcaccatgaataatcaaccagtagccaaatactgattataaaaatttccattgtgtgtgtgtgtatgtgtatgtgggtgcatgtatgcatgtgtgtatgtgtgcacgcatgcaggtattggatactttttattactattaataaatagaactaaagactcctcctgttttgctgaaactgttaattcattaatttactatgtactaggtacattttrttatttcattgtaaagtttgatataaacatctctcgtgatgcttgtgagattattctggaaagaggccatgacttttttcatcagtatggccttatcattttacagagtgaatgacaacaatagtttgttgaacaaatgcattgatatgagatctacttcataaaaatgcaaatgaatacatgatggaaattagaagaaatcatattgaaaattataactgtgactcttctcttccagcttatctacattttttgcttcagaataattcttacttttctattagtgtcatagaaattacaaagggtctagtccaaaatgcttatctcatatctattatccaacaacaggaggccttgaagctatgtatttttaattactttataattacatatatttcatgattgaattcaaatcgagaaacatgtttctctcgtggatacaaaaagttgtatcattgccaaggtgcagccatttc

SEQ ID NO: 689742 - DNA, 1906 bp, Homo sapiens
catgcaatgggttaaaggcctagttgggaatgtggtaggtagtaataaaaataagaacagagatcttctatttaaggaaatcagaaaattttgagacaaaggtataagctaagcaagactctagaggaaaatttgaacttaatatgatactgaaatgagaattgatgttattgtaagaaagcccagtccagaagtagttgactatattggaaacattgagatatttgaaaatgacatcagtagcttgctagcattcttggtttttcaaaattaaatagcaagtgttttgcttctggycaactagaatgctcagagacataaacagctctgtattagttacacacacaatgataaagaagaaaatctgtctaccataaaggaagtcacattctcattctaacaatagaaacatgcttgtcaaaatcagaataagatatgataaaaaaaaaaaagattacccaagtcacagcccagagaatcacaaaataaattttagaggtctttaaaataacttaaaatattcccaaatggaattaaaaattggaacaagtaggagaatgcatgtgagactacatgacagaaattactgttaagctcattacctataacttcagccatgagagtagaaagggtttcacaccatgagaagaggagatgataaatagaacctctgactactcccaatttatatactaattaaaaatgagtcaccagtcaagaaaagaccaacatgatgtcaacaaagggtttcaagagattagtagagtaatggactgggggtaaaggtagaggttattccaaaaatggagatattggccaattatttaggcataatataaaatatattttaaataaaaattctaaattaatcattgttttgggatatggaaagtccttggtgacactagcaaaaggcatttcaaataagtgcaagaacactttaccaatatgcctgataattcagtggttggccacaagattattgaaggtggcatcagaatattacttttaacatgaattaacaattacatatctcagcaaaacagtgatgtttttagtgattcttaatttactttctatgacctctggcatttaaattttatataataaactccaaagatttatgtctttctaggctccatttgtttttccctttcattttacccttctcctattccatattttatgcctctgcctcaacctgtaaaatagatgagcaatgtgtaaaaaaaaaaaaggcatctttaattaaactaatgagtatatcatgtctaaagtgttggtggcttctccttgaatgaatgtttctactttttttcctaaaagactggatgatctattttaaaactaaaataatataaatgcaactaaaaaaaaaagagacaaaacaaaacagaagatttcatatagaagtatctgaaaactttaaaaactttctaccaaatattatttttctgacagtaatcctgatgggtggggttataattaaacggaatgcctaaactcaatggtgatggggagagaaaagagtggctgaggactggtggtgtcagggtgacaaagctcacagtattcagtgtttagagcaaacatgttgaagacaatgaccctttcagaaggactgaggagtctgttttagtagaaagtcaaagatttaaaaaattactctattatagccatttattcttcttattttaagtaagaattctcccttaactattggactttgaaaattgttggatactaaataactgcaaaaagctcatcaatgactatgtatttcctgatatacttagttataaatttagacattcccagtagctttccatcatgaagaagtgttgtatagacaataggggagaatcctgtccattgtcttaattaatttttaggcactgtttgagaa

SEQ ID NO: 689743 - DNA, 585 bp, Homo sapiens
atgctgaaaagaaacagcaatagcaaacttccttcccaagcatttaaattcaaatgaggctgcttattacctgaagtatataggaaatcaagtcttaatctaaaaaacaaaaaagcccatygaatagaaaaagtgccaatctcatgtagctcttcaacagttaatttattaagcaccgtttggtacctaacagccaagtcaaagggctgagagcattccaaaggaagtcatggaattaatgtcacctttgcttctcatgtctaagagagcactttttgtgaggtagcaagcctcctaccacaccaaaagctacagcacacctgtgcagctgagtgaggccagcaacggaggggttgcccagaggtagctaccgactcattgacccatgtgctcctacttgtacaaataatatcacttaaagtccaggaagcaataaagaaagttttaaaaaataccatttagtgtatatcatgaaagtagtatatagtagtagtagtagtagtagttgttatctactgaaccaaatttttccatcttagtcacatacattactgccaatatcacatggcattagttttttctacc

SEQ ID NO: 689744 - DNA, 2486 bp, Homo sapiens
aatgggtacgtgctaggagaaataaatagttctaaggaacaaatttaatgttaatgttatttccttctcctagtttatgttttcatcaaccacagccaataagaacaaaaaacaattctcttaattcccatcaccatccctactcacctcctctagtcataaatacctgctgccagttttgtttccgacattctctgtaatttacattgtattaaggttaacaaagcctttgagttaaagaacaggttactctgggcgcactgccggtagggtagccctgctctgcaagaagcagtctaaacaaacaaacaaacaaaataacagtagtagctacacaagcttagcttatctttacctctctgcctagaccacaggagtcatcatcagcctttttatggaacaggcaaggagaagcttctcagggactgactcaagccattttgtcacacagacccagggcgtgccgcatagcaatcacacagggtcccatgttcgttgaatgctctgctgttgccatcttgaaattattttatttttgcacaagaggtcccacggtttcatttggcagtgagggccctgcaaattaggtagctggtcctgcacagagctgatttaaaaaaaatttttttgtgacatgggcatttttgaaaatgtttcattttataccataccttacagggcttttactctaaacaacagatgttcattttttttttatactttcaaatccaataaaggcaaagtatccctcacctgtatcactgcaacaggtttctagattatttttttctggattcactcttgcttactgtcaatctatctttacacagccaacgttctcatctagtacaagcctgatcttgtcaccctgcttaaaatcctcccacagcatctactgccctcagcatcatgcccagtgctttcacctggacctaggccctgaggtccagccctgacctggggcttggcctcactctactccctacctgctgtgtcccyacctcaccagccttctttctgcttctagaacatgccacgctccaacttcatagccttggcacctgcccaagggacaaatactttaatgtatgtccaaggattttgataaaataaaggtggaacaaccaaattcaactgatagtcattattggttttaatttcttaaaagaaacacaagagggtttaaaagactcacacttcttagtaaatgtttttcactcacactatgatttgggctacttccccagtggaaaggataataagccttgatctgactgtgaaacgtaggacaataatggggagatgtagagaaggtcagttttaaagtttttcaaatcaggttaatcaggccttaaaggcatcttcatgaccttcactgatccctgacacacaacattcccaaacagcttggaagggttggggaaaacaagtattaatgaggataaataaatcataggctcactttaaaaaaagaatatctcatgttctttgaagagacttaactattaaatctgataaaagattcatagagaacgtaattatgtagaaccttttcttgttcagaaaaatgagtaagttgcctacaactgttttctcatccagataatcacagattttagttctgcctgtatgtaaatgttctgatagtaaaaccggtcaaaggatgttgggtgttcactcctacagggggctttctcagaagggtatgtatcttctagactgagaagtcatctaaccttgatcagtaggatgtttagcaattatctgtcattctccccactccagccactttagccctttgactacccttattctagtggccacacaccatgctactggctttccacaaacagtgttgaaataactagctctccatgtgggaaaaaattaagttagagttctactattcatgaaaatatccctgatggattaaccctcaaaacactgtaaaatgtcaactattacagcatgagaagaatatataggagaaggtgtttataacctggagaaggatggcctttttaagccagacacaacacaaagtcattattcatcgtgcctttgatgtagtccaatttcccaaagttaaaagacaaggccaagctgggagaaaatatttgctatgtaacaaagggttcgtattcagaatatataaagaattacaaatcaataaatagagacaatttttaaaataatagggcaagccaggcgcggtggctcacgcctataatcccagcactttgggaggccgaagcaggcggatcatgaggtcaggagattgagaccatcctggctaacacggtgaaaccccgtctctactaaaaaatacaaaaaattagccaggtgtggtgggtgcctgtagtcccagctactcgggaggctgaggcaggagaatggcatgaacccagggggcagagcttgcagtgagccaagatcgtgccactgcactcaagcctgggcgacagagcgagactccatctcaagaa

SEQ ID NO: 689745 - DNA, 2123 bp, Homo sapiens
ccatttacacatggcaagaaaaatgatgtttgggagggtatgggaagctataccttaatgtccaagctaattatccacacccacacctcataaattaaccagtttcaaccccgtgagctctaataccattttcctgaattttaatactgattcctacatgttaaatgacaatacatttgttgcgtgcaatgttgacttaacacgtttgctaagctatttgagattgtttccctttatcaacaatttttcctggtttgggaaaggcatctctttccaaggaataattagaaagtaactacagccttttaccagagttgagagatttaaagaaattaactatcttattgcagaaactttatctgaagtcagtatttgtaaaagataaagattttcccagaaaaataagagggaaaggggtcatagayggaaaggaacttacatttattgtgtactcattataagccagaaactatgctgggagttctatatacactatcccctttaacaccatgagatggtcttttatctgcattccgtaggtagtgaactgaagctcagagaggcgagaaactcatgcaattagctgatggatgtttggcctgggctctaacaccaagtctattggactaaattccattctccttcctctccactatgcgttgctgcttctgttggcatgatcaatacagtctcaacactctgagggtcgcagcaacccagtgaccacaactgcttcagatcttcagagttcccttgacttctttctcagtactgttgatggaatggcaggagactattatctgatgtaacttgaatctctcactcatggtcaaaagtaggcagtctcctagtgtgaagctggaacaccaaaaaactctgggtgttctcacaaggacaagcaagactatcaccacttcctaacaatggcgggctttgttttttcttagtagctgggcttttgttctaaggaaggacattatacattttcctctgtgctattcacgctattattggtagccacgtaggccaactgcatgaatcactgataggttcaatacactagtattctagactattattcttagtttttacaagactgttgggatgtctggttatcagaagctaagaaagaacactaggggtggcattcctctgcgtatatacacttttataaacatcaatgctaagatgacattcctcatttctctggattatgttaaagttccctaaacatagtccattttttctcagaccaaatttcaaaggactatcaagttctaaaacaaatttgaaatatgtgtatattaggattgagaagtaacaattagtctcagggccaggcaaagtggctcatatctgtaatgccagcactttgggaggccaaggcgggtggatcacctgaggtcaggagtttgaaccagcctggcctacatggtgaaaccccatctctactaaaaatacaaaaaatagccaggtttggtggcacatgcacatgcctgtaattccagctactcaggaggctaaggcaggagaattgcttgagcccaggaagcaaaggttgcagtgagtggagatgcaccactgcattccagcctgggcgacagagcaggaaagaatccatctcaaaaaaaaaaaaaaaaagaaaaaagaaagcaggcaaaagaattagtctcagggttttttgtttgtttgttttgataaaatataatggcatttctcttactccaattcctatgattcacccaggtcagagttaaagttgtcggatagcttcttctaatagaagcaaaaagggattctatttgagtaatcaagtttattattttccaacaattaaggacatagggatgtaaagaaatctcaaattttaaaactcacttttttttctgactactaaggtaatatcattttactaaaatttttagaagatacacataagaaaaaagaaaattaaaatgatctactgacttaatataccaataaaatctttccacacctaaatataataattatttttatttatttatttatttttttgagacagagtctcactctgccacccaggctggagtatagtggtgcgatctcgggtcactgtaacctccactttccgactcaagcga

SEQ ID NO: 689746 - DNA, 2123 bp, Homo sapiens
ccatttacacatggcaagaaaaatgatgtttgggagggtatgggaagctataccttaatgtccaagctaattatccacacccacacctcataaattaaccagtttcaaccccgtgagctctaataccattttcctgaattttaatactgattcctacatgttaaatgacaatacatttgttgcgtgcaatgttgacttaacacgtttgctaagctatttgagattgtttccctttatcaacaatttttcctggtttgggaaaggcatctctttccaaggaataattagaaagtaactacagccttttaccagagttgagagatttaaagaaattaactatcttattgcagaaactttatctgaagtcagtatttgtaaaagataaagattttcccagaaaaataagagggaaaggggtcatagacggaaaggaacttacatttattgtgtactcattataagccagaaactatgctgggagttctatatacaytatcccctttaacaccatgagatggtcttttatctgcattccgtaggtagtgaactgaagctcagagaggcgagaaactcatgcaattagctgatggatgtttggcctgggctctaacaccaagtctattggactaaattccattctccttcctctccactatgcgttgctgcttctgttggcatgatcaatacagtctcaacactctgagggtcgcagcaacccagtgaccacaactgcttcagatcttcagagttcccttgacttctttctcagtactgttgatggaatggcaggagactattatctgatgtaacttgaatctctcactcatggtcaaaagtaggcagtctcctagtgtgaagctggaacaccaaaaaactctgggtgttctcacaaggacaagcaagactatcaccacttcctaacaatggcgggctttgttttttcttagtagctgggcttttgttctaaggaaggacattatacattttcctctgtgctattcacgctattattggtagccacgtaggccaactgcatgaatcactgataggttcaatacactagtattctagactattattcttagtttttacaagactgttgggatgtctggttatcagaagctaagaaagaacactaggggtggcattcctctgcgtatatacacttttataaacatcaatgctaagatgacattcctcatttctctggattatgttaaagttccctaaacatagtccattttttctcagaccaaatttcaaaggactatcaagttctaaaacaaatttgaaatatgtgtatattaggattgagaagtaacaattagtctcagggccaggcaaagtggctcatatctgtaatgccagcactttgggaggccaaggcgggtggatcacctgaggtcaggagtttgaaccagcctggcctacatggtgaaaccccatctctactaaaaatacaaaaaatagccaggtttggtggcacatgcacatgcctgtaattccagctactcaggaggctaaggcaggagaattgcttgagcccaggaagcaaaggttgcagtgagtggagatgcaccactgcattccagcctgggcgacagagcaggaaagaatccatctcaaaaaaaaaaaaaaaaagaaaaaagaaagcaggcaaaagaattagtctcagggttttttgtttgtttgttttgataaaatataatggcatttctcttactccaattcctatgattcacccaggtcagagttaaagttgtcggatagcttcttctaatagaagcaaaaagggattctatttgagtaatcaagtttattattttccaacaattaaggacatagggatgtaaagaaatctcaaattttaaaactcacttttttttctgactactaaggtaatatcattttactaaaatttttagaagatacacataagaaaaaagaaaattaaaatgatctactgacttaatataccaataaaatctttccacacctaaatataataattatttttatttatttatttatttttttgagacagagtctcactctgccacccaggctggagtatagtggtgcgatctcgggtcactgtaacctccactttccgactcaagcga

SEQ ID NO: 689747 - DNA, 1450 bp, Homo sapiens
  misc_feature 104, 105, 106, 107, 108, 109, 110, 111, 112, 113, 114, 115,116, 117, 118, 119, 120, 121, 122, 123, 124, 125, 126, 127,128, 129, 130, 131, 132, 133, 134, 135, 136, 137, 138, 139,140, 141, 142, 143, 144, 145, 146, 147, 148, 149, 150: n = A,T,C or G
  misc_feature 151, 152, 153, 154, 155, 156, 157, 158, 159, 160, 161, 162,163, 164, 165, 166, 167, 168, 169, 170, 171, 172, 173, 174,175, 176, 177, 178, 179, 180, 181, 182, 183, 184, 185, 186,187, 188, 189, 190, 191, 192, 193, 194, 195, 196, 197: n = A,T,C or G
  misc_feature 198, 199, 200, 201, 202, 203: n = A,T,C or G
aatgaagaaagagaaaactattgaaagtatgaaaatttgacatgaattaatcagccaagagttcagacactggggactgaagattaaactttatagtttagaannnnnnnnnnnnnnnnnnnnnnnnnnnnnnnnnnnnnnnnnnnnnnnnnnnnnnnnnnnnnnnnnnnnnnnnnnnnnnnnnnnnnnnnnnnnnnnnnnnnccaaaaagaaggtacaaagagattaaacaatttatagaaaagtcaaggaggagtcaacgctagaacaagatggccctaatcccagcattatcagtattttagacacaaagataatctcattcctctacccattcatgttaaagcctatggaggatgagacatttgagccttaaagactcagagaaagaaagttgtcattgtccatggggttttkgcactcagaaagaaaccttgaaggtcttagtcgttgctgtgttattccaggagtgatggtggttgcacagccctatgatcatctccgtccactgctgacagcctgttgaagctatcagtcactgcctgaaagaattcagtccagaagattaaagtgtgaggtttgcatatagggtcatctgccctggtcttccccagggaagatgaacacaagtactctatggggctaacattcagtttagcctacatgcctctgtgcagtaaagagcttagtttgtaaaagttgcctaatccagatatatagagtatctgttccttttccagagaataatctaaaaaaaagggtgagcaaatgaacctatagaatctgccagccttcatcacgttcaagcctagtcaacttatgaaacagcctaaaacaccacatgctatgtttagggactggattccatatctcatagagtgagtgaacttttcatttttgtcatacaaaatcaagttggtgcacttgatgtaaaggggaagccagggataattcactctgtgctagactttaaggcccttgaggacatagtgattttgtttccctccacatccctctaagactctcatattgcttgatctgtggaagatagtctttttacgtgttcaatcaacaattattagccacctcctgtgtgggtaaccagactggaaaataaagtataagatacagtctttgccaaagaattggaaaaactgaacttacagaaaacagctgaaagcatgggcaatgtataacatgataccaggaaactaagtatgcacctaaattttaagggagggtcagcattactctgagactggaaacctaagacacaaattgcttgctctgctctttggagctttccaaatattccattccctcattcttcctattagtggaaaaccccaaataaaacagaattcgttcacacttaaagatgtgatttcccacttccaggaagatagagtagtgtactttccctattcctttcactaagtacaaccaaaaa

SEQ ID NO: 689748 - DNA, 1715 bp, Homo sapiens
aatataaaataaacataccaaaaatatattcttatgctatgttagtaaagttccatatgctgtgtggagaagtgccttgtttaaaaggtgatttccaggttgcaaactcagccaaacacacgcaggctaaaatatcattaggcaaagaaattttactgcccctacttaaatctaaaaatgatcataagtgttcccctctgcaatgatatgacaaaaatattactatgttccctatacttccatcgcattttagaagagtacggcattttgaagaaaaagaaatctgtttttttaaccactgaactaaccaaaaatattcagattttcaaaaaatataacaggaaaccaataagataaattagtcattcattcttacatccactccatagttaaaaatgtttattgagagcctagtatgtgctagaaaaacatttagaccatctacacactttgtatataaacagtaaactgcacccaagaaagccttctgttagagctagagaacaggtttgcatgatggtttatataaattttttagaacctttttaacaggcagccaaaccataaagcaaaaagacaacagtttatatgtatccttttaaagggggattaatttaggtagagacacagcagaagctttctgaattcacaaatgcatttatttagggcaaaaggtgaaatgtcacttctgggattgatagtgtttggtttcaccccggtctctgatgatcagtcttagactctaagcagcgttgaatctggaaagaagagtgggtgtgaggatactccgtgtaatgaaacgtgccaggtttaattccctttattgcttggtcagggcaactgaattaaccagccacatctgttcactttggagtacccagtctgggttctttctcttatgcaacagggttctgctagttattacattgttaagcctatttgacccctatctgtttcttatctctcctcatgcagaggggtggagaatccattaaaattttgaatatagacctgccaacacgatcatctttcctatgttaacagggaactactccttaaacaggacttctttattggcacagatcttttacaatatagttaggaaaagaagaaaagcaagagacttgagacccacagaatttaacgtgtacttgcttttgttttgtttgtttttcattttttccctcatgactaagagcagatcactaaaatcttctgctctgttgttaggtctaaaatatcttatgtcgtattttacttttctctaaaagccatcatccatttctaattctttgacactatgaaactttaggtytaaaaatacctgtccaggtcttcttataaagctcatgatcattttagaaaaaaaaaaaaagaattggttttcttagatggcagcaaatgccgttaagtaatccctaaatcctacaatctaatgctttcttttcacaaaataaacttttttaatgcatttcaatcctgattcatttaggtgatgacaagataatttttctacttcaggcttcattgatggccttggtgtttcacaataccaggtaccccaatttgccaacctgccatggtttcaaaagaagctcctcgacattcccttaccaatataattgtactggaaaaccttattatatgctagtatcagttatgcctcatagtagtaatcttacaatcaaacaaaaacacagaattaggaagtaaac

SEQ ID NO: 689749 - DNA, 642 bp, Homo sapiens
ggcaatgcctaaggtttacgtgatttatcacctgcatacatgtggcccttagtttattgtattctgctcccttttcagcaaacrtctgatgtgtcaaggaaaaatgaatgaaccttattggtatctagtaacctaagggccattcaaaactgaccaccatattgataaataattctcttcacagctattaacagcaggatctcacgattctcttaataggcttatgatatacagacacaatttacttccataaaactgcaggagtatagttctagttggctctggtgtgagaaaattccagatcatcaataaattatttcaaagattcattaaagctcaatgtatgcatagacttctaacggcagtaaaacaaaattaataagtggggaaaatattatatatatgtttagaatttataaaatacagtgtatggaaatatatttttccctttgcatggtaattcatttagacctctccaaagaagaatagctgttgaaaaagaagggtttttttcaaaaccagattcagacatgaggtccataagtgacgaataggtattcaaggtctcaaatagcactcttaggtatctgcaagtttgtcatctcacaggaactctggaatgtcacctcttttctgctaagt

SEQ ID NO: 689750 - DNA, 642 bp, Homo sapiens
ggcaatgcctaaggtttacgtgatttatcacctgcatacatgtggcccttagtttattgtattctgctcccttttcagcaaacgtctgatgtgtcaaggaaaaatgaatgaaccttattggtatctagtaacctaagggccattcaaaactgaccaccatattgataaataattctcttcacagctattaacagcaggatctcacgattctcttaataggcttatgatatacagacacaatttacttccataaaactgcaggagtatagttctagttggctctgstgtgagaaaattccagatcatcaataaattatttcaaagattcattaaagctcaatgtatgcatagacttctaacggcagtaaaacaaaattaataagtggggaaaatattatatatatgtttagaatttataaaatacagtgtatggaaatatatttttccctttgcatggtaattcatttagacctctccaaagaagaatagctgttgaaaaagaagggtttttttcaaaaccagattcagacatgaggtccataagtgacgaataggtattcaaggtctcaaatagcactcttaggtatctgcaagtttgtcatctcacaggaactctggaatgtcacctcttttctgctaagt

SEQ ID NO: 689751 - DNA, 925 bp, Homo sapiens
taaaagattaaattagtgtcttttagttaagtctcttaagaatggtgaccataatatgtctcctttctactttaaaaaaatatgtgagggcatctgaaagtaaagtaataatatactttattgccagtaatataatgactcactaaagacatgaatgtaatttagccttaggccattcttacattcctttgaaagcctggaaaaacgttcaagtggcaattacttgatgtgtccctgaaaataccagtgcaaattcctttgttaatagagtatctgtcctctgacaatcaaatagggacgtgttgcaaagtgagycccccattggccttgttcttagacaggttgtaaatccctgaagacttctcatagtcagctgtgtctgggtaaatcttgttcccataggacactggggagaagagaatgtctgagctggccatttcctccaactggctctgaaaggaacaccaattaccagtccaccttgttgacatgttacctcaaatgctttcttgtttgagaacaattctttcagaaagactgagctgtccttttctataggcagtagagaagtggatggattcttatgccatagaacttaggatcttggcaaaatatggctaaactcctttaggtacctttaaatatctggttatgccaagggtgatagtggctacagcagatgtcttgctcagcagaacattgtgttgagtgtgtaattagaaagaccaactggatggaagaaaagagacaaggaaccaagatttcttgagctttctatcatggccagggaaagatagttggaattattaccctgaatttgaaatcatcacaggaaggcagacatcattctttgtgccagaactttggacccaatgtcattcttcctatctgtggcctgaaggagaggggtagagaaacctactta

SEQ ID NO: 689752 - DNA, 925 bp, Homo sapiens
taaaagattaaattagtgtcttttagttaagtctcttaagaatggtgaccataatatgtctcctttctactttaaaaaaatatgtgagggcatctgaaagtaaagtaataatatactttattgccagtaatataatgactcactaaagacatgaatgtaatttagccttaggccattcttacattcctttgaaagcctggaaaaacgttcaagtggcaattacttgatgtgtccctgaaaataccagtgcaaattcctttgttaatagagtatctgtcctctgacaatcaaatagggacgtgttgcaaagtgagccccccattggccttgttcttagacaggttgtaaatccctgaagacttctcatagtcagctgtgtctgggtaaatcttgttcccataggacactggggagaagagaatgtctgagctggccatttcctccaactggctctgaaaggaacaccaattaccagtccaccttgttgacatgttacctcaaatgctttcttgtttgagaacaattctttcagaaagactgagctgtccttttctataggcartagagaagtggatggattcttatgccatagaacttaggatcttggcaaaatatggctaaactcctttaggtacctttaaatatctggttatgccaagggtgatagtggctacagcagatgtcttgctcagcagaacattgtgttgagtgtgtaattagaaagaccaactggatggaagaaaagagacaaggaaccaagatttcttgagctttctatcatggccagggaaagatagttggaattattaccctgaatttgaaatcatcacaggaaggcagacatcattctttgtgccagaactttggacccaatgtcattcttcctatctgtggcctgaaggagaggggtagagaaacctactta

SEQ ID NO: 689753 - DNA, 925 bp, Homo sapiens
taaaagattaaattagtgtcttttagttaagtctcttaagaatggtgaccataatatgtctcctttctactttaaaaaaatatgtgagggcatctgaaagtaaagtaataatatactttattgccagtaatataatgactcactaaagacatgaatgtaatttagccttaggccattcttacattcctttgaaagcctggaaaaacgttcaagtggcaattacttgatgtgtccctgaaaataccagtgcaaattcctttgttaatagagtatctgtcctctgacaatcaaatagggacgtgttgcaaagtgagccccccattggccttgttcttagacaggttgtaaatccctgaagacttctcatagtcagctgtgtctgggtaaatcttgttcccataggacactggggagaagagaatgtctgagctggccatttcctccaactggctctgaaaggaacaccaattaccagtccaccttgttgacatgttacctcaaatgctttcttgtttgagaacaattctttcagaaagactgagctgtccttttctataggcagtagagaagtggatggattcttatgccatagaacttaggatcttggcaaaatatrgctaaactcctttaggtacctttaaatatctggttatgccaagggtgatagtggctacagcagatgtcttgctcagcagaacattgtgttgagtgtgtaattagaaagaccaactggatggaagaaaagagacaaggaaccaagatttcttgagctttctatcatggccagggaaagatagttggaattattaccctgaatttgaaatcatcacaggaaggcagacatcattctttgtgccagaactttggacccaatgtcattcttcctatctgtggcctgaaggagaggggtagagaaacctactta

SEQ ID NO: 689754 - DNA, 898 bp, Homo sapiens
aaatttttttaaatatttagctttttgtaggattctgagttatttggagaatatgcaaagatttgaaatagctttcaaactttaattcactgatgttgccactgcaatcttccaaaattgagtatagtttactgcaactatatgtatggatttctgttttctttgcagttttaaatttggaagtcaaccgtaagaaatacctgacacatatcatataatattttaaaataacatttttttgaaaattaaagttgaataaacaaattgatgatttgattaggtaaattcaacacttccaatgaacgcatgttaatctctgttgaaaattaccctatggaaactggagcaaaaaaattgcatcttatataattaaaatatataactagtttaaacatataatatagaagacaaatcatcacaattactgtctttatagccattgctgaatagttcacttacttaagttaaaatcttaatgcatttccttatataaacttcaattctgtaaatcccttgttgttactatcattaggaaggaaggaaggtctgttactttcacgctagttattgagaaaccaagtaacttgagagaagacatttttgaaggtagatatgcagtgaaaagcagagaagacagaatgaaatattgtgtttcctaggcttatttcgcttctactaataaaacactggaaagaagccaccagaattttaaagcaaataatgtggtaacaaataaattaatatgactctctttttttaattttttttttttaagtttccaaaggccagcctcagatggccgtggggagcaattagaatttgcttcatggcttgttgaataactttggtttcttcagtcwttgataagtggcaggtgggtgggtacaacacagaaact

SEQ ID NO: 689755 - DNA, 898 bp, Homo sapiens
aaatttttttaaatatttagctttttgtaggattctgagttatttggagaatatgcaaagatttgaaatagctttcaaactttaattcactgatgttgccactgcaatcttccaaaattgagtatagtttactgcaactatatgtatggatttctgttttctttgcagttttaaatttggaagtcaaccgtaagaaatacctgacacatatcatataatattttaaaataacatttttttgaaaattaaagttgaataaacaaattgatgatttgattaggtaaattcaacacttccaatgaacgcatgttaatctctgttgaaaattaccctatggaaactggagcaaaaaaattgcatcttatataattaaaatatataactagtttaaacatataatatagaagacaaatcatcacaattactgtctttatagccattgctgaatagttcacttacttaagttaaaatcttaatgcatttccttatataaacttcaattctgtaaatcccttgttgttactatcattaggaaggaaggaaggtctgttactttcacgctagttattgagaaaccaagtaacttgagagaagacatttttgaaggtagatatgcagtgaaaagcagagaagacagaatgaaatattgtgtttcctaggcttatttcgcttctactaataaaacactggaaagaagccaccagaattttaaagcaaataatgtggtaacaaataaattaatatgactctctttttttaattttttttttttaagtttccaaaggccagcctcagatggccgtggggagcaattagaatttgcttcatggcttgttgaataactttggtttcttcagtctttgataagtggcaggtgggtgggtacaacacagawact

SEQ ID NO: 689756 - DNA, 2643 bp, Homo sapiens
atggattaaaatgatttaatttataagacagttaattgccatgcagtattgaattaaaccatctacattttctggaaatacagctgcgtgcttaatagtgggtcataaagttaaggcctacaaggggaaagatatatgataaatattggaaagatattgaaagacatatgataaatatttgactgacagtagtgcatgaaaaccataaaatgggaccataggaggtaagaataggaaaaaaaaatcttatttcacatgccttagaggagacaggacaaagtcggagctgaaagagacattttctccccacaataatcaatgacaaagcatctgaaattttagttttctagagtgaattatatggtgttttggcggggagcagctgcattccctccaggaacaagctactgatagttgctaatagtaggcatataaaacatctttgttggatggatgaaggaatgaataaaatgatttgataaagggcaaaaatcagaattgaggggaattatagggtttcaccacgaggcaatatctctgaggctatggtaaacaatattgctatttaccaatatttctagctctccttcctttctgggtacacaggagggccatgcttgctctactgaatttgggcatggctatgtgagccatcaaatgtaagcaggagtgatataattcccttccagctggtggtttctaagagtagtgtgtgatcctccatactactcttgcctcgtagcaatggttgtggaatcatgagttgatatggaaaagctgtaagatggaagcagcagcttggattgctaagccaacaaaagaacagctgctctggagaattgcctagattcacagcagactttgagcaagaaataaacccttgttgtaagtcaatgcatggaggagggtatatttcatagatgagcaagatgaccaagaatagcttgcatacaacttctgtgtgaatttgacactctcccatccacaggtggagtctgtctcctcttcccctttgatctgggtggcaaaagtgatgctgcatgaccaccaagactagatcagaaaaggccaagtagcttctcttagagcatccattgtcttggaattcttttctctgcatgctccctctcagaatccagccaccatagagccaaggctcctgagagggttcatgtataggtgcttttgtcaagagccccaactaatctgagtcatcccagccaggcaccaaacatatgaataaggaagcctccagctgatttcagtttccaagccatttgagtgttcacagctgagaacccagacattacacaacagacataagaccactgtgttgtgtcttatttcctaactcacagaacttgtgagcacaatcaaatgatagctgttttaaacaaattttggggtggtttgttataaagcaactagttgaccggaacaaacaggttgggcttgtttgttaccacaccgtaatttatcccatcataatagaaaggtgtttttcagaaattcacaaagggtacataacaaagtaagatgaaaaatactattttcagttttttggtgttaatatcttagtggtatcaaccttctagggaagttatacaggtataatccgcgtgatccattctccttaactataaaccacatttccaatgtctcattcacgtatgtaagcttttgtaaactgaattcactggggcatagcaatttttactattttatccaggcagatttatgctacaaataactgtccctcaaggaaataaatggtatattaaaagatatttatacatggtaagacgcatgaataaaactgggaggcttatattgtgggatgatttatgtttcagaaataggtggtgcctaagctattactacattataagcaggtttcagatattgccatgtaggttgagagacttagtaaatattgcccctcccaccttcaaatcatcacaaaaaattttagcataggagattgccaatactgtacacaacagtaatagtgattaattagctgactttcaaggttctacacctctaaagacaaatggacaacatgaacccacactagtacaagtattgtctaagtaagctctagttcactgcttcttaattaaactttgtaggccagtttcattcttcacaatatattgggagttatgtacccaagagaaactagagcatgcatatttttagtttgcagagaagtcaaaataaatatccaacaaaagagaaaaacaatccagagcaaggaactaaccatcctctgaagacagtgatatacatgatcatttcatgtcatttatttctcactcacagcaacaatccaggcaaaatgaagggaagtggataaaggcctctgcactggggtgatgtgtacatttcctaagtatcacatgacttacaggtgcaagctggcaggcatsggacttggtatccgtaagacctggaatgaaattgcagttcctcttaccatgctgtttgaccttgagcaaataacttttgtatgccttagtttccctctctttgatatggagacaataatattgatccttcagggttattctgaataaggcaaatcatgtatacaaagtgcctggtatatcataagcacttaataaaggatggctatcatta

SEQ ID NO: 689757 - DNA, 601 bp, Homo sapiens
caaagtcaacaaatcagatccacatgatcacagtctccattcagtcttttattcttccactcttaatcacaggcatacagggattgccagatatctgagagaagcttcaaacatggaagatagactctaaaataaacaaacaaaaagcaaatacctctttgggggtagcaggctattcaaggaaagaagcttactttttatagtagtgatagcctctgaacaataaaaacagatggaaacatttagagacctgaaagaacaataaaaaaatttaagaattgaaagacttaaactaaaattatctacccattcagtccatcaacatataaatagagaaaataagccattttcagatttgcaaaataccaaattttgattttcacgtaaccttcctcaaaaagttattgaggatgtttactctgaaccaaaatggagtaatagaaactagatttaatctyttccttgatacaaacaaaaaaagacaaaaataatgagaaagccatttgaaagacacaacatcaggcaacaaaggtaaatcctaatattaccccagtttaccaccttgagagtttacagatccaaaatgagtgatgaaaaactc

SEQ ID NO: 689758 - DNA, 636 bp, Homo sapiens
tcaacatccattcctctttgtttttagaaagtactttttaaaaatctgaagtttaaacacagggtataaaatttctatttgttttatatttccataacatcaaataataatctctctaaacttgtattttgaaatacaaaatacttccttcttcctctggatcaacaaaatgggtttaattaatcttatgcccttatttaaggttttaggaaatrataatcgccattctttagcaggcaaaaattatggatacagtagttacaataaattaactcaaatgatctcacaaatgaaaaaattttcccggttaagagtgtaaaaactctactgtcctaaattgtctcccagtcacactactgttacttaaacaacatatctcagtaaaagtacagacgtcatttcacatttgtcaactcactaatttaataaccacatgaaaaggcaatagaattataaaacatgtcatttttccaatactctaatgaaatttttcatgtatatgaaaattcacttacttgattatgcattttcattactattactttgaaaatttatcaaaacaaaaggagttgtatcgtagccaaaaagactttttaaatataaaatttggtctaagtaagataatattttataata

SEQ ID NO: 689759 - DNA, 1075 bp, Homo sapiens
tttcaaaataggcaattttatttttgtgcactagaacaactgatggaagcaagtgaggcaggaggatcgtttgagtctgggaggtcgagggtttagtgagctgagattgcaccactgcactgtaacctgggtgacagagcaagaccctgtctaagaaaaaaaaattaaatgtaaaattggacagactaagactatttatttgcatgcaaagtgaaattgagaattgaggcaatttgttttctggatgtttccagtaaaagcaatttttgatgtacaaaattctgaaaattgctttagtgatccctctaactttctatacaaagagaacatctaaggtatttaaaaatggattttaacttatttattctaattttatctctctctctctctcttttttttttttttttttaagatggagtcttgctgtcacccaggctggagtgcagcggcatgatctcggctcactacaacctgtgcctcctaggttcaagcgattctcttgcctcagccttcctagtagctgggattacaggcatgcgccaccatgcccggcttaktttcgtatttttagtagagaccgggtttctccatgtaggccaggctggtcttgaactcctgacctcatgtgatctgtccccctcaacctcccaaagtgtagggattaatggcgtgagccaccacgccctgccctaattttatcttttaaataaaagtatagaatatctctattattactatagcccagggcatcttcaacttgtaaaatgaattcatgtgcagaaacaggtgggcatttggtcattttcagattcaaaaatggaattgggcaaagaactgtaaaaaacagaattagattaggacagctgatgcaaaccagggaagtctcctgccctactcctatgtcttcccccaaatcttttcatttcacttagatacatggtctgaccttcctttgattagagaataatttgggttaataagtagcctcatttacaatatgtttttttcctattatatcagttgtaagtgttcattaatttagttttagaaaatgagaattacctgtagttttacc

SEQ ID NO: 689760 - DNA, 1075 bp, Homo sapiens
tttcaaaataggcaattttatttttgtgcactagaacaactgatggaagcaagtgaggcaggaggatcgtttgagtctgggaggtcgagggtttagtgagctgagattgcaccactgcactgtaacctgggtgacagagcaagaccctgtctaagaaaaaaaaattaaatgtaaaattggacagactaagactatttatttgcatgcaaagtgaaattgagaattgaggcaatttgttttctggatgtttccagtaaaagcaatttttgatgtacaaaattctgaaaattgctttagtgatccctctaactttctatacaaagagaacatctaaggtatttaaaaatggattttaacttatttattctaattttatctctctctctctctcttttttttttttttttttaagatggagtcttgctgtcacccaggctggagtgcagcggcatgatctcggctcactacaacctgtgcctcctaggttcaagcgattctcttgcctcagccttcctagtagctgggattacaggcatgcgccaccatgcccggcttattttcgtatttttagtagagaccgggtttctccatgtaggccaggctggtcttgaactcctgacctcatgtgatctgtccccctcaacctcccaaagtgtagggattaatggcgtgagccaccacgccctgccctaattttatcttttaaataaaagtatagaatatctctattattactatagcccagggcatcttcawcttgtaaaatgaattcatgtgcagaaacaggtgggcatttggtcattttcagattcaaaaatggaattgggcaaagaactgtaaaaaacagaattagattaggacagctgatgcaaaccagggaagtctcctgccctactcctatgtcttcccccaaatcttttcatttcacttagatacatggtctgaccttcctttgattagagaataatttgggttaataagtagcctcatttacaatatgtttttttcctattatatcagttgtaagtgttcattaatttagttttagaaaatgagaattacctgtagttttacc

SEQ ID NO: 689761 - DNA, 1075 bp, Homo sapiens
tttcaaaataggcaattttatttttgtgcactagaacaactgatggaagcaagtgaggcaggaggatcgtttgagtctgggaggtcgagggtttagtgagctgagattgcaccactgcactgtaacctgggtgacagagcaagaccctgtctaagaaaaaaaaattaaatgtaaaattggacagactaagactatttatttgcatgcaaagtgaaattgagaattgaggcaatttgttttctggatgtttccagtaaaagcaatttttgatgtacaaaattctgaaaattgctttagtgatccctctaactttctatacaaagagaacatctaaggtatttaaaaatggattttaacttatttattctaattttatctctctctctctctcttttttttttttttttttaagatggagtcttgctgtcacccaggctggagtgcagcggcatgatctcggctcactacaacctgtgcctcctaggttcaagcgattctcttgcctcagccttcctagtagctgggattacaggcatgcgccaccatgcccggcttattttcgtatttttagtagagaccgggtttctccatgtaggccaggctggtcttgaactcctgacctcatgtgatctgtccccctcaacctcccaaagtgtagggattaatggcgtgagccaccacgccctgccctaattttatcttttaaataaaagtatagaatatctctattattactatagcccagggcatcttcaacttgtaaaatgaattcatgtgcagaaacaggtgggcatttggtcattttcagattcaraaatggaattgggcaaagaactgtaaaaaacagaattagattaggacagctgatgcaaaccagggaagtctcctgccctactcctatgtcttcccccaaatcttttcatttcacttagatacatggtctgaccttcctttgattagagaataatttgggttaataagtagcctcatttacaatatgtttttttcctattatatcagttgtaagtgttcattaatttagttttagaaaatgagaattacctgtagttttacc

SEQ ID NO: 689762 - DNA, 1237 bp, Homo sapiens
gcttttctcctgttgatctttcttatgttagtttatttctcagacacagctggagcctgtgaggataaaggatggaagtagaagttttccttccttacagtttctggcaatgaggatgggaccctaagaggctggacaccccactcactccagcctatggatgagatgctgagaggcctgacaaaagcctgcaaaaggtggggggattctttccaaagccagctttcccaaatatctatggatagtgcctagctaagagaagaaggtaaaaattttttcttgtcccttcttttctaaatttgaattggcaggagaaaaacatttgtaaggttgttctctgaattgtgactcttgtgaatttggttctaggttctaacagaaatcgctctttttttttgttttttaatctctgtcttctgtgtgatttaccacaaggataaaagttacaataagactctcctttcatcttgttttatgtctcaagagctctgtagccagtgaggatatcttctctggtctccaccagctgggtggtggagactgtcaggtttgcatcagatggcgagccagctggctaggagtctgaaacatgaagcatctccttgtcccagagtgccagctcccaggggaatttgtctcaattgtttcaacctccactaccttgttaacaagtaaggtctttgtttttcgtctttgggagagatgttggatctcgaggggggtactgcatttttcacgctctttttgtggaagcctctcgtatccatggttaagacataaaaggcttattggctttgagtcacaattgaagtggttatacctttggatatttggacttttgtatctaaaagtatttttagagagccctcatcatgaacaactgtcctattggtacatgcgagaagatttggcttgaaggaagaaaataaacacttttataaattaactgttttctcagaaaaacagaactaacctaaatgttttttkagttcaggtgatctggtataatttttggtaaatatagaagctagtttaagttttttggttcaattaaaatagtcatgtttggagacttgtcaacattaaacataatacagacatacgacttcttctatctggatttatcaagcaaaagcgtatgtatgtttaagatggtaaaattgtaaatgtaacctaagaataaaacatacagtaaaaataaattgcttgatgtgagacaaatgtgacaatgaaaaaa

SEQ ID NO: 689763 - DNA, 1237 bp, Homo sapiens
gcttttctcctgttgatctttcttatgttagtttatttctcagacacagctggagcctgtgaggataaaggatggaagtagaagttttccttccttacagtttctggcaatgaggatgggaccctaagaggctggacaccccactcactccagcctatggatgagatgctgagaggcctgacaaaagcctgcaaaaggtggggggattctttccaaagccagctttcccaaatatctatggatagtgcctagctaagagaagaaggtaaaaattttttcttgtcccttcttttctaaatttgaattggcaggagaaaaacatttgtaaggttgttctctgaattgtgactcttgtgaatttggttctaggttctaacagaaatcgctctttttttttgttttttaatctctgtcttctgtgtgatttaccacaaggataaaagttacaataagactctcctttcatcttgttttatgtctcaagagctctgtagccagtgaggatatcttctctggtctccaccagctgggtggtggagactgtcaggtttgcatcagatggcgagccagctggctaggagtctgaaacatgaagcatctccttgtcccagagtgccagctcccaggggaatttgtctcaattgtttcaacctccactaccttgttaacaagtaaggtctttgtttttcgtctttgggagagatgttggatctcgaggggggtactgcatttttcacgctctttttgtggaagcctctcgtatccatggttaagacataaaaggcttattggctttgagtcacaattgaagtggttatacctttggatatttggacttttgtatctaaaagtatttttagagagccctcatcatgaacaactgtcctattggtacatgcgagaagatttggcttgaaggaagaaaataaacacttttataaattaactgttttctcagaaaaacagaactaacctaaatgttttttgakttcaggtgatctggtataatttttggtaaatatagaagctagtttaagttttttggttcaattaaaatagtcatgtttggagacttgtcaacattaaacataatacagacatacgacttcttctatctggatttatcaagcaaaagcgtatgtatgtttaagatggtaaaattgtaaatgtaacctaagaataaaacatacagtaaaaataaattgcttgatgtgagacaaatgtgacaatgaaaaaa

SEQ ID NO: 689764 - DNA, 621 bp, Homo sapiens
attggacatagagcacttacaatataccaggccttgttctaagtcttttacccatataaacttatttagtcctcactgcaatcctgtgacgtaggtactttaattgtccccacttgtctacatggcctctggattataccagtcctcaatcaatgtcagttggtgtttattgtggggcttctattataactgacaaggcacatttcccttaagatctctcttctcaggaaatgatttttgggattttagaaggaaacaatgaggtaatgaaacattgcatgtaaaaacacacagttatttgagccccccacttggtttaatacaagtgrttttagtttttggttttggttgttcacatctcaaggtcaagatgtgttcaatgtcacctgtgacaactcattagctctcatctttgtttgaaattatatcctgaaaccagctcccacccctcagatgaacgtgcatagataccatgcaagaaagttcacaagctgcacccccatttccagagaaaggacccaaagagcaggggcttggtaggcagccacttctttctcattacccaacaagctcccagaaccaattgcagtgactgccacccgcaaggctggtcttcccaca

SEQ ID NO: 689765 - DNA, 1278 bp, Homo sapiens
tatgaattttttaatttaaattggaaataagtgatgtatttatatattaagtatcattatccactaatatgatatagctatccagcaaaaacattataaaatattctcaataaagacaatgtataccttttcttagatttactcctaaacaccttaagtggcacaattgtaaatgtaatgtcatagagcagaccttttatttgatacacactgctcaatccacaaaccacatgtttttacatctagyatttttgtgtacattccattctaaatactttaaacttccattatgatttcttctttgactaatgagtttgttagtgtttgcttggtgtatgtttaatttttactttaaaatcacaggaaaatgtccacctaagattccttctcattaaactatgtagctacaatacacgaaatgaaatgagcttcacagaattgaactagttttgaaatcagcactgattggcaaatccctaaaaattaatttcaggataattaaaattgaaatgtagaaagtgtggctccagtgggatggaggaaaagaagtgggacacatgctattacacaacatgatcccacttccctcttatgagacatgcttaaaagtcatttgagtacaattcatttacttagaaaaagtgatatctggaagtcctaacacaatttaaacctgagacatctttcagctcatggttcaaaatcaaattgattatatttattttttaaagaagcagactgttccagatggctgcaattcaaatttaaggctgactaacatatgtctgattgagtgaaatgtgattttgctaacaataccaagaactaacaaggagaaatataataaattatcaagatggcaggacttttggagattgctcacggaatcaaattaatatcaaattttttaaatgttagaaaatgttttctgaggagcctaagttagcttttctgtagtccatgcagcaaggatttatgaggacaaagtgaaaacagtaacacagataggagcctggtttctagtctgtgactcaagagttatatgatcatagacaaatcgcttcagctttcacctctaaaatgagtgctggcataaaaatgtctttaacaggccaggtgtagtggcttatgcctataatcccagcactttgggaggccaagacgggtggatcacctgaggccaggagctcaagaccagcctggccaacgtggtgaaaccctgtctctaccaaaaatccaaaaaataaattagcctgtctcaaaaaaaaaatttcttta

SEQ ID NO: 689766 - DNA, 554 bp, Homo sapiens
tgacccaacacgtcctcaactaggaatttattctaaggcacaagtaaagataaatttagctgcagcaatgctgattgttgtattgctgacrttagtgataaattgaaaacaagctaaatagtgagtgggagaggacatgagacaaaacaccattaaaatgaggctgtagaagcttatttaatgtattgaaaagaaattcaatatatgtgcacataatattatccaagtttggttagagaggatgaaagagagagagagaggaagttctaaaaatacatacaccaaagtgtctgcggtgattgtttctggatggcaacatcagtggaggtttttggtttttcaacaatggacatgttttgcttctgaacagcagaagtttccagtaaacatcatttttaatttcaaagagaattttaattctctcaaaggagagaatggtgcaaggcagccacacaacactggatggggcatggtgggtgtttccgcagagagttctgtttcttcttcctcgccctttcatgagaaaagtgcagatgtgaaaatgctgctaccct

SEQ ID NO: 689767 - DNA, 609 bp, Homo sapiens
gctcctcccaccatttcctttgtgtggaacagtgaaatggctgaggagtagcagagcctgagaagtggagctggacgcttggccgaagcatcaacttgcaaataatctgcaaaaactgacagcttctgtggacatccttccatgtgagcatcaaatggagctgtggactcccttccgtgagcaacagtgactaacagtgatggacacaaggcgtgtcttagtctrtcagtgttactacaaagaaacacttgagcctgggtaatttataaagaaaaatcgtgtatttggcttatgattctgatggctgaaaagttgaagattgagctctgcatgtggtgagggtctcagccttcttccactaacagcagaaggtgaagggagctgacatgtgcagagatcacatggagagagaggaggcgaagggctgggggaggctccaggcccttttcaacaacaaggtctcatgggttggttagagcaagaagtactagagcatgaactcactcccttcagagggagggcattaatctgttcatagggggtccagccccatgacacaaacacgtcctatgaggccccatctccaacaatggagatcaaatttcaaca

SEQ ID NO: 689768 - DNA, 609 bp, Homo sapiens
gctcctcccaccatttcctttgtgtggaacagtgaaatggctgaggagtagcagagcctgagaagtggagctggacgcttggccgaagcatcaacttgcaaataatctgcaaaaactgacagcttctgtggacatccttccatgtgagcatcaaatggagctgtggactcccttccgtgagcaacagtgactaacagtgatggacacaaggcgtgtcttagtctatcagtgttactacaaagaaacacttgagcctgggtaatttataaagaaaaatcgtgtatttggcttatgattctgatggctgaaaagttgaagattgagctctgcatgtggtgagggtctcagccttcttccactaacagcagaaggtgaagggagctgacatgtgcagagatcacatggagagagaggaggcgaagggctgggggaggctccaggcccttttcracaacaaggtctcatgggttggttagagcaagaagtactagagcatgaactcactcccttcagagggagggcattaatctgttcatagggggtccagccccatgacacaaacacgtcctatgaggccccatctccaacaatggagatcaaatttcaaca

SEQ ID NO: 689769 - DNA, 609 bp, Homo sapiens
gctcctcccaccatttcctttgtgtggaacagtgaaatggctgaggagtagcagagcctgagaagtggagctggacgcttggccgaagcatcaacttgcaaataatctgcaaaaactgacagcttctgtggacatccttccatgtgagcatcaaatggagctgtggactcccttccgtgagcaacagtgactaacagtgatggacacaaggcgtgtcttagtctatcagtgttactacaaagaaacacttgagcctgggtaatttataaagaaaaatcgtgtatttggcttatgattctgatggctgaaaagttgaagattgagctctgcatgtggtgagggtctcagccttcttccactaacagcagaaggtgaagggagctgacatgtgcagagatcacatggagagagaggaggcgaagggctgggggaggctccaggcccttttcaacaacaaggtctcatgggttsgttagagcaagaagtactagagcatgaactcactcccttcagagggagggcattaatctgttcatagggggtccagccccatgacacaaacacgtcctatgaggccccatctccaacaatggagatcaaatttcaaca

SEQ ID NO: 689770 - DNA, 609 bp, Homo sapiens
gctcctcccaccatttcctttgtgtggaacagtgaaatggctgaggagtagcagagcctgagaagtggagctggacgcttggccgaagcatcaacttgcaaataatctgcaaaaactgacagcttctgtggacatccttccatgtgagcatcaaatggagctgtggactcccttccgtgagcaacagtgactaacagtgatggacacaaggcgtgtcttagtctatcagtgttactacaaagaaacacttgagcctgggtaatttataaagaaaaatcgtgtatttggcttatgattctgatggctgaaaagttgaagattgagctctgcatgtggtgagggtctcagccttcttccactaacagcagaaggtgaagggagctgacatgtgcagagatcacatggagagagaggaggcgaagggctgggggaggctccaggcccttttcaacaacaaggtctcatgggttggttagagcaagaagtactwgagcatgaactcactcccttcagagggagggcattaatctgttcatagggggtccagccccatgacacaaacacgtcctatgaggccccatctccaacaatggagatcaaatttcaaca

SEQ ID NO: 689771 - DNA, 654 bp, Homo sapiens
catgttactgttttcacaaaaatgaaggctctgaaactcagagaggtgaagtgattgcccacgtcacaagctaatctctaaaatgtactcttgttyacacattttgtgcactttggcattataacaagtattacatcatacgttctctgttgtttctctttctgaatattgcaaacaggctgcaacaagaaacaacagagcccatgaaaactgacagtgctgaaagtgaagactgagattcaggtaagatacgtggcagtgcgggtcatgttgaaatctacccaagtttggttctctagagagtgaaatatcttctttaaaaaatcaccagtgcaaactcaagggctgggctgcttgtcgtttgtctcttgatgtcaacagtaaccccagaacaggaaccgtgtgtccatctttagaagtagtgcatggcagccgagctgtgagagtatcaattcatctttattttctaggcagtaaacaatgtatagattgaacacctctcatttccatacttgcctttaagtctaaactaagaattattttcacccaattgtactgatctaagaactttaaataatgaacacctgccattttaagatggtctctgattagatgcctctgaccgtacctatccctgctttctgcttaaacatt

SEQ ID NO: 689772 - DNA, 635 bp, Homo sapiens
ggatgcctgaaatgtttactgcatgatcctctgcagaagacacttgccaactcctggttcagtagagctgggatcatgaatttaaacatttgcaaaggccagtggagtccagtacagcatggtgagcccacagtggcgcggagagcccacccagctcagcctgcttcagccgatggcaatcccgtgggaagcttggtgtagctggactcacatgttttcaagaaaagacagtgaccatcatttttgtgtgattttttaaaatttaaacactgtgtaggggacaccagatatatctgccctccctgtgtgtgtgtgggttaccaaatagcactctgccccactccagctgcccgcaggactggggccatgggtgaggctcctgctcaggctggmtggcaatcttcagtgctaagaaagcaaaaatgaaggctgtaactacggaatgagaatacagatcttgccttagcccctccacatgtgcagtgcatttttgcagttttcactgaagaagttccacctggtgttttcaaactgttaatgaattagagttagttctcaaggataccaccgatacaagtatgttattagtacaattatcaagtctgctcatgtctaaaccatttaaataaagatta

SEQ ID NO: 689773 - DNA, 668 bp, Homo sapiens
tatcagaatcatttcccagtggctgtggaagggaggctccaggacttgctctcctttccaacgcgtttctgagtggctgtggcattattcagaacagggacaatggggccaggcagaagggcattctgagagggcagctgggtgggcttcgcggtgatgcgtctggcctgagtgatgatagcacatccaagtggaagtaaggtgagcaagtaggaaggtgcgtgtgagcacctgctcaatccctacccttcagtcccggcccactgggaagaggcagccggctgagcgcgggcaggtgaggaaagtaggctgaagccagggtggggtgaagtgcctggggtcagagaagaagaagggtgggggctggcaggggactctgcatttaaggcaggatcagggaggagtttctggcaaaggtcttgtgagaaagcagggcacaacagtgccatagcaacaatgagggggtggccaccagaaggcattggcaacgtctgttgggtcacagcttgggtgggggctgagggatgagagaggggctcttgctgggcctgcggaggagagcaggtgcattttcaagagaggagatacccataaaaaattcaggaaaaaggtatatatatgtgtatatatatatatatatttttttttttycccccccagaagtttgg

SEQ ID NO: 689774 - DNA, 610 bp, Homo sapiens
tttttcttrcattttaatggcattttttcttctgattttgatgtcaaacggtaacatcctgctctgtgttattatagtgaaatgtggttgtttatctctgaaatcaaattccctgcattgtctctttttttctaaaaaaaaaagacggaattaaatattttgtgtttttctttttaaataaaaaacagaactattggaggtaaccaaatattggaagagttgtctcctatctttgaatgttttatgtaacgtgaagtcatcttagagtgaaaggaactctgcagagggtgggaggtgcttttgcctcctgcttagatggtggcttatgcctttaggtttgggctgaaaaaatgggtttgctgcacgatgattttgaatgcgattttttctgcgcctgagctctgggtctcgtgagcagggctgagggcagaagcgctgacctggagctctccgaggggccagagtggccactctaatgccaggcatttgttcagaaaggtttggaagctccagatttccatcacggcttttatcagtctcatgttaaaacagcattgatcccagctgaaaaacctaatccaaacaatgaagttcaataacaactccatta

SEQ ID NO: 689775 - DNA, 611 bp, Homo sapiens
aatgcccagttgttcacctaatcactggttgcaaatatggcaaagctgggagacattgacaattgtttgatttgttcaagctgagtttagatgaagaaataaagtagtcattatgtctactgttgggttccatattcttcagtttataatacccagcagrccctcatgcagcacacaataagaaatttaataaggtaaaatttaattaggcatatattataggctgaatgaacttttgacatctgcttttggacaattttaggctgcttgaattaatatattcattcctattttagtaacattctatcttcattgtaaaagtttgaacatatactttattatcatctcataagttgattccttttattttcaggagaattaacattttttaaatgaggggattggtgtgggagagtaggagtctgcagaaatgtgtccaaaaatgcagatggtatatctgataaacttaacaatgattggatatcatgctatctcctgctgcaattttctatcaagaagatcacagagattaagcattatttaattttttatgtaaggaaaaaggccaactttcaaaatctattctccaaatctggaaacatggcaagaaa

SEQ ID NO: 689776 - DNA, 611 bp, Homo sapiens
aatgcccagttgttcacctaatcactggttgcaaatatggcaaagctgggagacattgacaattgtttgatttgttcaagctgagtttagatgaagaaataaagtagtcattatgtctactgttgggttccatattcttcagtttataatacccagcagaccctcatgcagcacacaataagaaatttaataaggtaaaatttaattaggcatatattataggcwgaatgaacttttgacatctgcttttggacaattttaggctgcttgaattaatatattcattcctattttagtaacattctatcttcattgtaaaagtttgaacatatactttattatcatctcataagttgattccttttattttcaggagaattaacattttttaaatgaggggattggtgtgggagagtaggagtctgcagaaatgtgtccaaaaatgcagatggtatatctgataaacttaacaatgattggatatcatgctatctcctgctgcaattttctatcaagaagatcacagagattaagcattatttaattttttatgtaaggaaaaaggccaactttcaaaatctattctccaaatctggaaacatggcaagaaa

SEQ ID NO: 689777 - DNA, 614 bp, Homo sapiens
agaccaccctgggcaacatggcgaaaccccatctctgctaaaaatatgcaaaaagtagccaggggtggtggcatacgcctgtaatcccaactactcgggaggcagttcagtggctcagccaagagaatttaaacaaaacacatcattgcttgaagcaggaaagtggaggttgcagtgagccaaggtcatgccactgcactccagcctgggcggcagattgagactcaccccagccccagatttcttaaaaggacatcacataattcataactaaggtttgagtagatgctattcactatctgtatatatctgcatttctaagttatatatktcttctgtgaagttgacatatgaattaaacttcactgagacggaaattccaaaggataatatttaaaaataaatgtgcataggagttgttcttgcaccccgtggtctattcatgagcaatctgggggtggagggaacaacctcatcaggcattttctaaatctcgagaccagtcagaactctgcttacaaaccaaaggaaaacggagcccacgaaactccgtggaaagtgttcatctctctgatcttccgactattcactgattctggaagaggtaaaggaag

SEQ ID NO: 689778 - DNA, 1194 bp, Homo sapiens
gtaaaaaagactttaaataaatatgattttttattctaaaaggtcttagttcaggaaattctattagctaggttggaagtcctaatttctccccatttatttttgtctcaagagaggtctatatttgttcctagttagattctgtggtaagtttttacaatgcagctttctagttttttcctatcaagtggtgatgtctacttccctatacagtgagtattgtttggctaacagaaacgtggtggaactctgtctttggcataaaaaaaaaacttaggtaaacatcatagagccttatggagcagagatgaagaattgcagctaacaccagcctacataagttggtctcaagtcaacccatccaacagactgtcgacgcaagaggacacttacctgaaatcagccaacactagaacaatgatctccaactaatcctcgattaaactactgacctacagaatcctgagtaagaccattgctattttaacacatagaaatcagtgggtttcttacagagcagtaactaaatgcacatgtattgccataaaaaacacaggcctttttagtatttgagatttagacacccaagattccaagttgactgagaaaagagtgcagctcccaaggacagcatagtcccaatacataccacagatgtgaccttacagtgctggttgacatgaaacagacatttttttgtgagaaagcagctttagtatgataagcctctgagatgtcaagtatgtttgttgcacaatttatcccatctttaattttaaatgtgtagacatagatataggtataacttataaatatactayggcaagaatggccaacatttatcaaaatcttactatttgtcaggcattatcctaaggcttcctttacatgttttaagtttttttgttgttacttattttatttatttttttgagatggagtctcgctctgttgcccaggctggactgcagtggtgcgatcttggctcactgcaaaatccacctcccaggttcaagcaattctcctgcctcagccccccgagtagctgggattacaggcacctgcaccaggcccagtcaatttttgtatttttagtagagatggggtttcacaattttgaccaggctggtcttgaactcctgacctgaggtgatccgtccaccttggcctcccaaagtgctgggattacaggca

SEQ ID NO: 689779 - DNA, 988 bp, Homo sapiens
agtctaagttcataaatttgtatttctcaatcccacagcaaatggaaatttgatatcaggctttaatgtccatagatataccatgcctcatgaaaccaatatgtcagatcaaagctgctgttttacatttgccaggytggagcatctgatggttctgcaagggaagccctatgtcagtggttctcaactgggataatttttgtttcacaagggcacatttttcaatgttcattgacatagttatttgtccaaaggaggaatgtactactggttgctagtgagtagaggccagggatgttgataaacatcctacaatctataaggcagcactcccacaacggaattaattatgcagcctaaaatgtcaataatgcaggtggagaagccctgtcctaggtagaatacacttaaatcattttatctaaatttttcaaaaaaacttgttaatgttgaaaatcatctctaaaaataaaaattaagacttgctgatgagttgtcacaaaaagcagtagtgcctacttaggaattcaagagtaccctgaaaactagaaaagcgagcatacatcgtcactaacacagcctcaagatactaagagacactgaaaatgaatagagaatcatcaaataaatttattaattaatatgcagaacttttgaatttgagtatttagacttctaagaccatgtattagtccatttttacgctgctgataaagacatacccgagactgggaggaaaaaaatttaattggacttacagttccacatggctgaggaggcctcagaataatgacaggagatgaaaggcacttcttacgtggcggcaacaagagaaaatgaggaagatgcaaaagtggaaacccctgataaaaccatcagatcttgtgagacttattcacgaccacgacaacagtatgggcgaaaccacccccctgattcaaattgtctcccactaggtccctcccacaacacatgagaattatgagag

SEQ ID NO: 689780 - DNA, 988 bp, Homo sapiens
agtctaagttcataaatttgtatttctcaatcccacagcaaatggaaatttgatatcaggctttaatgtccatagatataccatgcctcatgaaaccaatatgtcagatcaaagctgctgttttacatttgccaggttggagcatctgatggttctgcaagggaagccctatgtcagtggttctcaactgggataatttttgtttcacaagggcacatttttcaatgttcattgacatagttatttgtccaaaggaggaatgtactactggttgctagtgagtagaggccagggatgttgataaacatcctrcaatctataaggcagcactcccacaacggaattaattatgcagcctaaaatgtcaataatgcaggtggagaagccctgtcctaggtagaatacacttaaatcattttatctaaatttttcaaaaaaacttgttaatgttgaaaatcatctctaaaaataaaaattaagacttgctgatgagttgtcacaaaaagcagtagtgcctacttaggaattcaagagtaccctgaaaactagaaaagcgagcatacatcgtcactaacacagcctcaagatactaagagacactgaaaatgaatagagaatcatcaaataaatttattaattaatatgcagaacttttgaatttgagtatttagacttctaagaccatgtattagtccatttttacgctgctgataaagacatacccgagactgggaggaaaaaaatttaattggacttacagttccacatggctgaggaggcctcagaataatgacaggagatgaaaggcacttcttacgtggcggcaacaagagaaaatgaggaagatgcaaaagtggaaacccctgataaaaccatcagatcttgtgagacttattcacgaccacgacaacagtatgggcgaaaccacccccctgattcaaattgtctcccactaggtccctcccacaacacatgagaattatgagag

SEQ ID NO: 689781 - DNA, 739 bp, Homo sapiens
tcacatgttaaagggggtaaatatctttattgaatacatgactaaagtcaaaatcgtgtgcatgaggcaaaaagtttccatcatattttctaattagctaacatactttcaagcccaatttcttatctcttatataattcatagcctctatttagcagaaaataaactccaaagagaatggcttctccttctaatcattacagacaaccaaattgagaagtttatatggcttctaacttcaagtctttccatttcaacatttaagttttattaytgtagcgtttgcaaatggctcctcagttgagaagactgtttcatgtttcaaatctttcaaaatttttttgagttcaaatctagtcccaatctagtcaaatcaaattaagttaaatctagcctttctcagcaattccagctcacaaacatcttttctactcagaactcagagaatttaaaattttcactattcattctggcacttaatagtatactgcctcacttttttttcttgactaattcaaatttatttaattttgtatcttcctagttagattacaaacctcaggaggaagagaccatatcataaatatctgttctaaggataaatgcttagtaaatgttggaagaataaaggaaaagagataaggacaaaaaaagggagcaagagagacaagaagaacaaaaggaagaaaagaggtcgaggaaaggaaggagggatgaaaggagggagatagagatggag

SEQ ID NO: 689782 - DNA, 739 bp, Homo sapiens
tcacatgttaaagggggtaaatatctttattgaatacatgactaaagtcaaaatcgtgtgcatgaggcaaaaagtttccatcatattttctaattagctaacatactttcaagcccaatttcttatctcttatataattcatagcctctatttagcagaaaataaactccaaagagaatggcttctccttctaatcattacagacaaccaaattgagaagtttatatggcttctaacttcaagtctttccatttcaacatttaagttttattattgtagcgtttgcaaatggctcctcagttgagaagactgtttcatgtttcaaatctttcaaaatttttttgagttcaaatctagtcccaatctagtcaaatcaaattaagttaaatctagcctttctcagcaattccagctcacaaacatcttttctactcagaactcagagaatttaaaattttcactattcattctggcacttaatagtataytgcctcacttttttttcttgactaattcaaatttatttaattttgtatcttcctagttagattacaaacctcaggaggaagagaccatatcataaatatctgttctaaggataaatgcttagtaaatgttggaagaataaaggaaaagagataaggacaaaaaaagggagcaagagagacaagaagaacaaaaggaagaaaagaggtcgaggaaaggaaggagggatgaaaggagggagatagagatggag

SEQ ID NO: 689783 - DNA, 1842 bp, Homo sapiens
ttttcctactggtttctcccagaagcactttcttaataaagcacttgcatcagaatcctcacctctgtttctgtttcagggaaacctggccaaagatgagaaattattataatctctaaatcccattttccataactgtaaatgggatcaaaatgtatctacttctagaattaatttagggaataaataagaaaaagcacatcgcatgtcaaagtttcacgcctgatgtgaatgcttacaaaaatgtaactattgttatcagatttgctggcagagattgaacaggacattcaagatgcattaaattcagggcttttccttctcaggtttgggaggccatgtttccactaaggaagcccaagaatgctggcttcccttgagagggcacgccactgtggatgaccatagaattcaagctccctgcaaaggtgttgaaggacttgtgcatggctgccagacactgctcagcagtctgtgctgctttcctttctgttggcagtgagccagaaagcccagcttacaagcagcactattttgttgtcctctctggggcatcaagagaagaagaatgtttcctacatagaacagagaaagtcaaaatccagaatacatatcgcaaatattgatttcaaagagttcttgtacaggttaaatgtgatataaatctatatgtcaaattagtatagaaaaaatgaggctttatgtttttcatgtggttcagtggactgcatatttgagaggcgtaacatcgtgcagccaattatgagattgatattcgaaggtcgcactcacccagctgcaaagctcaatgtgggctatataagcggctgaagggaactgggcagcaattttaattaattagcaatttagagcctctcatgctaaaagctaccttaatgataaaaagagaaatgatatgggaaggcaaaagaatttgaaacattcagcctgaaacaacagatatattaccaacagtgagcttttaagcaggaacctatcttttactcagccattacatgctagctattaatattttatggttataaaaattgtaaatcagtgaaaatcaacttaatattttgagttcatgaagagctttttggcttctgaagaaaatcattttcrctggactctaacatcatttgctcttgagtgaaaacaacaatcttctatttatttgtataatataggtcatggctcagaaaacactaccccaaagcatttttggaggcctcagaagtaagaaaggcattctgaccttcccatttttctgtgtgagatctgaccataaattctgtacccaccttgcctgaaagtaagtcataagaccctcatcccagacaggtcctgtcctgcagctggggagaaggaatgctacacagagaagccaaggagaatctgaatacatagcactttctgggttcccctttaatctattgccattagagcatactcttttgttcaagcacatttctacatggctgtccattcttcattgaatctaagcatagaaatggaaagttttccctgggtctttgagtcttcatttttgaaggctgctgtgtcacataaaattttgattaaataaatttgttgcgcttttctatttgtaacctatctgttatgatagaggtgctggctctatccctttcccttatgataggtgtggaaggatatcacagctctctgcccctacatatagctaaatcatcatagtgctttatgatttataaagtctttttatacattatggtctcatttaatcttcaaatcaaagataaaaaagagaaaaattattactaccctcaatatatgttagagataaaataaggttttcagtcc

SEQ ID NO: 689784 - DNA, 1076 bp, Homo sapiens
tggacattctgaacaaggcttgcataagaacaatgagatctcttcccctgtattcaatgccatccacatttcagctttcagcttgtctcaagacaatctgggtcctgcagtaggaagtgaagggaacactatcagtagtgggaacctttttatttactcctacaacctgtgcttttctttctgagaagtctgttctcttatattcttacaagtatctagcatcttggaccactcagcttgtcaggttcctcttacgtcagtccgaaaaatacatgctgttacacagacccrcattcactgtgtagggaggagtagaagaggcagtgagtgcatattgtcaccaggtggttctgttgaatatattaagaaattcagacctacgactttaacttcccttcttcctggaggggcttcactggcaaacccctgcttcttaagtgaggagaggtcaagggcattccctaaattccaggtggaatctcttagacactaattagtaatggacacactgaggagctgttatctttcatcttgcaatccttgtagttgggctaagtgacttctagtagtgaataaattcaaacaagtatgaattagcggcaatagcaatttagattctattcaagttccttataatgagattctccttgaaaactttatggaaatcagtatgagtacatataaagagaatgttataaaaaagcagaacttaaatattgaacatagataataacagtaacaacatctactatttattgaactcatgttatgtgccggggactagacttgggattttacatatgttatcttatttaatcctcataaaaagtcctaggagttagtttttcaatattttaatgaagaaactgaagctcacagggtttaagcagcctgcacagagttctacaagtcctaagttgagcaattaattgggtttgaaggattttgattagcaattgttgacagcttcatttaatataaattttatttatttatttattggtgagtaaagtactagaaaatgttcaaaatctttgggtttgcaaagtttgtcattagcaggtgactttaagttg

SEQ ID NO: 689785 - DNA, 644 bp, Homo sapiens
ttgaaatgttttgtaattgattgcataaagtatatacgagaaaggaggagtcacgaacggctgtagtttatttaatttgagcaacaacaaagtaaattgtggggtcaattattaagacgggtgacaaatatagaagtagcatattacgaggtatattcaaaggttgttttagacaattatattttgcattgttgatttgggaagagtaattaacaaattgtcagaaaagcaaaatatatgaaaatctgtaccaagacatgtcaatatcacaattctgtttatttggtatttttacagtgatgatcttaaaaaaaataatttccacaaaaaggattttatttgttgtgactgacttcttcatctcataaacccttaatrattttaatttgctattttcaggtttatttttctatcaaaatatttgtgtgaaggtcatataaataccagaaattatcaacccagaaataagaagcataattttgcatgtagcttatataggctactttgaaaataaaaatgctcaaatattaattttatagcctattatctctttttgttaatgtaatttaatatcaccacattattagtatattggaaaaatggaaacattagttgtgaactccatagaccaagcactcaatatt

SEQ ID NO: 689786 - DNA, 1314 bp, Homo sapiens
taaaaaacaagaatttcaattagaaaaaatagtatttttggggccaggcccggaggctcacgcctgtaatctcagcactttgggaggccaaggtgggcagatcacaaggtcaggagttygagacaagcctggccaacatagtgaaaccccacctctactaaaaatacaaaaattagccgagcgtggtggcacatgcctgtagtcccagctactcgggaggctaaggcaggagaatggcttgaacccaggaggtggaggttgcagtgagcagagatcgtgccactgcactccagcttgattgacagagtaagacttcgtctcaaaaaaataataataataataatattttttaaatgtaaagaaaaggagtatattaccattgtagggaaaaattacatgagatgaggctcatgaaatatgcagggggataacatatggactttttgtctatttcaaaaatatttggatttctttgttagttttgaatatttaaattttttagttttgtttttgttcttgtactttttcaagtcaaatggtaattgattgatggctaatatattattattgttaaattacattttatttgctgaggcagattggaggataagtaggtaagtatgaatggttactacactaataaagttaagggaatgtattgacttgcactgcagtggtggcaatgtgagtaaaagcaatagtttcaagaggtatttagaagggagacacaaagtgattttgcatttaattggacctgtggtcagaagaggggaaaagaacaaatgttaaggctaaatacaacctttaaaccgtgaactgggaaggttctgatacatttactgagatagaaaacactggaagagggtcaagatgacagacaaggttgtaagtacagttctagacatgagttaaagtgcctgtgagatatgcgcttgagggtaacaagaggctcttgattttttatgtctgaatcatagccaacagaggggtggtcctcaaaagcgaaggaataattcttagtattaaatgctactgcaaatgatagtagatacgaactaaattagatcaattatgatgtgaagctttctggagttgatggcaaaattaccttttataaattattgtagacagagttgagtttcactggattgagaaataacagtattttaaagttagatataatatgtgtagaagttacttatgcttgaaaagagatgtggcagaatagctgttaaaaccaggattaaaggaagcttttgtgcctttgtattattacatttagtaaccttgagatatgtttaaattagaagtgtc

SEQ ID NO: 689787 - DNA, 1314 bp, Homo sapiens
taaaaaacaagaatttcaattagaaaaaatagtatttttggggccaggcccggaggctcacgcctgtaatctcagcactttgggaggccaaggtgggcagatcacaaggtcaggagtttgagacaagcctggccaacatagtgaaaccccacctctactaaaaatacaaaaattagccgrgcgtggtggcacatgcctgtagtcccagctactcgggaggctaaggcaggagaatggcttgaacccaggaggtggaggttgcagtgagcagagatcgtgccactgcactccagcttgattgacagagtaagacttcgtctcaaaaaaataataataataataatattttttaaatgtaaagaaaaggagtatattaccattgtagggaaaaattacatgagatgaggctcatgaaatatgcagggggataacatatggactttttgtctatttcaaaaatatttggatttctttgttagttttgaatatttaaattttttagttttgtttttgttcttgtactttttcaagtcaaatggtaattgattgatggctaatatattattattgttaaattacattttatttgctgaggcagattggaggataagtaggtaagtatgaatggttactacactaataaagttaagggaatgtattgacttgcactgcagtggtggcaatgtgagtaaaagcaatagtttcaagaggtatttagaagggagacacaaagtgattttgcatttaattggacctgtggtcagaagaggggaaaagaacaaatgttaaggctaaatacaacctttaaaccgtgaactgggaaggttctgatacatttactgagatagaaaacactggaagagggtcaagatgacagacaaggttgtaagtacagttctagacatgagttaaagtgcctgtgagatatgcgcttgagggtaacaagaggctcttgattttttatgtctgaatcatagccaacagaggggtggtcctcaaaagcgaaggaataattcttagtattaaatgctactgcaaatgatagtagatacgaactaaattagatcaattatgatgtgaagctttctggagttgatggcaaaattaccttttataaattattgtagacagagttgagtttcactggattgagaaataacagtattttaaagttagatataatatgtgtagaagttacttatgcttgaaaagagatgtggcagaatagctgttaaaaccaggattaaaggaagcttttgtgcctttgtattattacatttagtaaccttgagatatgtttaaattagaagtgtc

SEQ ID NO: 689788 - DNA, 709 bp, Homo sapiens
atcagttttatttcttttgccaaaagaaagggtgataaaaggatgaattgcagaaaaggcgatgtcagaaaaaagrcagataatcatcacccaccaaacaagtggacgttttcttgtcaacttttgtctcttctgtcatagaaattcctctgaggtttcaggttttcaaaagatttgacacagtattttagaattggcaaacactgttgcagaacaccttataaaaaacaagattttctctgtttttttttcttttttggtttttgtttccaatttctatatctcattattaagtttgcttcattcgaaatgcaaagattatggcttgagttttctttagaagagtagctttctttaaaagtaaaatttgtccttttcatctaattctttgaatatatcagagttcttgatttattgcaaaatatattttatttcttttcctcttgtataaattattttagatttcttaagtttacgcaatggttactcaatttattacataaaatgaaaatgtgatagggaattggatgggtgcctaaagaaaggccattagtacactttttgttaaaataatttgattctatttaaaatatttattttatgctctccatcaaagatatcttgttaaacatgtatttcttctataattattttggaattaaatcttcacctattagtttacattgtaaaaaaaaacaaacatttagta

SEQ ID NO: 689789 - DNA, 630 bp, Homo sapiens
atattttttttttctttttttttttgagacggagtttcgtgcttgttgcycaggctagagtgcaatggcacgatcttggctcaccacaacctccacctcccaggttcaagcgaattctcctgcctcagcctcccgagttagctgagattacaggcatgcaccaccacgcccagctaattttgcatttttagtagagacggggtttttccatgttggtcaggctggtcttgaactcccgacctcaggtgatccacctgcctcaggctcccaaagtgctgggattacaggtgtgagccactgcgcccagccttccttatacaactatatacaccccaaacttgccatcattctttagttcttgtgcaacagttctctgatttaagcagtatgtaagaggatcagttgctcacattagaggcctacctgttgataggaaatgcctgttttaaatacctgccacaaggtaacaaatcaaatagaagcagagtagaaactggactatcttcctagtccaatgaggagttgtatagtgagtggatacactccccgtctcagctccccaggattacttcataaactatgaaaatgacaatgaggcaggcaccagaaccactcaacacacatctgtag

SEQ ID NO: 689790 - DNA, 654 bp, Homo sapiens
agagagagaggaaggaaggaaggaagggagggtataattagattgtttttaacacaaagggataccccatttaccccgatgtaattattatgcattgcatgcctgtcccaaaatatctcatgcattccataaatatatacacatactatgtgcccacaaaaaatttttttaattaaaaatgaaaataaaaaattagccaggcatggcgttggacacctgcagtgttacctactcaaggggctgaggcaggaggattctttgagcccaagaatttgaggttacggtacgctaggcttgtgccgctatcttccagcctgggtgacagagcaagaccctgtctcaaaaaataaaaacaraataataaaaataaaatatttgatatgatttgtttcctttataattctatacattttacttttaatgtgtctagaaacattattcttagaagaggttcataaacttcaccagactggcaaaggggtccgtggcacagaaaaggttaagaaacccgctaaagtctcagtgcgggtctgagccctgttcctgggcatggagttgccgccgttcaccgtaaatatggctcatgcatggaagacctgccaccacgtgggactcatgcaacacggttgcctggaaactaaagcccgatccgat

SEQ ID NO: 689791 - DNA, 654 bp, Homo sapiens
agagagagaggaaggaaggaaggaagggagggtataattagattgtttttaacacaaagggataccccatttaccccgatgtaattattatgcattgcatgcctgtcccaaaatatctcatgcattccataaatatatacacatactatgtgcccacaaaaaatttttttaattaaaaatgaaaataaaaaattagccaggcatggcgttggacacctgcagtgttacctactcaaggggctgaggcaggaggattctttgagcccaagaatttgaggttacggtacgctaggcttgtgccgctatcttccagcctgggtgacagagcaagaccctgtctcaaaaaataaaaacagaataataaaaataaaatatttgatatgatttgtttcctttataattctatacattttacttttaatgtgtctagaaacattattcttagaagaggttcataaacttcaccagactggcaaaggggtccgtggcacagaaaaggttaagaaacccgctraagtctcagtgcgggtctgagccctgttcctgggcatggagttgccgccgttcaccgtaaatatggctcatgcatggaagacctgccaccacgtgggactcatgcaacacggttgcctggaaactaaagcccgatccgat

SEQ ID NO: 689792 - DNA, 551 bp, Homo sapiens
cagagtgatattatagaattgcaaaacctaagaacctagtccatatttgggagataagtgtgctggtaaggctgaaggcaagtcaaaggacgcttctgatgaaatcagaaaatgcctgcacctctaagaaatcataattttattctgaagrtttcaggaggttagtgaaatgttttaaacaagggagtaacatgatccaattaacaatttagaaacatcactaaagctacaatgtggcaaataaactgaagcgatcaaaacaggagacaggaagaccagtaaggaggctaatgctgtaatttaaagaagaaaaattgtgagacataaacgaagaaaataatactgggaataagaaaagagaaaagagtcaaaaggtaagtaaaacagaattgttaagattttattgcacattaaccacagagataaaagagaccccaggttttaacaatgtgtgagcgtaagggtatgggttaactgagacagtgaataaaggaggaaaagcatattagatgagcatgagctcagtttggaacacatccaaattacctatg

SEQ ID NO: 689793 - DNA, 599 bp, Homo sapiens
agggcattaaatacataataataacatgaagataaaatataattctctaacaaatcaagctacctttctctttcaaaatccaacttaagactttcagttttcagttctgcatgtaagtatcctggaagttgccactcctttctaacaactagtgaaaagctgaacagactgaaaaaaycaagaactcttcttgaattcataaaagaggtaaggacacagggcaaacttctacacctaaaattgggagaaagacaggtgactacagggagtcacagcttaccagaacagaaactcatgagtggaaatcacttcaggagccagttctggattaggaaaacttgaactgtaattgatgagttgctggaggcttggtgtggagagtatgagaattaaaaactccatgaaaactcagttattgtgggggtccctgcacatttgtgagttttacctacagaagtcaaccaggttctcaaagtaaatagagaaaaattcccttgtgctttcagcaggagaggggcaaaggaactattttgaaatatgccagagcacccaacttcttaacaaggcctgccctcaggagaatgtatttaaccagggcc

SEQ ID NO: 689794 - DNA, 576 bp, Homo sapiens
tcagttaattatgaattttcatactaactttctattttaacttatgcgattatccaaataatatttcaaaagcatttatgccaactaaataacaaaatagatttaggatcttccacagaaaaataaaatattaaatctattgacatagaaatattctttttattcaagaaaatattgttgctaagtcagtgacagtttgcttgaaacatctattgaaggtgctgtagaaacatattcatattaaaatgcatttttccccctaactcttaagctttctggcaggcacgtagaaactggtcactgtacttaaaagagagaytgagatttctcattttatttacccagagtcaagagaggtttctatttccttcttggttattacttttaagaccagaatcattaatatagtataatgatatagaacaaagtagagatataagctaattatacaaaattgcacaaatgacaaaaatagaatttcaaattgacaagataataattgaaaattcaataaattttttaatatacatggttaattattttaggagaaaattcaatttgaatcataatgaattc

SEQ ID NO: 689795 - DNA, 576 bp, Homo sapiens
tcagttaattatgaattttcatactaactttctattttaacttatgcgattatccaaataatatttcaaaagcatttatgccaactaaataacaaaatagatttaggatcttccacagaaaaataaaatattaaatctattgacatagaaatattctttttattcaagaaaatattgttgctaagtcagtgacagtttgcttgaaacatctattgaaggtgctgtagaaacatattcatattaaaatgcatttttccccctaactcttaagctttctggcaggcacgtagaaactggtcactgtacttaaaagagagattgagatttctcattttatttacccagagtcaagagaggtttctatttccttcttggttattacttttaagaccagaatcrttaatatagtataatgatatagaacaaagtagagatataagctaattatacaaaattgcacaaatgacaaaaatagaatttcaaattgacaagataataattgaaaattcaataaattttttaatatacatggttaattattttaggagaaaattcaatttgaatcataatgaattc

SEQ ID NO: 689796 - DNA, 596 bp, Homo sapiens
acagaactcccccttcaaargttatataaaatgtcctgggtttgttacccttaactaaaaatgctctattaggtctctaagttcaggaaaaagccttgaaaaaatgaatattcctacattttttctctgcattagatgccatcctaggatgctgcagtgactggaactgaagctttttctcttgaggattttcctttatgtttcctccaagtagctcacttacctccttagtgtatttcttctgaaatttgggatttaaggggaaattctcaagacgtgttaacaagtccatcttccttcccccatgcagctttgaggtggggtagaggctatgttaagacccacaaggaatctttccagtaaggttgatttctttcttaggaccccatttttaaagttaggacactaaatggtatcccttcctgctttccttttttattattttctatttttaatttatgtgatcaggtaatagggagtttctatgacctggattcatcctgctatctttaccgaaaacttgactggtactttatgacattaaataaatatatctggtaaccaatgtttgcttttccccagaatagaatatttcc

SEQ ID NO: 689797 - DNA, 652 bp, Homo sapiens
attaagccaaaaaacttatagtaatataaaatcatgattgtacagtaacaaaaacacattacatgtgtttagcatctatatgttcattagttttacttgacataaattgggccactggagtgggatagaaatatttatcttatcattaagtattattttatcaatacatagtatgaagtttaatttytaggaacaaagctatatcagtgttggagatggaaaaaggatcaagatgcttctctgtgttctctttaaaattattaaattagggtcctttgtccatatggtccttaccatttcattctctttctttctttttctttttcttttctttttttttttttttttttttagatagagtcttgctctgtcgcccaggctggagtacagtggcacgatctcagctcactgcaacctccgcctcccaggttcaagtgattctcctgttgcagcctcccgaatcgggattacaggcacacgccaccacacccagttaagttttgtatttggagtacagaaggggttttgccatgttggccaggatgatctcgaactcctgatctcagctgatctgcctgcctcggcctcccaaagtgctcagacgacaggtgtgagccaccacgcccaacccattctctctctcttcaaataa

SEQ ID NO: 689798 - DNA, 1790 bp, Homo sapiens
  misc_feature 703, 704, 705, 706, 707, 708, 709, 710, 711, 712, 713, 714,715, 716, 717, 718, 719, 720, 721, 722, 723, 724, 725, 726,727, 728, 729, 730, 731, 732, 733, 734, 735, 736, 737, 738,739, 740, 741, 742, 743, 744, 745, 746, 747, 748, 749: n = A,T,C or G
  misc_feature 750, 751, 752, 753, 754, 755, 756, 757, 758, 759, 760, 761,762, 763, 764, 765, 766, 767, 768, 769, 770, 771, 772, 773,774, 775, 776, 777, 778, 779, 780, 781, 782, 783, 784, 785,786, 787, 788, 789, 790, 791, 792, 793, 794, 795, 796: n = A,T,C or G
  misc_feature 797, 798, 799, 800, 801, 802: n = A,T,C or G
tggccaggctggtctccaactcctgacctcaagtgatcagcccggttggcctcccaaaatgctgggattacaggcgtgagccactacgcccggccaaaaaaccgaaaatcttaaaggcctttccccttccccgcctgggctccaacaacgcgggagccgccctgccccgccctgtcgcggtccctagagcaggtgggctgactgagggcgaccatgggtcccaagagggctcccgcagccgcgggctcccacctcgaggcgcagcgacaggggccgagagggggcagcagcccccaagccagccccgcgctaggagttggagagacgcgccctccgccttctcccacccaagcctctgccttgccgggcgggccagttgcaggagaaaggggcggggaaccgcggcctctctggggcagcttcccctttctcctgggactctgggcacccgctttccgccctcgccctgccccgccgggccgccacccggcgactcaccttaatgttgcggtggggcgtgagccgcggctgtggctcctggttctcctggaagatagaggccagtaacttcggtttggccttgaaccctgacatggacatcttcccctcacctccggcgggaggggcgcggaaaaggagcctgtcccgagccgctgtcatggccgcgaccaccaggcggggcccccggccgcgctctcgcggnnnnnnnnnnnnnnnnnnnnnnnnnnnnnnnnnnnnnnnnnnnnnnnnnnnnnnnnnnnnnnnnnnnnnnnnnnnnnnnnnnnnnnnnnnnnnnnnnnnntgtaaagctgatacgtaggaatcattcaacaaagtgtacgcattartattattgttatcagtttgtattaatcaatacactatcctctaaatgctcccaaattcattgtttaaaaactagataaggggttgggttaagataataagtccttattttctggaacgaggaaactagttaaggttaacttcagtttggtcatctggtaccacagaaaaatctaacaccacagagacactgggtcatatgcagagatttattcttaatatttcctaactgaaaaacagctcattaggcacatctggagaccttggagctgtcctaggtacaagggtggggtggcagagaaaagcttaatgtagactctctactctcaaacgactcattctggtgaatagacactagttaactatgcaggtaaagttttcttcattcttgtatctcaacatctgacacagaccctggcttggtaacgggaactcacatgtgtgtgatgaaggtaaggagcactccgaagagagcctggtgatgcagaactagcaggcatgtggtgcatcccaattcccctagtgcttcaaagtccttacaaagcagaaccgtggccccgatgtgaggcacacaggctggggacacaattccttttcaaagagaagcaactgaatgctcagaagtagagtgacttgtgaagggtcactgggaagaacgtggcaaagctgaaatgaacactcagatctgcagactataagtcatttgcagggccaggcatggtggctcatgtctattatcccagtgctttgggaggccaaagcaggaggatctcttgtggccaggagtttgagactggcctgggaaacatagcaagacctgtctctacaaaaaatataatagaaaattcaccaggcattgtgctgtgtgcctatagtcctagccactgaggaagctcaggctggaggattgcttgagcccagaagtttgaggctgaactgagcta

SEQ ID NO: 689799 - DNA, 1790 bp, Homo sapiens
  misc_feature 703, 704, 705, 706, 707, 708, 709, 710, 711, 712, 713, 714,715, 716, 717, 718, 719, 720, 721, 722, 723, 724, 725, 726,727, 728, 729, 730, 731, 732, 733, 734, 735, 736, 737, 738,739, 740, 741, 742, 743, 744, 745, 746, 747, 748, 749: n = A,T,C or G
  misc_feature 750, 751, 752, 753, 754, 755, 756, 757, 758, 759, 760, 761,762, 763, 764, 765, 766, 767, 768, 769, 770, 771, 772, 773,774, 775, 776, 777, 778, 779, 780, 781, 782, 783, 784, 785,786, 787, 788, 789, 790, 791, 792, 793, 794, 795, 796: n = A,T,C or G
  misc_feature 797, 798, 799, 800, 801, 802: n = A,T,C or G
tggccaggctggtctccaactcctgacctcaagtgatcagcccggttggcctcccaaaatgctgggattacaggcgtgagccactacgcccggccaaaaaaccgaaaatcttaaaggcctttccccttccccgcctgggctccaacaacgcgggagccgccctgccccgccctgtcgcggtccctagagcaggtgggctgactgagggcgaccatgggtcccaagagggctcccgcagccgcgggctcccacctcgaggcgcagcgacaggggccgagagggggcagcagcccccaagccagccccgcgctaggagttggagagacgcgccctccgccttctcccacccaagcctctgccttgccgggcgggccagttgcaggagaaaggggcggggaaccgcggcctctctggggcagcttcccctttctcctgggactctgggcacccgctttccgccctcgccctgccccgccgggccgccacccggcgactcaccttaatgttgcggtggggcgtgagccgcggctgtggctcctggttctcctggaagatagaggccagtaacttcggtttggccttgaaccctgacatggacatcttcccctcacctccggcgggaggggcgcggaaaaggagcctgtcccgagccgctgtcatggccgcgaccaccaggcggggcccccggccgcgctctcgcggnnnnnnnnnnnnnnnnnnnnnnnnnnnnnnnnnnnnnnnnnnnnnnnnnnnnnnnnnnnnnnnnnnnnnnnnnnnnnnnnnnnnnnnnnnnnnnnnnnnntgtaaagctgatacgtaggaatcattcaacaaagtgtacgcattagtattattgttatcagtttgtattaatcaatacactatcctctaaatgctcccaaattcattgtttaaaaactagataaggggttgggttaagataataagtccttattttctgraacgaggaaactagttaaggttaacttcagtttggtcatctggtaccacagaaaaatctaacaccacagagacactgggtcatatgcagagatttattcttaatatttcctaactgaaaaacagctcattaggcacatctggagaccttggagctgtcctaggtacaagggtggggtggcagagaaaagcttaatgtagactctctactctcaaacgactcattctggtgaatagacactagttaactatgcaggtaaagttttcttcattcttgtatctcaacatctgacacagaccctggcttggtaacgggaactcacatgtgtgtgatgaaggtaaggagcactccgaagagagcctggtgatgcagaactagcaggcatgtggtgcatcccaattcccctagtgcttcaaagtccttacaaagcagaaccgtggccccgatgtgaggcacacaggctggggacacaattccttttcaaagagaagcaactgaatgctcagaagtagagtgacttgtgaagggtcactgggaagaacgtggcaaagctgaaatgaacactcagatctgcagactataagtcatttgcagggccaggcatggtggctcatgtctattatcccagtgctttgggaggccaaagcaggaggatctcttgtggccaggagtttgagactggcctgggaaacatagcaagacctgtctctacaaaaaatataatagaaaattcaccaggcattgtgctgtgtgcctatagtcctagccactgaggaagctcaggctggaggattgcttgagcccagaagtttgaggctgaactgagcta

SEQ ID NO: 689800 - DNA, 1790 bp, Homo sapiens
  misc_feature 703, 704, 705, 706, 707, 708, 709, 710, 711, 712, 713, 714,715, 716, 717, 718, 719, 720, 721, 722, 723, 724, 725, 726,727, 728, 729, 730, 731, 732, 733, 734, 735, 736, 737, 738,739, 740, 741, 742, 743, 744, 745, 746, 747, 748, 749: n = A,T,C or G
  misc_feature 750, 751, 752, 753, 754, 755, 756, 757, 758, 759, 760, 761,762, 763, 764, 765, 766, 767, 768, 769, 770, 771, 772, 773,774, 775, 776, 777, 778, 779, 780, 781, 782, 783, 784, 785,786, 787, 788, 789, 790, 791, 792, 793, 794, 795, 796: n = A,T,C or G
  misc_feature 797, 798, 799, 800, 801, 802: n = A,T,C or G
tggccaggctggtctccaactcctgacctcaagtgatcagcccggttggcctcccaaaatgctgggattacaggcgtgagccactacgcccggccaaaaaaccgaaaatcttaaaggcctttccccttccccgcctgggctccaacaacgcgggagccgccctgccccgccctgtcgcggtccctagagcaggtgggctgactgagggcgaccatgggtcccaagagggctcccgcagccgcgggctcccacctcgaggcgcagcgacaggggccgagagggggcagcagcccccaagccagccccgcgctaggagttggagagacgcgccctccgccttctcccacccaagcctctgccttgccgggcgggccagttgcaggagaaaggggcggggaaccgcggcctctctggggcagcttcccctttctcctgggactctgggcacccgctttccgccctcgccctgccccgccgggccgccacccggcgactcaccttaatgttgcggtggggcgtgagccgcggctgtggctcctggttctcctggaagatagaggccagtaacttcggtttggccttgaaccctgacatggacatcttcccctcacctccggcgggaggggcgcggaaaaggagcctgtcccgagccgctgtcatggccgcgaccaccaggcggggcccccggccgcgctctcgcggnnnnnnnnnnnnnnnnnnnnnnnnnnnnnnnnnnnnnnnnnnnnnnnnnnnnnnnnnnnnnnnnnnnnnnnnnnnnnnnnnnnnnnnnnnnnnnnnnnnntgtaaagctgatacgtaggaatcattcaacaaagtgtacgcattagtattattgttatcagtttgtattaatcaatacactatcctctaaatgctcccaaattcattgtttaaaaactagataaggggttgggttaagataataagtccttattttctggaacgaggaaactagttaaggttaacttcagtttggtcatctggtaccacagaaaaatctaacaccacagagacactgggtcatatgcagagatttattcttaatatttcctaactgaaaaacagctcattaggcacatctggagaccttggagctgtcctaggtacaagggtggggtggcagagaaaagcttaatgtagactctctactctcaaacgactcattctggtgaatagacactagttaactatgcaggtaaagttttcttcattcttgtatctcaacatctgacacagaccctggcttggtaacgggaactcacatgtgtgtgatgaaggtaaggagcactccgaagagagcctggtgatgcagaactagcaggcatgtggtgcatcccaattcccctagtgcttcaaagyccttacaaagcagaaccgtggccccgatgtgaggcacacaggctggggacacaattccttttcaaagagaagcaactgaatgctcagaagtagagtgacttgtgaagggtcactgggaagaacgtggcaaagctgaaatgaacactcagatctgcagactataagtcatttgcagggccaggcatggtggctcatgtctattatcccagtgctttgggaggccaaagcaggaggatctcttgtggccaggagtttgagactggcctgggaaacatagcaagacctgtctctacaaaaaatataatagaaaattcaccaggcattgtgctgtgtgcctatagtcctagccactgaggaagctcaggctggaggattgcttgagcccagaagtttgaggctgaactgagcta

SEQ ID NO: 689801 - DNA, 560 bp, Homo sapiens
gattatcctaaagaaattacaataaccatctttacatctatatatctgtacacatccttatttatttagaaggaattcttagaaactgaattgctgaataaaggcacgttttatacrtactgcaaaatggctaagttttttgggtaatctacttcatggataataaactgcaatatggtatactaaacctgacttcttcccagcatgtcacagatccgcctccacaagttaccattctgacttcaaatgacttgcttgaacaaactcacgtgcctgatgttgactcacctatgttattgcaccatgaaagatgtggagcgcatcatgttttcacacgaattagcatggaaagctggtaactttatagttttaccacctcaagcttttaatacctttcttgctgcaatgtattgccaaccaatgtgaaccataatagcaccgagagaaaacaggatgcaggagggaaggaagaaaagtaatattccttaaaatgtgcagcaccatgttctctaaattttgaaatactgaacaaaaagcattaacaggtttgtaaaccttta

SEQ ID NO: 689802 - DNA, 560 bp, Homo sapiens
gattatcctaaagaaattacaataaccatctttacatctatatatctgtacacatccttatttatttagaaggaattcttagaaactgaattgctgaataaaggcacgttttatacatactgcaaaatggctaagttttttgggtaatctacttcatggataataaactgcaatatggtatactaaacctgacttcttcccagcatgtcacagatccgcctccacaagttaccattctgacttcaaatgacttgcttgaacaaactcacgtgcctgatgttgactcacctatgttattgcaccatgaaagatgtggagcgcatcatgttttcacacgaattagcatggaaagstggtaactttatagttttaccacctcaagcttttaatacctttcttgctgcaatgtattgccaaccaatgtgaaccataatagcaccgagagaaaacaggatgcaggagggaaggaagaaaagtaatattccttaaaatgtgcagcaccatgttctctaaattttgaaatactgaacaaaaagcattaacaggtttgtaaaccttta

SEQ ID NO: 689803 - DNA, 595 bp, Homo sapiens
tggttgtgtctggcacatagagggcattcaataaatgtgggttggatgtgaatctgagaagtgttcattgaaccttatctgaggcacctggaagtggccctggcactgtagagggacccaaggttcatggtggatgcgggctttctctccaagactgaccatccagaaatggtcctgtagcaaagtaaagctgcttggagtgaaatraaccagccaggaatgaagatgtttaatgctccagaggttcagggaacctgcaggccaggaatgaagggggagaactgcatttcaggagtgttggagtccaagaaaaggaggttagacttccctctatacccagcaggaaccactgaagggtgctgagcagttataagtggggtttgtgaagttagctccatggggagtggagcagggaggctggttccacagaccagaaatggtaaagacctgcactagggtgggaaggtaaggaatggagtagagagaacagatgtgagagacacattcattcattcattcattcattcattcattcactcactcaagtatttactgagctcatatcctgcttccctcatggaatttaccatgcact

SEQ ID NO: 689804 - DNA, 595 bp, Homo sapiens
tggttgtgtctggcacatagagggcattcaataaatgtgggttggatgtgaatctgagaagtgttcattgaaccttatctgaggcacctggaagtggccctggcactgtagagggacccaaggttcatggtggatgcgggctttctctccaagactgaccatccagaaatggtcctgtagcaaagtaaagctgcttggagtgaaataaaccagccaggaatgaagatgtttaatgctccagaggttcagggaacctgcaggccaggaatgaagggggagaactgcatttcaggagtgttggagtccaagaaaaggagrttagacttccctctatacccagcaggaaccactgaagggtgctgagcagttataagtggggtttgtgaagttagctccatggggagtggagcagggaggctggttccacagaccagaaatggtaaagacctgcactagggtgggaaggtaaggaatggagtagagagaacagatgtgagagacacattcattcattcattcattcattcattcattcactcactcaagtatttactgagctcatatcctgcttccctcatggaatttaccatgcact

SEQ ID NO: 689805 - DNA, 595 bp, Homo sapiens
tggttgtgtctggcacatagagggcattcaataaatgtgggttggatgtgaatctgagaagtgttcattgaaccttatctgaggcacctggaagtggccctggcactgtagagggacccaaggttcatggtggatgcgggctttctctccaagactgaccatccagaaatggtcctgtagcaaagtaaagctgcttggagtgaaataaaccagccaggaatgaagatgtttaatgctccagaggttcagggaacctgcaggccaggaatgaagggggagaactgcatttcaggagtgttggagtccaagaaaaggaggttagacttccctctatacccagcaggaaccactgaagggtgctgagcagttataagtggggtttgtgaagttagctccatggggagtggagcagggaggctggttccacagaccagaaatggtaaagacctgcactaggrtgggaaggtaaggaatggagtagagagaacagatgtgagagacacattcattcattcattcattcattcattcattcactcactcaagtatttactgagctcatatcctgcttccctcatggaatttaccatgcact

SEQ ID NO: 689806 - DNA, 678 bp, Homo sapiens
ttctaaattgttcaattactttgccaaagagttgtatagaatgttctcttatggttgattccattgctgatgaaattaaacccctgagatctgtattgataacattatcaatatttatattgataacaatatcaataacaacaaccaaaatttgttgttaaattttggttctctttccttttgtttttaaacgtcattgtcaagcagagtccctgtgtcattctattataaagataaatgcacacatatattcatcgcrgcactatttccaatagcaaagacatggaatcaacaaatgccaatcaatgatagactggaaagagaaaatatggtacatatacaccatggactactatgcagccataaaaaggaacgagatcatgtcctttgcaggaacataggtacagttggaagccattatcctcagcaaactaactcaggaagagaaaaccaaacaacttatgttctcaatatttataagtgggagttgaacaatgagaacacatggacacagggaggggaaaaacacacactggggcctgtcagggttgggggagggagaacttcaggaaaactagctaatgcatgctgggcttaatacctagttagatagaatgaataaagtctagtacaacaaggtgactacagtcagcaataatttattgtacatttcaaaat

SEQ ID NO: 689807 - DNA, 678 bp, Homo sapiens
ttctaaattgttcaattactttgccaaagagttgtatagaatgttctcttatggttgattccattgctgatgaaattaaacccctgagatctgtattgataacattatcaatatttatattgataacaatatcaataacaacaaccaaaatttgttgttaaattttggttctctttccttttgtttttaaacgtcattgtcaagcagagtccctgtgtcattctattataaagataaatgcacacatatattcatcgcggcactatttccaatagcaaagacatggaatcaacaaatgccaatcaatgatagactggaaagagaaaatatggtacatatacaccatggactactatgcagccataaaaaggaacgagatcatgtcctttgcaggaacataggtacagttggaagccattatcctcagcaaactaactcaggaagagaaaaccraacaacttatgttctcaatatttataagtgggagttgaacaatgagaacacatggacacagggaggggaaaaacacacactggggcctgtcagggttgggggagggagaacttcaggaaaactagctaatgcatgctgggcttaatacctagttagatagaatgaataaagtctagtacaacaaggtgactacagtcagcaataatttattgtacatttcaaaat

SEQ ID NO: 689808 - DNA, 606 bp, Homo sapiens
ttacatctcccaggaaatcacccagcttggtgatagtaattcttccataatcattcccattcttttgtactcttttctcacaatgaatgaaatggtgacatttcattcaccaaagaattatagacttctggtgggatttttttcctaagctaaacatagtattaggatttttttcctaagctaaacatagtattattctcaacaaaacaaaaatggactttactcacacctgtctatttagtggttaccttcagtacattataattgagtcattttaattacattgcagctctgaatgtgtcttcacattaggagccataccttctctcctacaaataccggaaaatagaactgcacctgtttaattggcgatctcattgctgactacagggaaaatttgatatttcatttccatcactgaatgtttgtaactcagggcagtatttacaatcaagcatttgattttcagcttgctctaagaatggggcgagggatttttttttctttttccttttwccttttcttttttttttttttttttttttgagatggagtctcgctctgtcacccagggtggagggcagtggcacgatttcggctcactgc

SEQ ID NO: 689809 - DNA, 662 bp, Homo sapiens
gaaagcaatctcttctaacaaattctccttagggctgggtcattaaaccacccagaggtgtttgactttttaaagactgttaattggaatggatttcttattggtagagttttaggcaggaagggaaagcattttggctrtctggccagggctgacatttacagtaaggcttctcaaaccttttgtcaaaatgcagattcctagttagcagtcttacaaaagggcctaaaatgttgcttttctaacaaattcccaggtgatgccaatgctgctggttcatggaccacattttgaattatatggttttagaagtctgtttcatgtgttaaagaaagctctgagtattaagagcagctttctggatatttattcattcattctaaaggggatcaggacatgtcaccccaaaacatgccactttggcataaggattattttgagctgaaggcaactgagaaaaagcagacacaggaagagatctctaccctccccttatcttcctaaaagcagaacataaatttccctttgtgaaggtggcataaatttgcccccctctcctgtactagtatgagaaaagcaactcttatcactggagacagagggcccacacctagatgactctgcataaacaaaccttactgaataattcttatctaccatta

SEQ ID NO: 689810 - DNA, 2232 bp, Homo sapiens
tctatcctattagtatgtccctctagagaaccctgactaatacattctctccacacaacttcccaatatgttccctattattacagtagtaataattcaatagagaaaatattcatataactattggaaattaagaaaagatttccctcacatgccacaaactctgaggcatctctgcaaggtgcagtgtggataagggtgagcgaagggcagaacagcccgggactctgttgtggagggaggcagaaggagccctatgtgtggaacaaacaggacccccagggaatgccacaaatatccctaccctgttcaggtggcgtgagcgggggacagggctatttggggtgccaagttcaatggtattgaggtctgcaagaagtgcctcagatgccaggtccagagtgagccgaggcctctgcagtactgtggctccccttagcagggcacactctaaagaaggcagaagtgctacaagcttggctgcaaactacaagagcaaaatgtcatagaggacaagtcgctgccccagctccctcttatattgccacataaatccagagaacaggccgggcgcagtggctcatccctgtaatcccaacactttgggaggccgaggtgggcggatcacctgaggtcaggagtttgagaccagcctggccaacatggtgaacccatctctactgaaaaaaaaaaaaaattagccaggcgtagtggcaggtgcctgtaatcccagctgctcgagacactgaggcagaggaattgcttgaacccgggaggtagagtttgcagtgagccaagatggtgccactgcactccagcctggtgacagagcaagactctatctcaaaaaacatctcattcgagcttaggaggtcaaggcgcagtgagccgtgattgcaccactgcactccagcctgggtgacaaagcaagaccctgtctctaaaagatataaataaatacatagacagatacatagatacataaatacaaagaaaacatttctccaagctgtatgaagcctttgtttcctattccaatgccttcatctagaaactggcctctagtttctgaaacaaacacaacaccattcattagctcatgctcatcagaaagtatcaggggccttcactgctccaagcatcagcagcaactcataacactcacacttccgagaccatcctggctaacacagcaaaaccccgtctctactaaaaatacaaaataaaattagccgggcgtggtggcgggcggatcacaaggtcaggagatcgagaccatcctggctaacatggtgaaaccccgtctctactaaaaatatgaaaacaaaaaattagccgggcgtggtggtgggtgcctgtagtcccagctacttgggaggctgaggcaggagaatggcgtgaacccaggaggcggagcttgcagtgagccgagattgtgccaccgcactccagcctgggcgacagagcaagactccagctcaaaaaaaaaaaaattcacacttcatattctcttagttcccccaaataaagccagggcgttttttcccctctgataataagcatcccgtaattgtgtttcctttttcattttagcttccaggaatctcagagtgaaaccagacactacacgttaacaactttgtccgtggcacacgcctgtaatcccagcactttgggaggctgaggtgggtggatcacttgaggtcaggagttcgagaccagcctggccaaaatggtgaaaccccttctctactaaaaatacaaaaattagctgggcatggtggtgcacgcctgtagtctcagctacttgggaggctgaggcaggaggattgcttgaacccaggaggcggaggttgtagtgagctgagattgtgccactgcactccagcctgggtgacagccagactccatctaaaaaaaaaagaaaaaaaagaaataggtaaagggaatgttgtgtcctaactggagttctctgagggccaaggacctcagaattaccttgctcaaacaaagcctgaaagagccaaccctagctaaggtgaarggtgttcctgctcagcaacccacagtctctgggaagactggaagagatcttcaagagttcctgtaaccttgcagtgtgaaagcaaagcgtgagtgatccaagggaaagtcctgtgcgaccccagaagtgtgggcagcaagccacccaggcgctgaggcaagagaccgaggacacgagctgttccagta

SEQ ID NO: 689811 - DNA, 436 bp, Homo sapiens
ttttattctaaatggcatagggtcctcactgtaggctataaacagagtagtaatgttgtgaaccaatttgcatttttaaaggatcaaacagagactacatggaacactgagagtaaagggataacattatatctaacaacaaaaagggcaatttaaaaaagcatatyggaaagggatatggaatgacattggacattgaggtatcattggaaatggaaatttggaaccagagtgttatccaagtaaactattaaggaataaatggataatccacttctaagaactagaagttgattctgataacacagataattcttacgtttatagagaagaagagacagaaagaggtggggccaagatggccaaataaaagcagcggccttcggaggctcccattgaaaaagatcctaataagcacgtgaatccttcactgaca

SEQ ID NO: 689812 - DNA, 1914 bp, Homo sapiens
agttgatttcatactcttgatgggatgctggccaaagactaaagttagagccaaacttcacttcatctctattttctaccatattctctattaattgactgccattctctcaaattgcataatgctctcatcaacgcttgttacttagaatgccattaaaatgttaaaaatccccaagttgtatcttgagaccagcacactctctgagtccaaagattttttgccacctccactgctgctaccattgctttttgcctagcaagacgttcttgcatctatattctgttttccataggacaactatatcatttagtctgatcagtaaatacctctgcctaaaactctccagtaacttcctctttcttccataataaaagggtcttccttccgactgcatccaaggccctcattatctggcattatccggtctcactctattcttactccccctctctcactctgctcttgccatactggccccygtgctatttttccaatgcaataagcatatttcagtcacagaacttttagactgtgtttcctctgcctggcatgtttttcgaaatatccacctgactttctccctcattttctacaggcctctgatcatgtcacttcatcaataccgtcttcattgaccatcctgctcactatgcccaacactcctagctatatactttccttcttttaattttatccatagagctttttaccatcagatatactctattttttttgttgtttttcacccacaattagaatataaactccataacagcaggaaaaacagggatttttatgttcagtcactattgtgatgaaaatatagaataatgcattttacacagaagttgctcaataaatactgtaggataaatgaatgaacaaatgtaccctgagctccagccacataatctttcactattttctgaacatactagaggtacttccctaatttgttatttgtatagaagttgttccttctgcttggagaacaattcccactacttcatgcttcaagacctctgctgctacctacactatgaaacctccaactccctcagtctattgtggattggactagctgttgtggtccaatagctctttgtctattagcataattattagaagtacctattagaactttgcagcctggtcttataattttttgtttctatgtctgtgtcccttactacagttcaggattcttagggatagtaacggtattatttctctttgaataggcagtataaaacttagaatgtcaatacatagtttccaaatgcaagaatcaattattcaacagtgcagatctgtatatcaatctgtgagtttccaggaatgctgactagaaacaaaaggaaagagcagcaagaagttaaagattacagataaaattgcatccaaaaagtggagagtgtttgttctgcacatttcatttacgtgaagtgataggaaatagatattaaaatgaaaaccagctagtggaatttgtaaaaaacaagtcggggtcagaatttggtcttctttttacttgccaacaaaggtgctgtctggttggaacaaggcaggagaaatggctgttagaagatgtctatatagtgctactaatgagatctgggtcatagtgaaagcaattttccaatagtagcacaggctatctcttctgtcttcgaaattgtgacaatggtttttatgattctaattcagggactctaaccaagctcgaaactttgcctgggcagacaaaaactcagatgtgattgctcttgcaaatagcccctttagtgtactataggtgtgagtatgaatgtgtattgaggggttactttctaagtctctgccatgacaagatgagtgagggaaatcaattggggctgaaaatgccagcactatctctgatagtagcaaaca

SEQ ID NO: 689813 - DNA, 1183 bp, Homo sapiens
ggccagaggcagaaacgacagtatggcagttctgagaataggctttagaaggtctcttacgtttctgcttcctcttttgtgcctcactcatcattataagaagtacatactattaatagattagtcctcagggtgtcggggtagagtagcaaagccgtatcagcggacctatagacctgcagtaggaagatgagtgctatttagaccagtggacgccctggcaacctggaggtacataaacagtaataaattattgtatcaaattattattggaaaggtttsttatgcagcattattttaacaaaatctaaccaatagaaggcacaaaaaatacaccggaatttaaaaaagagttacttaaatctaaggaatttgttataggtggctttgcttttcatgataggcagatagaacttagccagttaaaaaatggggaagataggtgtgttcgcagagaagggtgtgagaagaatatatagaaatcaaagatttatacctttgtaaatacaggaagcaatctggaaataacattctggcatagttctctggcccacagatgttgtggcaacttccttgttcaagttcataaaataggcacgatgaaggagagaactgaaagggaaattaggtaacttttctctcacctttctccctccataatgactaggatggtgatattaccattcagtatcatttcaaaggtatctgtattttatcctggctctctgaaatggatggttctaagattaaattgtagatttgtaatagtgagagaaagtttctcataaattatatcttaatactatgttacagtattaatggtaattatatactattaatatggtaatttggtgctaagatagtgacaaaagtctatttataaaatagtgtatagaccaggaagttgagtatgattcatcaatcaattggtttgaagataaatatcttttactgcctcataatacacatttttaagagctcacaggattctccaaacaatttatgtataattatgccattaaggtaaatatgatgaaaatggtaacactacattagggaaaactaacacaaactgtttttaaaaataattttcaaataaattacattgtacctggtttcattttcattagtccaatttcattgacaaaatgcctacacaaatttaactggctttaagttgcag

SEQ ID NO: 689814 - DNA, 642 bp, Homo sapiens
aatgcgggtcactctgggaagagcatgatcttaggcaagatggtgctctgtgtctgaggccaaccctgaaggcgctggcagctgaaggctgtctatggacagcactctttgcagctcaggtcaggcagtaagtctttagttgcagggtgagctgggcagcacattacagtgtctactatactaacattttttgttgaagatttcccatgaagatattgattattgtctttttcagtttttaatcagatgcattggctaatacctgtttgtagctgaagctaagtctrtcctcttaggccatggtgtgaattgtgtgtttccctttcttccttcatctctggcttagctcctttcattaccttcatggcccctctagaagtttatgttaggtttttaaggccagaccagactgacttgagcccagccgtaattggagaccagattcaaggctctctcttggtggcaggtgacattagtcagactttattcttatctatgaaagttcataagtaagtgagcttttgtgtttttctgcttaactctcattactacctgttatctctttgaagacaagggatatgtaaaggtacatatatgtgtatagattgtgtatgtgtttgagtatgtatgtatgctttaagc

SEQ ID NO: 689815 - DNA, 642 bp, Homo sapiens
aatgcgggtcactctgggaagagcatgatcttaggcaagatggtgctctgtgtctgaggccaaccctgaaggcgctggcagctgaaggctgtctatggacagcactctttgcagctcaggtcaggcagtaagtctttagttgcagggtgagctgggcagcacattacagtgtctactatactaacattttttgttgaagatttcccatgaagatattgattattgtctttttcagtttttaatcagatgcattggctaatacctgtttgtagctgaagctaagtctgtcctcttaggccatggtgtgaattgtgtgtttccctttcttccttcatctctggcttagctcctttcattaccttcatggcccctctagaagtttatgttaggtttttaaggccagaccagactgacttgagcccagccgtaattggagaccagattcaaggctctctcttggtggcaggtgacattagtcagactttattcttatctatgaaagttcataagtaagtgagcttttgtgtttttctgcttaactctcattactacctgttatctcyttgaagacaagggatatgtaaaggtacatatatgtgtatagattgtgtatgtgtttgagtatgtatgtatgctttaagc

SEQ ID NO: 689816 - DNA, 586 bp, Homo sapiens
caagccactctgccatcagccgcggtgcttgctcttccttcagcctggaaggttcttctcccagacactcacttggcttgcttccactggtccctgcacgaatgccattttatcagagaggtcctctctgaccattctatgtaaaagagactccttagtttctgtcactttctagtccttgcccagcttatttttacataatttatcaccacgtgcacttgttttgtctgtctctccaaaatagaaagttaatgccaagataagtgattttgattgttcattgatatgactccagcccctagagcagtgcctgacatgaagtattcacctgataaatattcattgaatgaacaaatgaatggaggatagtggaacacagagataggaagtaactcactccttggcaatatggggcctgggctactttggtgcttctatttgtgagacattattattcctcactatttaggctattgtaacagttttttttagtttccrtatttctcctaaaattttctatatctttatcaattaattattcccattttgttgttgttgttgttgttgttgtgacagagtcttgctc

SEQ ID NO: 689817 - DNA, 644 bp, Homo sapiens
attgggctgcagttgtgaatactccttaaggtaaaggtcttttgttaagatgaattctctccatatcttattatctgtcagaaattctgaggttgagatgatgagagggtacaacaagtgtcagtaacagacacttcgctcatgcccctcagcctcccagccaccttgctttctagaaccttctttyccacccccagcggcctgcctaaggagtggatgcccagccaggaatggttctcacaaaggttgttcctgaccttcaacttgtatgccagggctccagggcatgcactgcaccaattagatcctctctcaggaaagcagcactcataagctcctaggtaatgatgagaactttaggtaagaactggggcacaaagaggggtggcctgtgcccatgtcctgagggcctaaagacctaaggagaagtggttcagagcgagaagagattagacatgaagaaagaatcagagaaagcaagagagacagatgtggtatcttagtttgggtggctataacaaactaccataacgggctggcttaacaacaaatatttatttctcacagttctggaggtgaagtctgagactaggatgccagtatggatgggtcctgtgctgtgcacagtgagggccctgttgtgc

SEQ ID NO: 689818 - DNA, 670 bp, Homo sapiens
cgtctgtaaaataggtgataggtaataatagcatcttttatttgaaatttaaacaaaatattgaacttggcacatagtgtggtctcagtttacatggttactgtgttttaatgattatagactttcgaagattcagtgtataatttacagtgactgaggacagatgcctgcctgtctcttttccttccttcctgcctgcctgcctgcctgcctgccttcctgcctgcctgcctgccttccttccttccttccttccttccttccttccttccttccttccttccttccttccctccctcccccccgttctctccctcccttcttttcttttccctcttcttttcttttttatctttttcctctttgtctctctgtgcttgtctctctctcccattctctctctctctctcatctctcatccygtctttatcacagcaagggtagttattacttagaaattatatttatagataaaaatatcgaacaggcagtctccatgagttaaatccagactgattcctctttgctgaaaagacaggccttattgttgttcttcttatttgcttgcgcaaggatctcttatgcagccaattcactcagaatttgccaccagcacagatccacttaggaacctgaccaaaaagcagtagaaaaaaacaaaacatcgatg

SEQ ID NO: 689819 - DNA, 658 bp, Homo sapiens
cagattcaaggcactgaggcctttgactctggaaagtgttcacacctcctacaggctgtcctcccagaattctcagaagcctgctctggagagctccttcccctctggcaggtgcagcaggccatagctcacattggcactgaacaatggcctttgtgtagatctccctgtgatctccagaaaccctgatccagctcttagggaaggggaagcaacaagacttagcaaaatccctgctgcatccatctcatacagataattaataacagcaatccttggaaaatgaggcttaagcaatgaaatccttttctctttttcaatgagagcggtctaataactggggctttgactgttgtttcctgaggaaaccgtgcagtgatgaaattaatgatgtattaaaacaggtacataaaaatgtcacagtgttgaagacagagcaaacaggaaggtmcttcagaaaaaggtccccagttatcagaaaagttatctgaaaatgaaacactaaccaagcaagaaaatactccctgagcatcccgtgaagatgagtctttctcactgttcttttctgcatcccacgtgcataatgtaaatctaactaaaaagcatgcaaaagcaaagagtgtttttgcaagtgattgatggattgtattgccttcta

SEQ ID NO: 689820 - DNA, 658 bp, Homo sapiens
cagattcaaggcactgaggcctttgactctggaaagtgttcacacctcctacaggctgtcctcccagaattctcagaagcctgctctggagagctccttcccctctggcaggtgcagcaggccatagctcacattggcactgaacaatggcctttgtgtagatctccctgtgatctccagaaaccctgatccagctcttagggaaggggaagcaacaagacttagcaaaatccctgctgcatccatctcatacagataattaataacagcaatccttggaaaatgaggcttaagcaatgaaatccttttctctttttcaatgagagcggtctaataactggggctttgactgttgtttcctgaggaaaccgtgcagtgatgaaattaatgatgtattaaaacaggtacataaaaatgtcacagtgttgaagacagagcaaacaggaaggtacttcagaaaaaggtccccagttatcagaaaagttatctgaaaatgaaacactaaccragcaagaaaatactccctgagcatcccgtgaagatgagtctttctcactgttcttttctgcatcccacgtgcataatgtaaatctaactaaaaagcatgcaaaagcaaagagtgtttttgcaagtgattgatggattgtattgccttcta

SEQ ID NO: 689821 - DNA, 612 bp, Homo sapiens
ttatcttccttatacctacaagttaggtttcatcactttctattttactgactgggaaaccaaaacttaaagagaggtggtaaactagcttgttctagrtcactcaaactagcacatggcagagccagaattcaaatcctccaatgtcctgtgttcattccacacacactggtgtttcttaagacattaacatggccttatctatttaggatggccacaagaatgtaggacaagctattactgcatgctgaaagtttaatgctctttaaattttactataatttaaaagtttattgggttacaactgtatgaaaaataggcataggaaaataaggcttcaaataaatatatcagcatgttaacatcagtgtattagggcagtggtagtcagaatgagaactaatccatggcattttaccagatgccaggcactgttctaaagcattttataagaatttactcatttaattgaccttagtacctgatggggtaggtagttcctttattactattttaacacatgaagaaactgggacataggaaagttttcaaactgggatttgaaccaaccagtctggccccaggatcttgtctcttaactgccacactaca

SEQ ID NO: 689822 - DNA, 602 bp, Homo sapiens
taacattgaatcaaaactaaaactacatttaagaaccttgaatcaaaaagtatgtcattccataaacattgatataaaaattttraaatattccttgggaaaagttcttagctacatgcttttgattcccaagattaaaataagctatcacttcacaattatgtactagaaacatttaaaaaataaaaacaggtagaaggtggagtaagatggtagaatagaattctccagcaatggtctctctgaaggaacatcaaattaaacaactatctatgtaagaaaacactttcacaagggctagccaggtgagagatcatagcacccgcttttaacttgctaacaagaaaagatgcattgaagaagggaggaaggacagtcttgcattgcctatgacacctctcccccaaccacaggaaattctctgagagagaatctaatggcttggggacaagggggaaagtgtgagactttatattgaaacttagtaccagtcttgccatagtgatacacggcactgggcagaaccccacagcacttgattccaggctggtgcccacagaagaagcatttagacccaccctgggccacaagggaaccagctg

SEQ ID NO: 689823 - DNA, 602 bp, Homo sapiens
taacattgaatcaaaactaaaactacatttaagaaccttgaatcaaaaagtatgtcattccataaacattgatataaaaattttaaaatattccttgggaaaagttcttagctacatgcttttgattcccaagattaaaataagctatcacttcacaattatgtactagaaacatttaaaaaataaaaacaggtagaaggtggagtaagatggtagaatagaattctccrgcaatggtctctctgaaggaacatcaaattaaacaactatctatgtaagaaaacactttcacaagggctagccaggtgagagatcatagcacccgcttttaacttgctaacaagaaaagatgcattgaagaagggaggaaggacagtcttgcattgcctatgacacctctcccccaaccacaggaaattctctgagagagaatctaatggcttggggacaagggggaaagtgtgagactttatattgaaacttagtaccagtcttgccatagtgatacacggcactgggcagaaccccacagcacttgattccaggctggtgcccacagaagaagcatttagacccaccctgggccacaagggaaccagctg

SEQ ID NO: 689824 - DNA, 602 bp, Homo sapiens
taacattgaatcaaaactaaaactacatttaagaaccttgaatcaaaaagtatgtcattccataaacattgatataaaaattttaaaatattccttgggaaaagttcttagctacatgcttttgattcccaagattaaaataagctatcacttcacaattatgtactagaaacatttaaaaaataaaaacaggtagaaggtggagtaagatggtagaatagaattctccagcaatggtctctctgaaggaacatcaaattaaacaactatctatgtaagaaaacactttcacaagggctagccaggtgagagatcatagcacccgcttttaacwtgctaacaagaaaagatgcattgaagaagggaggaaggacagtcttgcattgcctatgacacctctcccccaaccacaggaaattctctgagagagaatctaatggcttggggacaagggggaaagtgtgagactttatattgaaacttagtaccagtcttgccatagtgatacacggcactgggcagaaccccacagcacttgattccaggctggtgcccacagaagaagcatttagacccaccctgggccacaagggaaccagctg

SEQ ID NO: 689825 - DNA, 602 bp, Homo sapiens
taacattgaatcaaaactaaaactacatttaagaaccttgaatcaaaaagtatgtcattccataaacattgatataaaaattttaaaatattccttgggaaaagttcttagctacatgcttttgattcccaagattaaaataagctatcacttcacaattatgtactagaaacatttaaaaaataaaaacaggtagaaggtggagtaagatggtagaatagaattctccagcaatggtctctctgaaggaacatcaaattaaacaactatctatgtaagaaaacactttcacaagggctagccaggtgagagatcatagcacccgcttttaacttgctaacaagaaaagatgcattgaagaagggaggaaggacagtcttgcattgcctatgacacctctcccccaaccayaggaaattctctgagagagaatctaatggcttggggacaagggggaaagtgtgagactttatattgaaacttagtaccagtcttgccatagtgatacacggcactgggcagaaccccacagcacttgattccaggctggtgcccacagaagaagcatttagacccaccctgggccacaagggaaccagctg

SEQ ID NO: 689826 - DNA, 602 bp, Homo sapiens
taacattgaatcaaaactaaaactacatttaagaaccttgaatcaaaaagtatgtcattccataaacattgatataaaaattttaaaatattccttgggaaaagttcttagctacatgcttttgattcccaagattaaaataagctatcacttcacaattatgtactagaaacatttaaaaaataaaaacaggtagaaggtggagtaagatggtagaatagaattctccagcaatggtctctctgaaggaacatcaaattaaacaactatctatgtaagaaaacactttcacaagggctagccaggtgagagatcatagcacccgcttttaacttgctaacaagaaaagatgcattgaagaagggaggaaggacagtcttgcattgcctatgacacctctcccccaaccacaggaaattctctgagagagaatctaatggcttggggacaagggggaaagtgtgagactttatattgaaacttagtaccagtcttgccatagtgayacacggcactgggcagaaccccacagcacttgattccaggctggtgcccacagaagaagcatttagacccaccctgggccacaagggaaccagctg

SEQ ID NO: 689827 - DNA, 579 bp, Homo sapiens
tcccaagttcaagtgattctcctgcctcagcctcccaagtagctgggactataggtgcgtgtaaccatgctcagctaatttcttgtatttttagtagagacgggggtttcaccatgttagccaggatggtctcgatctcctgacctcgtgatccactcgcctcggcctccaaaagtgctgggattaccggcgtgagccaccgggccgggctacctgtatttctttataagtaaaagtgttaattctctttttagtcgattcttttgtgctttgatatcacattttgggggctttacagaaataattagaagttttttttttctatgtttgagaatattttaagttatttygaaaatatttgtttttcaaaacattgttataacttactctgacacaatgtgagcttcgtgcattttggaaaactgtgagaccgagcatcttgacaaatttctcattttattgtaagtataacaattctggtctttgtttttcacttaaactttgccattttctctgtccataaaatatatttaaaaagggtgagcatatcagtgtcttaggactgtttcgatatggtta

SEQ ID NO: 689828 - DNA, 679 bp, Homo sapiens
aaaaatcctgctttaaactttcttagtttgaaatccaatttgctatgacatttttttcacatatatcatgcagtctctgctttgaaaggtttccaaatatgattatctaagtaatgtactgatcacagaaaccaataatgtgtgaagttctgtgatgactccaggaagtgctacattacttcaatatcccagataaagttaaaatttttaaataaagaaaataattaacactttcaatgtatgagaagaaaagtgagccaagaaaggtgaacaaaatctcccttgaatgggctggtagagaataattttttatgctttctcttgttccacctargactcttctttatgcatagtagttatttaacaaagacttactcaattaaggctgtaatacatataaaaaatgaatactctttttgttgtaaggtttagagtagaatgtatctccttgtgttggaatcttctgtttacagaagaaaaacaaaagctgatctgttctagaatatgtttccttaaagccttcatttgattatgttgcatttagcatgagtgactccattttggtttggtctagtctgctggggcctagtgtataacctcagtccaaacaattgcctcccataattttgtttttaaattatcccccttttagtcatgttctcactttaagtgagagtat

SEQ ID NO: 689829 - DNA, 679 bp, Homo sapiens
aaaaatcctgctttaaactttcttagtttgaaatccaatttgctatgacatttttttcacatatatcatgcagtctctgctttgaaaggtttccaaatatgattatctaagtaatgtactgatcacagaaaccaataatgtgtgaagttctgtgatgactccaggaagtgctacattacttcaatatcccagataaagttaaaatttttaaataaagaaaataattaacactttcaatgtatgagaagaaaagtgagccaagaaaggtgaacaaaatctcccttgaatgggctggtagagaataattttttatgctttctcttgttccacctaggactcttctttatgcatagtagttatttaacaaagacttactcaattaaggctgtaatacatataaaaaatgaatactctttttgttgtaaggtttagagtagaatgtatctccttgtgttggaatcttctgtttacagaagaaaaacaaaagctgatctgttctagaatatgtttccttaaagccttcatttgattatgttgcatttagcatgagtgactccattttggtttggtctagtctgctggggcctagtgtataacctcagtccaaacaattgcctcccataattttgtttttaaattwtcccccttttagtcatgttctcactttaagtgagagtat

SEQ ID NO: 689830 - DNA, 1266 bp, Homo sapiens
cacatgtggagggagggaggtgactgggtcatgggggcagttccccgatactgttctcgtgatagtgagtgagttctcacatgatctgaggggttcacaagcatccagtgtttctcgtgcttgtgctttcctttctttcctgccacgtgaaaggtccaaatttgcttcccctttgccttctgccatgattgtaagtttcctgaggcctccccagccatgtagaactgtgagtcaattaaagctctttcttttataaattacccagtctcrggtatttctttatagcagtgtgggaaggaactaatacactctggaattcttccttttactgctaagggcttcttgagtcgtgtttcctcacttaccaccccagaactccaagttggggtactgcccgttgggtttccagggtaaattcagggagtcttggtcaggcctttctcaatcaatcagaaaacttttgataacaccactctcagggccaaggctcaaggtctttacgttgggcttctaggaaactcttggcccctttgcaaatcggcctcctcccttcagtcatctgaacagtccagaggcctcccagctcctcctcatgggcagcctctcacgggcatgcatgggctggcctaagaggcatgctccttggagcttggaatgtgctgcagtgacgaggatcccctccaagccctatcaccacacagagaagtctctggaaacctttcactggcagacacttgttcatagataggaaaggagcccaccaactctctgatgggagaagcaaagtgcagtgaatcctaccaccacctgcaaatactgacacctctcttctatccatccagctctgtgatttttgcacactgctttcggcattgaatgtattgtttgtcttgggtctttaactgcaggttttatttgacttatcatgggaccaaacccagccaaggtcctggcttccctgttgagaatgctcacatcgtcacagggacagctccagccttggttctactcagctcacttctcgcctcctgccgttttctctgccagtcactccgctccggctgctccttatgttttcctcagcacccccggcagctgggtctgggcgtgtttgtgctggtggttccttctgcacagatgctgctcccggccttcctgcagggctcatccctcagctccttcctggatgccaccttctccggtaagcatgccctgaccaccctctttctacagagctggctctctccctctactttctgcttcata

SEQ ID NO: 689831 - DNA, 1544 bp, Homo sapiens
ttagtcatcccttttcttccatgatcttgacacttccaaagagtactagtgagttgtttgatagaatatctctcaacttgcatttatccaatattttttttcatgactaaattgaacttacacattttggccgagaatagcataaaaataatgtacccttctcagggtatcatatcatggtcagtgtaaactaaattctcagtgtggtgttatgaggctatacggtggcatgacttagaggcctaaacccatgtaaaggccagtttgtggttacagagtctcaggaaaaacttgcttctttacgcagagccaagccttagacaactgtgttttattgtttttattattactattaatttgccattttctttcaccttttaactacaggtatagagtttcatatttccattttgtggatgtggatctgattttatacctcacagtgagcctcagctttatctctttcctccatgcacacgctttactaaactgagagctctagaccttaaaggatgaacagatacaattaggtcttggaataccttggaatttgccctttcttattaatttttgctttagtcactcatcctttctttgtgtgcattgaaggaaatactgagaaatatatgtatgtatgcatatatatacacacatatgtatatacacatacatatatattcaattatattttatttataattttagaagttctgtgtctggagggttctgagattatctgacctactgtttaataaatatggactgaatgaattaatatatatatataaattaagtctattttatgaatctatctatagaatacactcagaggtgttaccaatattttgtacaaagaaattcattgtaaaagtattatttataatcaggcaggatagggaaaactggaaagtggttaagtgaattagggtatgtccatttgagaaaatattatgcagccattgaaattatgtttcaaggtatttttaaaggtgtaagaaaatgtagatatattattcatcaaagtaagttaaaatatgttaattttaaaaagtcatagaaagcccttataataaatgtgtcaaaagttaacagtgtttacctgtaattctcatacacttctgtgctctcaaagttttctacattcatacacatttatactttttgtaatcagagaaaataaaaggatggagtgaaatgaaatttaaagctgcattcaygaaataaatatagagcatctataatattataggtatggcaacaatgctgccatcttttcagccagcatttacagtgaaattacggttaataagacaattaaagaatagtgtcttctgattagaaaaccttccccaacaactagatagccagaaaacgtttgtggagataaaactagaaaatgttactagttgtcacttatcttttttcattctccagtaacaaatagaggaaggtagatattcagcaaggcagaaatcaatgcagtgagttttctctttccaggttgaccctagaacacctttgttgcatttctctgggatccagga

SEQ ID NO: 689832 - DNA, 1937 bp, Homo sapiens
ggacatactttcccatcatgatcagttcagagagagaattcatcagccagtttgccttagaaacaccacacaacatccaacaaatccaaggctgagccaagagaaggtttagccaaagtagataaacacaagaaatccccttttcaatcaagaatatttcccctacaatttttcactgtaaattgtgcatcttgatgggcaaccagtcattccctcctgtagccttcctgtgacaccagcaggacatctgggcagatgtgtccacagatggactctgcccaccaggaggaaggtggagcccccagccacgtatctgagagttggttaggacagaccttagttgaaattataactagttagtaaaaaatctaatcttgggaatcccctcttgaaaaaatgttgcaattttaagtactctatcaatattgtggaagatccaataaaaatatcataaaatgaaaaattttccagcccattaagcctgactttttaaaatagtacatttcacatttgcttaaatcggatttaggcagggaaaaattttagttgaaatttttttttttttttttttttttttcgagatggagtctcgctctttctcccaggctggagtgcagkggcgctatctcagctcactgcaagctccgcctcccgggttcacgccattctcctgcctcagcctcccgagtagctgggactacaggcgcccgccaccacgcccagctaattttttgtatttttagtagagacggggtttcaccgtgttagccaggatggtctcgatctcctgaccttgtgatccacctgcctcagcctcccaaagtcctgggattacaggtgtgagccactgcgcccagctgattttagttgaaattataattgcttagtgaaatacataatctttgtgctgagacattttgctatctctgctccctgggaaatgtagcaatagagaatgacaccctacgctgacctgttgaactcaggatatgaatggggcagtagggatctggcgtccagacagctggagacaagctcctgaggtgcctgtatatccccgcctggcggggtacagcttgacaagccctagccccagcctgggaagatgggcagggggcacgggagcaggagctcacagatgagaggggccccaggatcagagaaggctgaagctgtattacttaccagcagcacgccttcccctacatactccatggcttcaagctccatttgccccttataaatggggattataatacttaaaatatcttataggactgttgggaacgtgagtgaggcttagcacaaagccaggaagataataagggctcagtaactgatcattaaggttccctggagcaccacaattgtggggaaatcacaaatgagtgtttctgatggatcattttcaaagggtttttttctcttcaatctccatctccccacccctacccccagtccctgataaacactattctgccatttgcttctgtgagtttgactttttaagattccgtatataagtgaggtcatgcagtatttgtatttctgtacctggcttatttcacttagcatgtcttctaggttcatccatgttgccactgatgacatatttccttctttttcaaggctgaatggtattccattgtgtatatacaccacagactcttatctttagccaaggtaaatctctagctccagcccagaccttctccagtgctctccacaacccactctggaggaattcttttctcttaaactgctcattctccctcaagcacatccccatggagaaccctgggaaatggagaagaggaagtctctgtaaagaattaacagcaggaaggcaagataagtctttaagttcagcagactaaggagctcctcctttttataactttatgcctgccacgtgtgtgcctcacattccaaggaca

SEQ ID NO: 689833 - DNA, 1937 bp, Homo sapiens
ggacatactttcccatcatgatcagttcagagagagaattcatcagccagtttgccttagaaacaccacacaacatccaacaaatccaaggctgagccaagagaaggtttagccaaagtagataaacacaagaaatccccttttcaatcaagaatatttcccctacaatttttcactgtaaattgtgcatcttgatgggcaaccagtcattccctcctgtagccttcctgtgacaccagcaggacatctgggcagatgtgtccacagatggactctgcccaccaggaggaaggtggagcccccagccacgtatctgagagttggttaggacagaccttagttgaaattataactagttagtaaaaaatctaatcttgggaatcccctcttgaaaaaatgttgcaattttaagtactctatcaatattgtggaagatccaataaaaatatcataaaatgaaaaattttccagcccattaagcctgactttttaaaatagtacatttcacatttgcttaaatcggatttaggcagggaaaaattttagttgaaatttttttttttttttttttttttttcgagatggagtctcgctctttctcccaggctggagtgcaggggcgctatctcagctcactgcaagctccgcctcccgggttcacgccattctcctgcctcagcctcccgagtagctgggactacaggcgcccgccaccacgcccagctaattttttgtatttttagtagagacggggtttcaccgtgttagccaggatggtctcgatctcctgaccttgtgatccacctgcctcagcctcccaaagtcctgggattacaggtgtgagccactgcgcccagctgattttagttgaaattataattgcttagtgaaatacataatctttgtgctgagacattttgctatctctgctccctgggaaatgtagcaatagagaatgacaccctacgctgacctgttgaactcaggatatgaatggggcagtagggatctggcgtccagacagctggagacaagctcctgaggtgcctgtatatccccgcctggcggggtacagcttgacaagccctagccccagcctgggaagatgggcagggggcacgggagcaggagctcacagatgagaggggccccaggatcagagaaggctgaagctgtattacttaccagcagcacgccttcccctacatactccatggcttcaagctccatttgccccttataaatggggattataatacttaaaatatcttataggactgttgggaacgtgagtgaggcttagcacaaagccaggaagataataagggctcagtaactgatcattaaggttccctggagcaccacaattgtggggaaatcacaaatgagtgtttctgatggatcattttcaaagggtttttttctcttcaatctccatctccccacccctacccccagtccctgataaacactattctgccatttgcttctrtgagtttgactttttaagattccgtatataagtgaggtcatgcagtatttgtatttctgtacctggcttatttcacttagcatgtcttctaggttcatccatgttgccactgatgacatatttccttctttttcaaggctgaatggtattccattgtgtatatacaccacagactcttatctttagccaaggtaaatctctagctccagcccagaccttctccagtgctctccacaacccactctggaggaattcttttctcttaaactgctcattctccctcaagcacatccccatggagaaccctgggaaatggagaagaggaagtctctgtaaagaattaacagcaggaaggcaagataagtctttaagttcagcagactaaggagctcctcctttttataactttatgcctgccacgtgtgtgcctcacattccaaggaca

SEQ ID NO: 689834 - DNA, 613 bp, Homo sapiens
agtcaatgacccatcaactactttctttcttaatcttcaatagcatttttcttttattctataaaaaacttttaaaccaattagttctcctctgaactatcagacttaaaattgcttgaaattaatgttctttgtaccccagtgagatattgaatctatctaaaaatccttcaataatatgatgccctaaatgtatttcttaagggcttttggctttatctctatagctatgttttcttttaaaaagcgctggagaccttttcacctatggagttatttctatgttattattaaaagagcattcagaataagacatttctcaaaaacmtaatactagaattatatcttgtttgcacaactttccaaacacctttaaaaatattttatgttttcttacctgccttttttccccccactggaaaaaccaaggccattgattctatagttttgtcatcctgatgggatacactacgggccagtgtgctcatgcacattccatcctgcaagtgcttacacatggcaattaatttatgaagtacacagatatttaaggaaaaagtcattcacaaataggtatcatatgatgtgaaagtgaaacaaatggaaaaaaatt

SEQ ID NO: 689835 - DNA, 613 bp, Homo sapiens
agtcaatgacccatcaactactttctttcttaatcttcaatagcatttttcttttattctataaaaaacttttaaaccaattagttctcctctgaactatcagacttaaaattgcttgaaattaatgttctttgtaccccagtgagatattgaatctatctaaaaatccttcaataatatgatgccctaaatgtatttcttaagggcttttggctttatctctatagctatgttttcttttaaaaagcgctggagaccttttcacctatggagttatttctatgttattattaaaagagcattcagaataagacatttctcaaaaacctaawactagaattatatcttgtttgcacaactttccaaacacctttaaaaatattttatgttttcttacctgccttttttccccccactggaaaaaccaaggccattgattctatagttttgtcatcctgatgggatacactacgggccagtgtgctcatgcacattccatcctgcaagtgcttacacatggcaattaatttatgaagtacacagatatttaaggaaaaagtcattcacaaataggtatcatatgatgtgaaagtgaaacaaatggaaaaaaatt

SEQ ID NO: 689836 - DNA, 3545 bp, Homo sapiens
aacccaagcttacttgcaccctgaaggtttcactcaagccaggtcactttactgccctggggctccattttcttatttttaacatggaaacaataacgcctgccacagggtaccatgaggagggcgaagagaggatgatgcctgccctctggtgatgctgctggtttgagcaagcctgaggtagggctttcccctgctgcaacaggatcccactttctccaccatcgccatttgtaaccctagctgtggccgttggtctaggggaggaaaatgtccctcgctgggacatggatgtggtgcttttaggagcctgcatggttagtggatgagaagttattcccagaccacttcagggctgcttactggccagacagcacacaaccgtcttccctttctaaacctagagttgaatttaccttcatcttgttctgctcccagaaatcatccttctgtttcttgctttgtatgctcctgtaatgtaaaaatagttggcagctttttcaaaaactatgtagctgcctaaaatcaagaatttctataatttaacctgattattaaatcccttaaggaaaaacaaagatgaaaagcttttggtaggaaagttacattgtgaaaggatgattttgctacttatgcagtcagttttattactaaaaacctaaacgtaacccagaaatttaaatatcctgagatgtggtttttctttgaaaatcactaaattgtgctgagtgtaggggttcagctaattgtgagaatctctttttgatgacgtcattacccagagaaagaagagctgcccccaaatctgctcaacagggaatccagtgcctccactgaaataacaatccttttgtttaaggcaacaaatctctccataaatcaaaatatttttcaacagagaaagtgttgcttcagaattgatgaataattttaaaaattctatttctattcttacataagatggttaattacaaggatttgaatcactagtaatcgaaggatcaacaaaatatattggctgggctctgtggctggcatctgtaatcccagcactttgggaggccaacgcaggaagatgacttgaggccaggagttggagagcagcctggccaacatagtgaaaaccatctttacaaattttgttttaattagctgagtggggtgtttgcatgcctgtaggcccagctactccagaggctgaggcaggactggatcccttgagcttgggaagtcacacctgcagagagccatgatcatgccactgcactccagcctgggcaacagagcaagaccccatctcctatatatacatagagagagagactatattcagcaagaaaaggatttctgttttaatatgccttcattaatttggaagataatggcaatgctgaactttacctaagcccagttctcctgggaagtgttccaagaaatggacagccccccaggaccccctgccatcccatttctgagataaggccctcctccagcatcgctcagtcactcacatgaggcctgtctcctattcttgagatcccaagggactctgaatgccttccttgtctacctgccttgacacatccccaggctgccagcttcacttcaagatgcctctcactgcaaaaccttctccccaatacggcagcccaaataaagcagtctcagttgatctgtgcattctttctttctcagttttggtgccgtgacttggatagggccagacttcacctggagcccccattgatccccaggtaacgaggcttttggggcccttggtgctccattcctgactggtgctccggagacccaggcctgtgcctgacctcaagtgatctacctcccttggcctcccaaagtgctgggattacaggtgttagccaccactcccatactaaatatttaatattacgaaaaatttaatttgtgtttaacaaaattaaatcattttgacaaacttttattcataagtaatcatgttttgtakgttttgtagtgagtcaactttaagtcaacttaagtttacagtttccaagatctttaggtaatttaaaactgggactgatgcttaattaatgaatatttattatatacctagatcatttgtaagtaagagaacattgaaggattaattactaagcataattttaattttgtataatgtttgcctctttttgttgttgttgttttgttttgaggcagagtctcactctgtcacccaggctggattgcagtggcgcgatcctggctcactgcaacctctgcctcctgggttcaagtgattctcctgcctcagcctcccgagtaactgggactacatgcactcgccaccacgcccagctaatttttgtatttttagtagagacagggtttcaccatgttggccaggaaggtctcgaactcctgaccttgttatctgcccgcctcagcctcccaaagtgttgggattacaggcatgagccaccatgctcagcctcttatttttatatgtacagagaggttatatatatatttgagcctattagtgaagatgcacatttttggcattttgagaagttgtagtataagggatatgtgggtctcagaaagctgtgaaatgtatattcatgagttctgctaacctgttgcaaaatgctggtgtgtgacagtttgcaattatttacctcctaatttgctgtgtgacatagaaattactttggaaaaaagttaaaatcaatatatatgattttactggactctactggaagcaataaaagcagagagaaacaactttgtaagcaatctgtgtaggatatgtttttgctaaagggaaaagagagtacttttgtcctaaagtaaaacgacttgtttttccataataacaaagaggaaagtacaggacaaaacctgaatgaatataggaagttgcagaaggttctcagaaagtgatttttctttgcagtggtcaaagctggctaaggttggttggggtttcgtacataacagagcagctccctcgctgcaatctattgaaagtcagcccttgacacaagggtttatatataaaaaaaaaaaaaagacatttgcgggggtcaagccaagatggccgaataggaacagctccgttctacagctcccagcatgagcaactcagaagacaggtgatttctgcatttccatctgaggtaccgggttcatctcactaggaagtgccagacggtgggtgcaggacagtgggtgcagcacaccgtacacaggcggaagcaggacgaggcattgcctcactcaggaagtgcaagggatcagggaattccctttcctagtcaaagaaaggggtgacagacggcacctggaaaatcgggtcactcccaccctaatactgcgcttttccgatgggcttaaaaaatggcgcaccaggagattatatcccgcacctggctcggagggtcatacgtccacggagtctcgctgattgctagcacagcagtctgagatcaaactgcaaggcggcagtgaggctgggggaggggcgcccaccattgcccaggcttgcttaggtaaacaaa

SEQ ID NO: 689837 - DNA, 1135 bp, Homo sapiens
ttactatatgtattccttaattttagagggagttccttgatttgcaataccaatcagcactttacttgtgaatgtttaatattcattttgtaaacttctaaatttcaggtcctctcttccagtctgaattcacttgctgacgggattaacctcatttctttttaacatttgaaaaaatattataaacttaataaagcacagtcgttcagtctttgtacagttagacatcgtgggagtcaggctactcacctaacatctacagacttcagtttcttcatcttaaaaagtgggatttggactagttcagctatggcagtaggtgatttctgtgcccaaacaagaaactggcaattaattatgagacttactccagctagatgcagccttttctacgtgtatctaggcagccacttaatctgattttatccaagaaatgaaatgyattttctatctttggaccaaacaatctttttaaataaaattctaaatatacaactatgtgtccaggggccttttgaagcttaatgcttatggctgccaccacgtaaacttagaatgacttctaactttctaactctctatcactagccttggagatatctacttcattgggcttgatcatctagagtcaaactccttatcttccactactcctccctctccaccctaagcaaacctacatttctaatttgttttctattgatgctgttatcttctaccaattactcagtaataaaatatcaaagaaatacatagtaattctaggttgtaaaggagttttaagggcccaattaattaccagtggacacattttcaatttagaccttacttgttttttatagtattttagaatgttgaccactcattccttttcacagtcttttggccttcttcttttgttactcaaaaaaaaattagctgtgtttcttttggagcaaaaagagaagaattaggcattgaaggtgctagagaaaaagaatcaatagagacggctaaaatttcaagatcatcttgagggttgagggtgattattagagcaaattcctgagggaccttcatgcttaaaacttgagtcatcctttgaacactgttcttttttcatcttcggctactcaattattgaatattctaagca

SEQ ID NO: 689838 - DNA, 1113 bp, Homo sapiens
tcaaaaatggacattccactctcacatctgcaacctggaattcatcattgaagtaaaacatacatctaaaaaacaaatgatatagtaataatatatccacaatagaatgtgataagtgatatataatagtgtgtcctggtaaggccaacttattctacctggggacatcaggaaatactttatccttataaactaattatatttgcattttaaaagtgtcttgaatagattatatgaaaccatcacagactgctccattcttaacatgagcatgaactagctgctgggaactgcacgtgtgcatagatgtcagttgggagcaagctttgaacttcaccttttcacaactgttatgctccttctccttcatcatctccccaaatttcagaaaaactcacaaaacttctttatagtatcttccctggtgctattataagccactgggtcagtggatagcagttttaagctacttgcttaatggcttataatggtttctctacacttagtatgctcttaagtacctctagtttgtcatctaactgatttatgttatagtaaaagggggcgggcttggaggtttgttggaccagttggctttgaagtgtttgagcagtttccctttagtcaaatgaacacttgctcatagaattgaaagagccccctgcagcacttacagtggttctaaatggctattcccaccattggctgtactgattgtccaggaccctggtcattgctgagcctgaatgccccagtgctggaaaccccagttccttcataatgtgactatgtcttgtccagatccttagtaattcagagaacaaatcagaggcctttgctccagtttggactggaagttaaatggtctcagatggaaagagggcaaagttgtagaatggaggagcaaaatgataacataaagatcatttcacacaacmtcttcaggaaatgagggctcagcaaggtatgatgatttacccaaagacacaacactactgctctggttttctattgctgcatggtaaacaatctattctgtgtggtaaaccatcaaatctagcaacctaaatgaagaactattccgttatagctaatgattgtgagggtcagaaa

SEQ ID NO: 689839 - DNA, 654 bp, Homo sapiens
tgtctgtgttacagcaatgaaaataccaagtctctactagtgccaaatgcaagaagtccagagaacttccctaggacaagcagatttaaagatcttgatgttcagtctgctataatctgaagagaaaatatttctgtaaaaaaatcacctggtaatgatgaccatgatcatgatcatgtttgtgatgatgatgacaacaatgatagcaatgtrgcaatggaaactctcacttaaggagtacatattatgttacagatgctttattcattctacaaatatttatttggcccccactgtatgctagacttggtggtaggcactaagaatagagtggtaagtaaaatctgatgcaatgtctaacctcacggagcttacagtttctctgcacgttttttccagcaagggaagtggggaagacacatgagtaagtgacaaaacaagggtcatctgtaagcagtagccaggacaacatctgactaaagaaaggcaatgtatcccatttcccaaacaaatctggtctcagaaatactaatgtccattgtcattgtgattcatccgcattggtcacctactcccctgatgtcaggagaccccaacaaccctctcggccctataatagcccactcattgcattagcaggtgtgggtagaccat

SEQ ID NO: 689840 - DNA, 1213 bp, Homo sapiens
attatagaaaaacaaataaaataatttaattttctaagaagaaaagcttaaaacaaagcatttttttcccttctggtgctgtgtcagccaaaacaaggctcgtttttccttttgggcttcctgcctggcccctgatgctgaaacccaaggtctctgacatttcattctccactgacattcattgcaccatcaagataatattttttttctggtaaaatttggaacacaactttcttcacgtccttttattatattttgaattttacttgttaattggttaacgactagtaattttcaaaacaacctgttgcttgaattcaattattaacatgaaaaaaatatgggtctttagagatatctgacctgattaaaacagacttctctccatgggatctgctttaatatatacattagcgttacttttattgggcacatgatttcatttctttacatattattttaaatgcttaagcactttgattcacaaaggctaaatattatttacacagcgctggatttggcattaatttgtatgataaaccctttgtatagtgtaccaactcaaactctgtaacaagtggaacctagattatttccaagttctgaattaagaaatccaaattcaggagttttgcagacttgagcagctgtcttcaccacctgtgattcagatttggacagtgttgtaccaggtgtcagcatcgatggtgcccatatttatattcaatgttgaatgttcctctttctgtaccctactttaaaacaaaagcccctaacacattgaagaaatcaaagtttgtctacttgccctttccaaagacatggctctgctcactcaatatcaactttgatttcgaagccaatccagatattaaatagaaggaatgtttggacatatcttcttcatttggaatttcaaattgatatgctttttgacatgtcaagtcctgacacagacaaatcaactagaaagagcaggagattytacatttagaggcttctgatctagtctgtggaagaaattaaggattctttatatatttccactcaaaatagttctttctgtcttcccaatgaaaatattttctattattaaatgattgtaatagattaacaatagtgtagggttgacatctttataataatgaaccatgattccatcctctgattattcattatattaatgggaaccataattttatatttcctgata

SEQ ID NO: 689841 - DNA, 591 bp, Homo sapiens
atcaaaccacacacaggcacggggtgaggtatgcactccatggcaacagcaaccggggttaatagattacattcacccagctccagtgaatgtgtcaggggatgagatgcccccagcagttactacgagagctgtgagaacagaagaagtcagcactgcagcctagagccctcaaggggcacttggaaggtcgtccaagccgaattccctcccctcaaggctggggcagagactctctatcttctatgtctaatgactaaccacagtgggtgttcaaaatcaactccagacatggctcctccctaccrtcagagtggagatgacccaggaggaaggctcatgggctctgggccatctctatgccaaggtctgtttccttggggcagcacagggcacatcaaggatttattctccctgtggaaaagaaaggtgtcaaagtgggaatgcttatgttgaaatatgtgctgggcacttcctgtgtctgcactgaccacttctagagggcatctggggagcttggacctgtctggccagggctggcaggcattgtttccctaggttctttctcatcctcaagccctgaccaagcct

SEQ ID NO: 689842 - DNA, 854 bp, Homo sapiens
aggaggatttttacatatatactcagccaagttactcatcatctattttcatctaccttttgtggtcaagcgcccttagtgcccagtatggagcctggcacacactggccacttaacaaccatgwgtttgtgctgctgaggagggtggtggccacatgcaatatagaaggggcatgcccgcccttcaaatatagcagtcctgaacaagtggatccacatagagaaaatgaacacatttatttatgctcgctcttgttaggcaatgtaaacgtattttgctgtgattcatttaattccctcacacacacaaaaacaaagggctctgctctttttacagatgaggagactgaagcctcaaggagttgagttgttcacagggcatgaaaattaagtgaattatagaaaaaataagtttacaatgcctaacatacagtaagcactaaataagtgttttgattttctttatttggaaagggttgtttgctctaatccactgctccatgtagccactgggacatctccactgattgtgggtagaggggaaggccacgtcctgagaagaccttctccaggggaagaaatgccctgaaaaccacccaaaggagctgctcttgatgcgttgaaacagaaaaagagaacaaagaacatctgggggttcttcctccttttccaagcacaatgcaggctgccattttccatttaaaagcttaaaaaaaattgtagttaataagagaaaaaaaatccctcacaattcttaggggaaatccaaagacagttattctcatcatattttgaggaagtcttgaatccttcactggctgatatcagattctcagaaagcaactgacctgcaa

SEQ ID NO: 689843 - DNA, 660 bp, Homo sapiens
atctgtgcatgctaataaaaatcacattttacaaaggttattaaaactcatgaaaattttaaaaattgatattggtrtttatttaaatcaataaactacattcaatctggtcttgaactattataacacttttctgtcataaaattgctcattaatttcttctgtcagaaatcagtaattttgagtagtaatgtttcttgtaagtttttcattttttctttatgtaaataattagcagaaatttcaactttaaattatcttggattttaatattcttatagacactgctactttaggctaagattttccttgtcaaggtacaattattctacaactcaacagggatattctagtgataagtcaccatccagtatgtaaatgtgttttagtgcttaaataggaggcagctgtttgaattatcttccactaaatgtctgatttctcttcaaagataagtgccagggaacacacatcaccactactaagtgaggtgcggtatgtgctccatgtatccaggacagaaacactctttctctcatttcttataatcacaatttttgccatagtaattgatactgaatatcctaaaggattctggcagaggactaagataaccttcaatagaacatctggtacatgtggattgtgtttgctaatata

SEQ ID NO: 689844 - DNA, 1302 bp, Homo sapiens
aaatgctcatgctattaacaaatccctctaaacccactgccatcaaaactcacccaaacaaacatacgccaacaaacccagacaaatataccactcacgcacaaataagttagcaaaaaaaaagaagcatataccttagggttgaacatagatcagcatcaagcagtcatgtgcaaacttttcaatgaactagctgaaagattcacttgacttcatattacatatttgaatgaatgtggtcaggtactttcttcttggagttggccatgattattaaaagatggactcatagaggaggaggaaaatctttccaatatatatgatttatgagtaaaccttgactagtgtcattagcaactctttcattcaggtctccagaaataatcaatcaaaatatcaggcacagagacgatacaaagtagagaaggccatcacactgaagtcaaatatctagaatctatgcactatgtaattgcttctcaaaccatcttgtggtgaataaccagttttgtttttttatttccaattcatttttatattgattgatattgttggtctatatcacgttcataaaaatgggtctacaagaatagtagggtgttttgacaatatcaaattgctataaaatgtttctattcactggttcttataagtctctctacttatatttctgcagactgtaacaagccatttgtggagatgcaaatgtgggtccacaggttatactttgaatagcacatttctacgtaatctgtgcgccactaaaaggaagacacaagcctcccagcctaccatcattaactccttgtggaacaaaatgaaaaaaacatagaaacaaattttgtgtgttcaaatgcttaaaacctatctccctaacattaccaaagattaacttggcaatgcatacttacctcttactaattttttaacaatatgtcttaagtggacaggaacwtaaatctttaacaataaaaaaattattttctaaaatccatgtattttgaaattctgaaagcactttgatagatcagtgtttgttccgtaaatatttgggacatattatgtgttctagtttctgccttagacattggacctgcttagcctgatgtaaagaagttccctatttagaattccatctagcaaaatatcagatgagggatattagtcactagaagaaaagcccccagatctctagtgggtctgtgaggatagttcccatagtgaccccaggtctctagtgggtctgtgaggatagttcccatagtgacactatcagtgtgaagtaggccaatttaaactggg

SEQ ID NO: 689845 - DNA, 1302 bp, Homo sapiens
aaatgctcatgctattaacaaatccctctaaacccactgccatcaaaactcacccaaacaaacatacgccaacaaacccagacaaatataccactcacgcacaaataagttagcaaaaaaaaagaagcatataccttagggttgaacatagatcagcatcaagcagtcatgtgcaaacttttcaatgaactagctgaaagattcacttgacttcatattacatatttgaatgaatgtggtcaggtactttcttcttggagttggccatgattattaaaagatggactcatagaggaggaggaaaatctttccaatatatatgatttatgagtaaaccttgactagtgtcattagcaactctttcattcaggtctccagaaataatcaatcaaaatatcaggcacagagacgatacaaagtagagaaggccatcacactgaagtcaaatatctagaatctatgcactatgtaattgcttctcaaaccatcttgtggtgaataaccagttttgtttttttatttccaattcatttttatattgattgatattgttggtctatatcacgttcataaaaatgggtctacaagaatagtagggtgttttgacaatatcaaattgctataaaatgtttctattcactggttcttataagtctctctacttatatttctgcagactgtaacaagccatttgtggagatgcaaatgtgggtccacaggttatactttgaatagcacatttctacgtaatctgtgcgccactaaaaggaagacacaagcctcccagcctaccatcattaactccttgtggaacaaaatgaaaaaaacatagaaacaaattttgtgtgttcaaatgcttaaaacctatctccctaacattaccaaagattaacttggcaatgcatacttacctcttactaattttttaacaatatgtcttaagtggacaggaacataaatctttaacaataaaaaaattattttctaaaatccatgtattttgaaattctgaaagcactttgatagatcagtgtttgttccgtaaatatttgggacatattatgtgttctagtttctgccttagacattggacctgcttagcctgatgtaaagaagttccctatttagaattccatctagcraaatatcagatgagggatattagtcactagaagaaaagcccccagatctctagtgggtctgtgaggatagttcccatagtgaccccaggtctctagtgggtctgtgaggatagttcccatagtgacactatcagtgtgaagtaggccaatttaaactggg

SEQ ID NO: 689846 - DNA, 981 bp, Homo sapiens
  misc_feature 881, 882, 883, 884, 885, 886, 887, 888, 889, 890, 891, 892,893, 894, 895, 896, 897, 898, 899, 900, 901, 902, 903, 904,905, 906, 907, 908, 909, 910, 911, 912, 913, 914, 915, 916,917, 918, 919, 920, 921, 922, 923, 924, 925, 926, 927: n = A,T,C or G
  misc_feature 928, 929, 930, 931, 932, 933, 934, 935, 936, 937, 938, 939,940, 941, 942, 943, 944, 945, 946, 947, 948, 949, 950, 951,952, 953, 954, 955, 956, 957, 958, 959, 960, 961, 962, 963,964, 965, 966, 967, 968, 969, 970, 971, 972, 973, 974: n = A,T,C or G
  misc_feature 975, 976, 977, 978, 979, 980: n = A,T,C or G
tgaaccacatggatggtttaaaattttctttgacaatttttaaatgtttttgaaaataacataaaattgcaataaaataagagcacccaatttactacatacaaaagaaaacaatgactaaataccaaaatcataaagcaaacttaagtagcctaatgtaaaggcacatccacagtttagaatattatagaaataaaaatataaatatatagacatataatgtctggtgtgttgaaaataccatgagaagatttttggtataatgttatgataaaaaaatatgattaaaaaaatctatctgtaggatagattttcttttaaaaggcatatactaacttgtgaacagccaatcatattctctggagatagaaatattaataggtcaacattattttcttttttttctctctgatattcaaccctgaggatagtactttgataactggggaggggaccaggagaggaagagtgaactttgttcaaaagaataaaagcagaaatgataaataggtttttaaaaagcttaaaagagaatggttatttttaattaagaaataaaaactaaatggattataatttaagaaaaaaacaaattaaatggcagtgtcatgttttaacaatgtcaagcaaaggaatccaagtgccagccttttgaagcaaagtttcagtagctgtcacctctcccctatattgttcccctaggttgtaaaagactgccaagaagttttcctttgaatgtctttcaataaaaaaggactgttaatcatctggacttctaartctcttatactaatcagcatgtgtgctttagcagccttcaaattgaattagttggatttcccaggagagggtctaaagaacaaaaaaatccctcttccctnnnnnnnnnnnnnnnnnnnnnnnnnnnnnnnnnnnnnnnnnnnnnnnnnnnnnnnnnnnnnnnnnnnnnnnnnnnnnnnnnnnnnnnnnnnnnnnnnnnnt

SEQ ID NO: 689847 - DNA, 475 bp, Homo sapiens
  misc_feature 374, 375, 376, 377, 378, 379, 380, 381, 382, 383, 384, 385,386, 387, 388, 389, 390, 391, 392, 393, 394, 395, 396, 397,398, 399, 400, 401, 402, 403, 404, 405, 406, 407, 408, 409,410, 411, 412, 413, 414, 415, 416, 417, 418, 419, 420: n = A,T,C or G
  misc_feature 421, 422, 423, 424, 425, 426, 427, 428, 429, 430, 431, 432,433, 434, 435, 436, 437, 438, 439, 440, 441, 442, 443, 444,445, 446, 447, 448, 449, 450, 451, 452, 453, 454, 455, 456,457, 458, 459, 460, 461, 462, 463, 464, 465, 466, 467: n = A,T,C or G
  misc_feature 468, 469, 470, 471, 472, 473: n = A,T,C or G
gctattcactatgcttgggaaagatgagaggccaaagaggtgaaaagagaaagaaggaagttatcaatgacaaagttataaatattgatgagtgagcaatctgaacaaaggtcatatcatttattagatgacattgaaaggttatttttactacttcagtgattttgttgcrtattcctataaaagagggatatatgtaaaatgaacaatgttcctgataaagtatgcacaataaagatatttctatgatatggatcacccttgacaacattgtaaagggctagttgtgtttcacccttcctgctggtccccattttcctcataacagactctctcctctactttgacgggtctagtgtcccaattcttgccgnnnnnnnnnnnnnnnnnnnnnnnnnnnnnnnnnnnnnnnnnnnnnnnnnnnnnnnnnnnnnnnnnnnnnnnnnnnnnnnnnnnnnnnnnnnnnnnnnnnntg

SEQ ID NO: 689848 - DNA, 657 bp, Homo sapiens
tgtcattattaccatcattactttgaatatctactgttaactaattttgaatctccttcaaacctagtgtttggggatttctataccaaacaaatatagaatratctagaattttataggagtaaaatttcctccagagttgatcactcctaggaaacaaagctaacctttattcttgctgttttcaactctactgcagaataataaacttcctcctactctttacattattcctggatgctgcagacatatttacatggttctagttcagctcaatactgaatagaaatatttatgatgttttctacattggaaataacttgtgggagctaatattgtaaagtcattgtagtcccagttaaaatcacttaatgggatgtcattatgtatgaagaaaggaatttcccataataaagttttcttgcttactaatatttatccataaaagtttccagacttgtttcttatcatcattttcactttctttaataaatatatagtcaatgagtattttgctggatctaaaatgtgccttatcatcaatttatctccactgcacagtaaatactgaggtcatagttaataattcaaaacaaaaaggaggggaattggggaaagattatgagtaaatttcaaagtgctagattactggagttt

SEQ ID NO: 689849 - DNA, 660 bp, Homo sapiens
ttcaaagctccttgtgattcaagttgtttctgagatttctttgttttgttcttctctccagccaccaggcatcagccctgtggaacagctcgccatgcagagcaggcctgatggcctcaccaacattccactcctgggagtggagcgggttggtgtgatttcttctttttccaggtttcttctgggtcctgggaaagtctttcggacagtccttgcaggcacttgccattgtggccttgtttgggtctactcagggagcacgaggtcttgttgaggttctgctcatggagcatcttctgttttggagaatatcactctgcagcctcccctgaggtacaactgtggccatgtgtcccacttgcaatgccccttgtcttgacattcactgcatctgggagcctttgccacacactgtgcttcaaacttatatacrgttttgctgaagttgtgtttgtgtttctccttctgtttgtggttcaggggtaatttttgaaaagagaacacagtaccttcttttctgtttcactatttagaaccccaaatacattactattaagctggcttctctatctacagacattttttctttgagtcaacttcagtattgctttcagagtaagctttctcaatgaaagatctgatcaccacacgtgctcgctt

SEQ ID NO: 689850 - DNA, 1217 bp, Homo sapiens
tagtgttcctcaagactcttgaatgtaagctccttctaggcagggactttgtctggcttgttcaccccaggatccccatcacccagtagaatgcctgacatattatctgtgctcaatcaacgttggctgaataatgaatgaaaccaaattctccatatgatttccataggcacagagaaatttcaatatgagaacattgctacagagacatacagacattcggaatcagaaagggcttttgaacaacatgcaacttgaggtcttctttgttgacaggaagacgcttaggttcagagagggaagacacttggccaggattccaccagatgttagggctggaacccagctcttctgactccccatctgatgttctttatactacattatgctgtcagtcatgtctttaaggtagaagagaagggtagagaattatgaaacagaaaaacctaagaaaaggaaagcgaagggaaagaaagcatttccactcaagttgagagagagacagatagtcagaaagacagacagacagacacagatatagagaaagacagagagactcaggactgggacctaagaggaattaaatccaaaacatactatgttacatgacagacagcctgagtgttacttcagaacactgagaactctcccctcatcgtgggctcagcagtgcccttgacctttatccatgtgggtcacagcatgagtaaccttggtaaaaatggggaagcctcaatttccactagaagccaacctctattgcctatttcagcctggctagcaaggctttgttttcctcataacctacacaatggtgtcactactaccaacactaccctttccagcagttcaattactactataaaagttcatatctttctaatgcttattatgtgccaggcactgtcctagtattttacatgcattaactcagttaatcctcatagccaccatcgttttacagatgaggttaagtaatctgcctgtgatcatcccattggtaaagagaggagcagcagcacaaaggccagacatctctctsgggttaaagcccagcacaagctgtcctcatgtctcactctggcctttctcctgctatcctttcagaggtcaccttgttttcactgaatcgaaacagattcttccattttattctgatgtgctttaaccacacttcctactcctccatgtctgcaaatatccaaataaaataccgt

SEQ ID NO: 689851 - DNA, 575 bp, Homo sapiens
ggagaggactcaacagaaagggtcctgaatgccaggccacaggaaatacggaggaaagaacagtcattcggctttagccccagcctcctgtgcgcactgcgtaccccctagtcaattacagtacacccccaccccacggccctctatgggtgtcggagtctctccttttctaaacatgcctcttcaaagcaggctagaaaaccctcgacatcagaatccccatcagaaaaacgaaggggctgcggaggtgcttgtaccccttccttgggttgatgttccttctatgagttctcccaatgggcaggattgggagtggtgacctggacacagtcgccttgcagagctgggctcaaacagcatcctcttgccccaggctttcttattcttcagaccccagtgccccccactgccttgccctactgtctgctctctgttctatgtggccgccatcgcctccagctcctcctccacagaatccaaraggtgtgacatcaccccctgcctgaaattggggtcagagctgctggtttgactcaggtggtccctggattccaagctcatgtccagcctgggag

SEQ ID NO: 689852 - DNA, 646 bp, Homo sapiens
gcaaggtagactttttgccagcaattgaagacagtaagtgtgggtgccctctccctttcacaccacttgctggcaggagccccaggggcaacagactgaaggaagtgcccacaggacattccacagtaggccaggctgargggaaatcttcatcaactcttgttccttggaatttaggatttctcacttttaagtcgccatggcctttgaaactaagttttgcagatggagaaactaaaaaactaagggttgttaacatataactattttaaactgagaatttaaaacaaacaaatctcaaattattgcaataaactattccaaaatacagtttgggttcacagatttgtaactacaaatagcttataatacacaaagttcataaccttcaacttgatctgataaagtacctacatgcctcctccatacaaaggaccaagtcagacatttacgaagacagcttgtgccatgtgagtggccaactggccaattctgtgctcctcaatgggctcatctgtgaagtgggcttgaacactgatacctgcctggcagggtagctgtgaaatctaaactagataatataggcaaagcacttggcaatgattgctactcttatcacttagaaattacagcgctaatttaatat

SEQ ID NO: 689853 - DNA, 626 bp, Homo sapiens
tgggctcaagctatcctcccaccttatgcctccccagtagcctggactacaggtgcacgccaccacacctggctaattaaaaacaatttttttctttttctttttttgtagagatgaggtctccctacgttgcccaggctggttttgaacttctggcctcaagcaatcctcccaaagtgctgggattacagaagtgagccactgggcctggccaacaaatcagcccccartcagactttctgttcctcaacagccaataatctccggggactatcctgagtggggtccttcctccagctgccctctttcttccctggggttacttcccagcattacctccctgtcaggcagcagagtcttgggctgatagccactgaggaagacagactgtggtagagaagtgaggaacgggctctggaatacaaccccctctagtccctggagccccgccatcgctaaccctcggcttcaaggatgtgcctccaggtgaccaggcctggctcatctttggctcctctggctagttctcctgccaagcctctctgcacaggcctgggctctgggtccagcatcacgccttgactgccaccgctgatactgataataccaccattgtcatcctcatc

SEQ ID NO: 689854 - DNA, 626 bp, Homo sapiens
tgggctcaagctatcctcccaccttatgcctccccagtagcctggactacaggtgcacgccaccacacctggctaattaaaaacaatttttttctttttctttttttgtagagatgaggtctccctacgttgcccaggctggttttgaacttctggcctcaagcaatcctcccaaagtgctgggattacagaagtgagccactgggcctggccaacaaatcagcccccaatcagactttctgttcctcaacagccaataatctccggggactatcctgagtggggtccttcctccagctgccctctttcttccctggggttrcttcccagcattacctccctgtcaggcagcagagtcttgggctgatagccactgaggaagacagactgtggtagagaagtgaggaacgggctctggaatacaaccccctctagtccctggagccccgccatcgctaaccctcggcttcaaggatgtgcctccaggtgaccaggcctggctcatctttggctcctctggctagttctcctgccaagcctctctgcacaggcctgggctctgggtccagcatcacgccttgactgccaccgctgatactgataataccaccattgtcatcctcatc

SEQ ID NO: 689855 - DNA, 626 bp, Homo sapiens
tgggctcaagctatcctcccaccttatgcctccccagtagcctggactacaggtgcacgccaccacacctggctaattaaaaacaatttttttctttttctttttttgtagagatgaggtctccctacgttgcccaggctggttttgaacttctggcctcaagcaatcctcccaaagtgctgggattacagaagtgagccactgggcctggccaacaaatcagcccccaatcagactttctgttcctcaacagccaataatctccggggactatcctgagtggggtccttcctccagctgccctctttcttccctggggttacttcccagcattacctccctgtcaggcagcagagtcttgggctgatagccactgaggaagacagactgtggtagagaagtgaggaacgggctctggaatacaaccccytctagtccctggagccccgccatcgctaaccctcggcttcaaggatgtgcctccaggtgaccaggcctggctcatctttggctcctctggctagttctcctgccaagcctctctgcacaggcctgggctctgggtccagcatcacgccttgactgccaccgctgatactgataataccaccattgtcatcctcatc

SEQ ID NO: 689856 - DNA, 1535 bp, Homo sapiens
tgctgagactccgggatcccacagggtatgaaaaaggtttcaagctctgcccgggccagatggtccagctgacaaaggccatgctgagcattccttctgtgggggcagatgcgggggcgggctgatggaaggtggggattcccctatcctacttgctcagtgccatggagaactctccctagctgggccaggtgtgcaccagtgacctctcaggcagaggccaaccacacaggctgttctagaggatgcaaacaattgtcttcaggcagaggactgctgcgatctattcggcttggcccatacataattttaaaaagaaaaaggaaaaaaaaacctcaaattaattggtactgtttacaaattaggcccttaatacagattcccagcttctcttcccaagtcagcactggcaagtctggacctacactctcccgaggcaactactggctggagctggacaggcaccacactgttcatatgagaaatgcattctgcagcttacccctgccatttctcactgtctagctgcataattcatgcagattgtttggccactgaaggcatccgagttggtgactcatcccaaaaaatcactccaacgtaataagccctctgttgctgttctcatgcacaatgtgaaggcactttggcactgttggggtgaggacacgctgggtggcccactgacatgcaaggaataaagacatggtcccctaagggagcaagggaggagggacactgtggacacgcaggggctgcctaggagcctctgaaggctgtttcttcagtccctgcaggccagggcctgggggctaaactggacaaaacatgttttgttcttctcctaactgatcacttccatttacagaaacttatcagacaccagacaccaagctaagctttggttaaaagaggggtcatccacacaaaccccacagggtgtaggcctaggaggtaagtatgtgcagagagccaggtgtcagacaacagggaagggggagatcaaggcagctgggaagcacagtcctggatctgtctcaggcactgctgcagtgcccagrgtagagacccggtatttgttacagtcttaatttttaagaagaagaaatccagatttttaagtgtaaatatctgagttctgatgtcagcaatgaatccaaaaaaggaaaaagaaaagccacaagagccagcgccccggttctgaaggccatgctcaattggcaggtgccatcgaggccggagtttgactcagtgcctgcaaagcctggaattcggtcctgtcaggagagcttatgtcccagggctgcctgtgaggagccgggtctgagctgctgcgaacagtgtgtggggcttcctccccaggcttcttccatctgagaagacctgctccagcatccctgtaaggcagcagtctgtccacggctcagctgcccaactgcctgtgcggggctggtgctgcccctctgaggtctgctgttccggtccaacccaatcctgtgggcctacccaacccagggaccacatgggaacccttc

SEQ ID NO: 689857 - DNA, 2613 bp, Homo sapiens
aaaaaatttcaacttaattagaattgaatttattacatcagaaagtaaaataaataaataaacagataaataaataaatctcacaactttccttttcccacacttgccatctaatcaatcacctaccaattccacctgacaattatttctcaaaatgttgcatttctcacctttcccattcccccatattaatccaagtcactatcatttctcctaataaagaagtctacaattcttctcttattttctcccaatctttttcatacatttcagaaacataattttgaaatgcatattaactcatgtaagttamcttttaaaaatcttttaatggctttccattaagtaaataaaagaaatattaaaacccttctcatccagaaggttctgcatttctaaattctttttatcttgccatgtttttatcagaggactggtatgtttttaccagaggactgaaatgaactctcgtactagaagcaccttatcctgttttatgtttccatactaacatatagttcaattttttaaacacattcacttgtaatttctagattaatgtttgtcttcattaaactgtaagaacaatcaccatttgttcaccattatatcttccaggttcaacacagtgcttggaaaatagtagatctaaaaatacgtacttatttaatattgcgtgtggttgttaataattagtttagatgcaatatatttctacgaatctgcaaatgttaatgaataatgagaacaccagccctaaagtttcttttggttttgtttttgtttttatagttttattaattgatatgagggaaataaatgtatattcaatcactacttggtatatatacagatgaaatgaaattagtatttcaaggggatatctgcactctcatgtttattggagcactatatacaatagccaagacataaaagcaatgtaaatatccattaacagatgaattgataaagaagatgtatatatacacataaaggaatactattcggccataaaaaggaatgaaattctgtcatttgtgccaacatggatgagcctagaggcattatgccaagtgaaataagacaggcacagaaagacaaacaccatatgagttcagtcatatgtataatctaaaaagttgatctcatagaatagtttttaccaaaaggtgggaggagtaagtggggagaggagattaggaagaggttcgttaatgggtacaaagttacagttaaataggaggaataagttctagtattccattgcatagtacggtaactatagttaataatatatggtatatttttaaacagaagagaggattttacatattttcaccacaaataaacgataaatgtttgaggtgatgaatatgctaattacttaatttgatcgttatagattgcatacatgcatcagaacattacaccgtaccccataaatatgtaccattgttatatgcacactgtttgattatttcttacactaggataaattggtgtttacactactttgaaccaaggaaaactgagttaaaagaggttgcttagccaataagtttcctaggtcagactctggcagataataagatgtgaatcaggataagtaaagaacagtttgaataatacataccaaggcattgtagtctcaagtgtccctaagcagggaaggctgataaacatttttcaggcaccattagtaattctatcatatgcttgtgccatttagaaggctagagcaattcaatgattcaccacacccaccactaatctttcatttcaaatgctatttactctgagaagaatattaattaaatcagttatatagagatatagtctcatcaagtgcaaaagcaaacacttgaagtactctcatcaagactgatattaatattaggttcatctacaaaatcccctgagtatctgaaaaacacatactttaggttttgaaaaatatttggttccaacatttcaatttattcaagtattttgtttcatttccataatctgtttttgtgcactgctttttcattttaaaaaatgggagtgagttgaaattaattgcttggttgcatgagccttaataattacaaaattctcacatggtttataaagcacactccattttaagagatgcttctgattaggaaaaactgagttaaaatgtggttttatgtatgaatgcccctttggtgaaaaaatagtctgctgaacttttagatagaattattaaaaagttttatatttttctattacaatatcctagatattgtttactttcaattttcctctaatgctccaacaatcgtagagggtatattggatagtctccagaaggtatagtcttctacaaatttctccatgccatgtaatttctaagaactttgaaaccatgtatctatggtctcaaatctctcatgcttgtcacttttacgacttggtctcttttggtccctaaacctccaggttacctcttgccactagtaactggcttctggaagttccttttactcacacaatataagtattaataacgtgtccctttttcattcctcaaagcccgtcttacaataagccattatatttttggactatttttactgaagggacaag

SEQ ID NO: 689858 - DNA, 2613 bp, Homo sapiens
aaaaaatttcaacttaattagaattgaatttattacatcagaaagtaaaataaataaataaacagataaataaataaatctcacaactttccttttcccacacttgccatctaatcaatcacctaccaattccacctgacaattatttctcaaaatgttgcatttctcacctttcccattcccccatattaatccaagtcactatcatttctcctaataaagaagtctacaattcttctcttattttctcccaatctttttcatacatttcagaaacataattttgaaatgcatattaactcatgtaagttaccttttaaaaatcttttaatggctttccattaagtaaataaaagaaatattaaaacccttctcatccagaaggttctgcatttctaaattctttttatcttgccatgtttttatcagaggactggtatgtttttaccagaggactgaaatgaactctcgtactagaagcaccttatcctgttttatgtttccatactaacatatagttcaattttttaaacacattcacttgtaatttctagattaatgtttgtcttcattaaactgtaagaacaatcaccatttgttcaccattatatcttccaggttcaacacagtgcttggaaaatagtagatctaaaaatacgtacttatttaatattgcgtgtggttgttaataattagtttagatgcaatatatttctacgaatctgcaaatgttaatgaataatgagaacaccagccctaaagtttcttttggttttgtttttgtttttatagttttattaattgatatgagggaaataaatgtatattcaatcactacttggtatatatacagatgaaatgaaattagtatttcaaggggatatctgcactctcatgtttattggagcactatatacaatagccaagacataaaagcaatgtaaatatccattaacagatgaattgataaagaagatgtatatatacacataaaggaatactattcggccataaaaaggaatgaaattctgtcatttgtgccaacatggatgagcctagaggcattatgccaagtgaaataagacaggcacagaaagacaaacaccatatgagttcagtcatatgtataatctaaaaagttgatctcatagaatagtttttaccaaaaggtgggaggagtaagtggggagaggagattaggaagaggttcgttaatgggtacaaagttacagttaaataggaggaataagttctagtattccattgcatagtacggtaactatagttaataatatatggtatatttttaaacagaagagaggattttacatattttcaccacaaataaacgataaatgtttgaggtgatgaatatgctaattacttaatttgatcgttatagattgcatacatgcatcagaacattacaccgtaccccataaatatgtaccattgttatatgcacactgtttgattatttcttacactaggataaattggtgtttacactactttgaaccaaggaaaactgagttaaaagaggttgcttagccaataagtttcctaggtcagactctggcagataataagatgtgaatcaggataagtaaagaacagtttgaataatacataccaaggcattgtagtctcaagtgtccctaagcagggaaggctgataaacatttttcaggcaccattagtaattctatcatatgcttgtgccatttagaaggctagagcaattcaatgattcaccacacccaccactaatctttcatttcaaatgctatttactctgagaagaatattaattaaatcagttatatagagatatagtctcatcaagtgcaaaagcaaacacttgaagtactctcatcaagactgatattaatattaggttcatctacaaaatcccctgagtatctgaaaaacacatactttaggttttgaaaaatatttggttccaacatttcaatttattcaagtattttgtttcatttccataatctgtttttgtgcactgctttttcattttaaaaaatgggagtgagttgaaattaattgcttggttgcatgagccttaataattacaaaattctcacatggtttataaagcacactccattttaagagatgcttctgattaggaaaaactgagttaaaatgtggttttatgtatgaatgcccctttggtgaaaaaatagtctgctgaacttttagatagaattattaaaaagttttatatttttctattacaatatcctagatattgtttactttcaattttcctctaatgctccaacaatcgtagagggtatattggatagtctccagaaggtatagtcttctacaaatttctccatgccatgtaatttctaagaactttgaaaccatgtatctatggtctcaaatctctcatgcttgtcacttttacgacttggtctcttttggtccctaaacctccaggttacctcttgccactagtaactggcttctggaagttccttttactcacacaayataagtattaataacgtgtccctttttcattcctcaaagcccgtcttacaataagccattatatttttggactatttttactgaagggacaag

SEQ ID NO: 689859 - DNA, 658 bp, Homo sapiens
ataagtagtaaacttaaagatagttcaatagaattagctgaactgaaacacaaagagagaaaagatagggaaagtagcgaaaagattaaataattacataagtagtaaacttaaagataggttaatagaaattatctaaactgaaatacaaagggagaaaagatagggaaaagggcaaagagattatccagaagctgtgcaaaattttaagtggtctagaaagtatttatttgagttctagaaaaagcaggaagagaacatagcagagtatatatttgaagtaatttatggtagagaactttcaaaaaataatgaaagacttaaataacatatttaacaatcccaatcaggataaactctctctctctctctctctctctctcwcacacacacacacacacacacacacacacacacactttatgcaaaatctgaatagcaaacagtagtgggtggagatagagaggatgtacattatgtataaaagaccaaatatctgaattacagcagacattttgccaggaattatggcaagctagaaaatacctccaatgtggtaaaagtaaaagcctgtcatttcagaaccttacacccaataaaaatctgtttcaaaaatgaaagttgttttttttttttggtggagggggacagagtcttg

SEQ ID NO: 689860 - DNA, 1149 bp, Homo sapiens
taatgtcattaatttggttagatcttttgtttggactttgatttctgaccaatcttagtattcttgtctttaaatgggtagtttaatcaaattacatttcctattataatgaatttgctattacttacatcactttatacatgtactctctgatttaagcttccttgacagttgctttgttttccttcttttgctctatgaactgttttacttgctccatcttctccaatgttgcagaagatacacgactggttttaaattttactaatagttgccattattrttttttttttttgagatggagtcttgctctgttgcccaggctagagtgcagtggcgcgatctcggctcactgccaagctccgcctcctgcctcagcctcctgaatagctgggactacaggcgcctgccaccatgcccggctcattttttttttttttttttttttagcagagatggggtttcaccatgttagccaggatggtctcgatctcctgacctcatgatccacccgcctcagcctcccaaagtgctgggattataggcatgagccaccgcgcccagccatagttgccattaaatttttaaagccattatttaaccttttttactcaatttgtcagagtgaagaataaaataaaaaccaatataagctttagcatttaagcatacctttaaattattttcccttctctacctcttctttatcttcattaacatcacctagggcaagcctatccaaccctctgcccacaggcctcatgctgcccaggacagctttgaatgcggcccaagagaaattcgtaaactttcttaaaacattatgagatttttttgtgtgcgattttttttttaagctcatcagctaatgttagtgtattttatgtgtggcccaagataattctttcttccactgtggcccagggaaaccaaaagattggacacccaggggtttagatgaagattgattttttgtttttttagtaagtacattgagatttataacaattacgacacatctccattttaactgtttcagaaccctgcttatcccaagtccacttaataatttccctattcttgacttcttaattttgcttcatatctccattgttttgctatctataagtaattttgccaaggataaaa

SEQ ID NO: 689861 - DNA, 1109 bp, Homo sapiens
tttcataaatatttggaatgaggcagacttagtctgaattctctcagaattagatcctaagctaagttttgaggagaagcagtttacttgtgtagggaagtgagacaagaaagaagaaaggaggaggggacattaaatatatgttatcaagaacattactactgtgggcaactagaacttgattgttctagcgaactttaagaacaagtgtagaacacatagctcacagctgaggcagttgggacctttatccatgccactgtaccattaagttctcaacatgtttgtcagtgctgggctcagcctgaatgggctcttgtgctgagagagtgcccaggcacataatattctatactaagaaggtggaatttggggggtcatggcctaaaaggctaaatgtgaaagatgtgtatgtggcactgaccatatttgctataatgatgcattgcagggaataacaraaatctgtttataaataatgtttttaaaagacaactgatttcagcatataaaaaagttccttttacaactttgtttgcaaagagtttcagtctgtcttccatctgagacagttgtcctctaaaaataaattgcgatgggttcttgtaagtcatttttttaatcctctttaaacaaataataataagaaatagagagaatggagaaagggaggagagagagagaatatttgtggctataaaattgtaatctaagatttgaatttaaaataaaaagaagggcagagcattgatctgtccatttcttccttccagaatttagaaatattggaagagtcatgcttaagaaaaaaataaaatattagaaaatgaaaaaatgtagagaattagtactctccctcaattcatatgttgaagccctaacccccaacatgttggtattgaaaggtagggcctttggaagctaaataattagattagcaagggtcacactctcataatgagattagtgcctatataagaagaagaggaagatctctctctctctctctctctctctctctctctctttccatgagcatgcactgaggaacagtcatgtgagtacatagtgagaaggtggctgtctgcaagctaggaagaggatcatta

SEQ ID NO: 689862 - DNA, 979 bp, Homo sapiens
tcccagtagagagtgctttacactatctactacctgaagagagagactattacctctgtcagtctgggaacaaatattaagatgtgtttggaagataaaatatatgacttaagctactcctggatagcaatcttattttctttttctttttttcttttcttttcttttcttttctttctttctttcttctttctttctttctttctttctttctttctttctttctttctttctttctttctttctttctttttttagatggagtcttactctattacccaggctggagtgcaatggcatgatctctgctcagtgcaacctccacctcccgggttcaaccgattctcctgcctcagcctccaaagtaactgggactacaggcaaatgccaccatgcccagctaattttttgtatttttagtagagacggggtttcaccatgttagtcaggatgatctcaatctcctgaccttgtgatccgcccgcctcagcctcccaaagtgctgggattacaggcatgagccaccgtgcctggccagcaatcttattttcttacctccctgattttgtctgttctaacttttgcttagaagcaaatgagttattttctttcaaaattcacaaagcactgcttttctgactctcagccatctcagattcctgtgttgtgctttattaacaaagctctatattgctgtctttctaatggcagataactggcttaagaacctcagcatgaccacttcttgcaggatcttactggaagctgctgaaagtgaacagtatttgccaacattctcatctatttcttttaggttctccaaagttccacctgaagaaggcatatcagaaacataacaagcatttccaatctccagtgcagagatacagggatcattgctgcctrcaaagaaatcgggactcagataatttctcatttcaagatttgtatctgcagttttacttttcaatataccaat

SEQ ID NO: 689863 - DNA, 652 bp, Homo sapiens
actgggtatggcggtgcgcccctgtggtcatagctacttgggaggctgaggtgggaggattgctgagcccaggagttttaggctgcagtgagccatgattgcaccactgcactccagcctgggcgacggtgagaccctgcctcaaaaaaaaaaaatatatatatatatatatatatatataatatatatgtattatatattttatatatagtatatttatatgtgtgttatatatatataaaatatatacatataaaaagttgagagtgaggtctcctttccccaycccctcacctgctaccaggtaacctctctctttgggttcttgtggatctgtcactggagaaccgagttcttttcccactttgtgtcggctgcaaagaaagaatatccaattggaaaaggtagtcaggttttactcactggccagggagtggagaagggagccctcactttaaaggcaccttctccctggacagtgggaggcatggagatgaaggactgggtacaggccgggagggtgggactccaggcacattgacgcagatcataacatgcttctccaggcatggcttgtacagaacacgcggtggtcttctcttggagaatggtctttagcattataatgatatgctaatggtctaaaggcaac

SEQ ID NO: 689864 - DNA, 571 bp, Homo sapiens
gccccgaggcaaaatggtgtccgtgtttttgaagatgaaggcattaagacaggagcatttaaatgatttattaatctgtttatgctgtcaaggaggaaacttgaccagtgcagataagtgagctgcgaggcaggggtgacagagagcccgtctccctctgtctccagtgaccttgccctgcaggcgatttgatgggcttgacttaaccttttaatmgtgcagtttcagttgatgtagagaatgttcctttccaaatgtatggcagtggcgctcgttaagtttccctagactgaaggatgtgtgtacaggtattcctcagctgggtgctgcctggctgagtgaggcgggaattgggtggtcaggcaccggtgacctggtcgaatatgactttgctggggtgacccgaggggtgcagccatgtggctctgttgctcgcagttttgtgcctgcctcatctgtcgtttatgaagccttcgaggctcgagcttcttgaaagctgacttgtgttttccaggttcgttataaattctttagcttggggctgttcccacactggagggtcaataaatga

SEQ ID NO: 689865 - DNA, 1006 bp, Homo sapiens
tttcttttttgcagtcagaacactaattcacttgcaccacgtcatcccaagaaagttttatttcactaacaaagtctaaagacaaagagatcaaagaaatctaaatagtgtgttagtgttcactagtctaaaacttggagatcttggttcaggattgcttcccagcaaattttagatttctatgtaggctaatctccattcaggctcagataggytaatacttttttttctcccataggaggacagatgtgagaacatcttagccaagtccttcaaatttatcaaaagaatattgctgaaaaatacattattcagctgttgattcagaaaacttagttttgcaaactattccatgttggccatgttaccagtggctctggtgagaatgactgtaacatctgctctaagctaaactataaagtaactttgtcaccctgtcctttaactagacagctgaggctttaaggggtgatgtctaaggtctgccccatcagctgaaagagtgagcaaatctaagaaggttcaccatgtatgaaaacatgtggaagcaagaggaataacagaaggcaccgatgtgtctgaaatacaccacctgaaagatgccacccctccatttgccaagtccagcccttaatgactttcttgctaagaaagttgcaggggaaaagaacggggtcagtctgccctaaaactcactaaaaggagagttgagggaaatgtttgctggactgagaggcccaaagcatttaagatgtacgaaatggaaagttgaggtcagagaattgaattccctgaacttttctagcacccactctctagggaatttctgagaaaagcaaaagtcaatttcccaactgcttcattcagaggttagggaacctatctctcattaatccaattataaaacagggacttctacttcctcactcatgattaaccccctcacattctggcatccgtgggtttccctctccattctcaagtaagtgacagaggagaatctaac

SEQ ID NO: 689866 - DNA, 1006 bp, Homo sapiens
tttcttttttgcagtcagaacactaattcacttgcaccacgtcatcccaagaaagttttatttcactaacaaagtctaaagacaaagagatcaaagaaatctaaatagtgtgttagtgttcactagtctaaaacttggagatcttggttcaggattgcttcccagcaaattttagatttctatgtaggctaatctccattcaggctcagataggctaatacttttttttctcccataggaggacagatgtgagaacatcttagccaagtccttcaaatttatcaaaagaatattgctgaaaaatacattattcagctgttgattcagaaaacttagttttgcaaactattccatgttggccatgttaccagtggctctggtgagaatgactgtaacatctgctctaagctaaactataaagtaactttgtcaccctgtcctttaactagacagctgaggctttaaggggtgatgtctaaggtctgccccatcagctgaaagagtgagcaaatctaagaaggttcaccatgtatgaaaacatgtggaagcaagaggaataacagaaggcaccgatgtgtctgaaatacaccacctgaaagatgccacccctccatttgccaagtccagcccttaatgactttcttgctaagaaagttgcaggggaawagaacggggtcagtctgccctaaaactcactaaaaggagagttgagggaaatgtttgctggactgagaggcccaaagcatttaagatgtacgaaatggaaagttgaggtcagagaattgaattccctgaacttttctagcacccactctctagggaatttctgagaaaagcaaaagtcaatttcccaactgcttcattcagaggttagggaacctatctctcattaatccaattataaaacagggacttctacttcctcactcatgattaaccccctcacattctggcatccgtgggtttccctctccattctcaagtaagtgacagaggagaatctaac

SEQ ID NO: 689867 - DNA, 1006 bp, Homo sapiens
tttcttttttgcagtcagaacactaattcacttgcaccacgtcatcccaagaaagttttatttcactaacaaagtctaaagacaaagagatcaaagaaatctaaatagtgtgttagtgttcactagtctaaaacttggagatcttggttcaggattgcttcccagcaaattttagatttctatgtaggctaatctccattcaggctcagataggctaatacttttttttctcccataggaggacagatgtgagaacatcttagccaagtccttcaaatttatcaaaagaatattgctgaaaaatacattattcagctgttgattcagaaaacttagttttgcaaactattccatgttggccatgttaccagtggctctggtgagaatgactgtaacatctgctctaagctaaactataaagtaactttgtcaccctgtcctttaactagacagctgaggctttaaggggtgatgtctaaggtctgccccatcagctgaaagagtgagcaaatctaagaaggttcaccatgtatgaaaacatgtggaagcaagaggaataacagaaggcaccgatgtgtctgaaatacaccacctgaaagatgccacccctccatttgccaagtccagcccttaatgactttcttgctaagaaagttgcaggggaaaagaacggggtcagtctgccctaaaactcactaaaaggagagttgagggaaatgtttgctggactgagaggcccaaagcatttaagatgtaygaaatggaaagttgaggtcagagaattgaattccctgaacttttctagcacccactctctagggaatttctgagaaaagcaaaagtcaatttcccaactgcttcattcagaggttagggaacctatctctcattaatccaattataaaacagggacttctacttcctcactcatgattaaccccctcacattctggcatccgtgggtttccctctccattctcaagtaagtgacagaggagaatctaac

SEQ ID NO: 689868 - DNA, 666 bp, Homo sapiens
ccaatttcggctattccttttcacttttttttcagtgtggcttctagaaaactttaaattatacctgaggctcacattgcacatctagtgggatggtcctgctctaaactacaagcttcagcaacctcgcaagtatgcggcagcagtgcccgctgggaggtggcgttcccatgttaatggtcaactgctagcacaggctcctgcatttcccaccagctctataccctgtagctggccagagaaggtccatccccaggtccttgctgcaaaaytggcagcagcatgctagctcacccaccaccagacctggaaatcctctccctctcaatgctcttctcagtcctatgctccaggggccctgtcgcccctactcaccatagtatccctcaccatagcacacagtaagccaccaacagatgtgggttaaaagacgaccaggcgcagtggctcacgtgggtaatcccaacactttaggaggccaaggcgggtggatcacttgaggtcaggagttcaagaccagcctggccaacatggtgaaaccccatctctaaatacaaaaattagccaggcgtggtgacatgtgtctgtagtcccagctactcaggaggctgaggcaccaaaatcacttgaacccaggaagcagaggttgcagtgagctgagattgc

SEQ ID NO: 689869 - DNA, 666 bp, Homo sapiens
ccaatttcggctattccttttcacttttttttcagtgtggcttctagaaaactttaaattatacctgaggctcacattgcacatctagtgggatggtcctgctctaaactacaagcttcagcaacctcgcaagtatgcggcagcagtgcccgctgggaggtggcgttcccatgttaatggtcaactgctagcacaggctcctgcatttcccaccagctctataccctgtagctggccagagaaggtccatccccaggtccttgctgcaaaattggcagcagcatgctagctcacccaccaccagacctggaaatcctctccctctcaatgctcttctcagtcctatgctccaggggccctgtcgcccctactcaccatagtatccctcaccatagcacacagtaagccaccaacagatgtgggytaaaagacgaccaggcgcagtggctcacgtgggtaatcccaacactttaggaggccaaggcgggtggatcacttgaggtcaggagttcaagaccagcctggccaacatggtgaaaccccatctctaaatacaaaaattagccaggcgtggtgacatgtgtctgtagtcccagctactcaggaggctgaggcaccaaaatcacttgaacccaggaagcagaggttgcagtgagctgagattgc

SEQ ID NO: 689870 - DNA, 596 bp, Homo sapiens
tacagattatttcattacccaggtgagtattaagcctcgtatccactagttatttttcctgatcctctccctcctcctacccttcaccctcaagcaggcccccrcgtgtgttgttcccctttacgtatccatgtgttctcaacatttagctcctacttataagtgagaacgtgcagtctttggttttctgttcctgtgtaaaaaagcttttaaccagaagacactgaaccacctttaactgacaagtccatgctttccgcagcccttcgccatcagcaggacggggcttgacagcaaggtgagatcagctctaaacgatccagggtgctgttctgcaggtactcacctgagctgcagggcacattttggaaccctcagcaaactcgtctcctaggattaatagaacatatgtcaagtgctcggcagtgtcaagccccacccagagcaggcactccgtgaacatcagcttgttctcctcctccaaggttgggatttcatgcaatacacgtgtttgggtggaaggctcttcctgacaccctgtaactgtactatggtggagaaggcctgctccatccatgcagtcatgtactcaggcg

SEQ ID NO: 689871 - DNA, 596 bp, Homo sapiens
tacagattatttcattacccaggtgagtattaagcctcgtatccactagttatttttcctgatcctctccctcctcctacccttcaccctcaagcaggcccccgcgtgtgttgttcccctttacgtatccatgtgttctcaacatttagctcctacttataagtgagaacgtgcagtctttggttttctgttcctgtgtaaaaaagcttttaaccagaagacactgaaccacctttaactgacaagtccatgctttccgcagcccttcgccatcagcaggacggggcttgacagcaaggtgagatcagctctaaacgatccrgggtgctgttctgcaggtactcacctgagctgcagggcacattttggaaccctcagcaaactcgtctcctaggattaatagaacatatgtcaagtgctcggcagtgtcaagccccacccagagcaggcactccgtgaacatcagcttgttctcctcctccaaggttgggatttcatgcaatacacgtgtttgggtggaaggctcttcctgacaccctgtaactgtactatggtggagaaggcctgctccatccatgcagtcatgtactcaggcg

SEQ ID NO: 689872 - DNA, 651 bp, Homo sapiens
gaaaatatcttaagctcctttttgttctaacatctaatgaccttttttttttcaccagtgggctaaggtcgtacaatggctttagaatgtgagcaagcaggagatagaggtaggaaggggcagcatgcttaacaaaaaagaatgcctccatatccagggctcggccatacaacaccagctgctatgccttatcatggacttctctctcttcactctgagtgatttacttacagatacctctttttagatactggccatattctctctcagtatctccaagtcaggtcaggtyaggtatgggacggatgtggcagtggttttgcgtatcccttgtcccctcccattattgccctgctctcagctcattgtcaaatttctgcagctgacaaacaaaagctgtgagtagaactgtcaaggagtaagtcatttaacagttgagcataacaggtttagacctttggagcatccaaattgttttcatttgggaaataattattgggagtggattgggagctggaaaacacatatagcttagaaaatatctaaatagggagctgaggcaggaaaaaactggaggagccattcaatgtaggatatttgaggttggatagagggttttaggaagcttctaggctcccactttaattccta

SEQ ID NO: 689873 - DNA, 1596 bp, Homo sapiens
ccactctcaaagtcagaacagttatttcatttctcatcatttctagcatgcggtggcctcctatatcccaagacctttttatttccctaggtatgtggctaaagggagtgggtaggaccaaatctttatttcagcattcagctgcagaatgacatatggatctgattaattttcatattttgttttattcaaaatgtcttattgctccctcccaactttttttttttttttttttgcttaaactttggatttgaaataacaaaatattacagtggaagtctgatcattgccctttaaagttttttcttttttattcttctatatgaccaggctttacagaaagctattttactctaagaaattaggtttctggttatcaggagccctaaatagacatgwattacaagaacgtcctttgaaaaccccatgcagcacttgtttcattaaattccatgaagcgaccttaatttagtggaacactggataggctgttcttttaacctattatcactttggccaggcccataaaccatattcatggatgattccatcaagaaggacaacagtgggattaatattatttcaggatacagtaaatgccacaatgatgaagctgtttaagatctggtgctcacggtgtcacactgaatgcattgacatttactctgctatcacttcatttccaatattccttccaaatcagccgatgctaatgcttcagcatgtgtgcagaatacaatttgtgcgggggtggggagactggaaaaagattgtacaagtcttttgccttctttttttccttttggtactgagaatggggaaatatacttggatggtattttacatacactaggacccaagatattaggattgtaggttcccaggcactgggtttcctcctggagttggatcaaaataagtcatggggccccttttagctgtgactgaacatgtggtattggtcagatatgaaccaagaaagcattgcttggagtccttagcgtgttggtatatgaaattgagtacatatgaaaatgaaatgtctataatggcacaccatttagaaggtctaatttataacatttcctgaatctccttggtatttaaatttgatgctcccaacaacagtaaagatactggtagtttttgggaatctcttttagagaaatagcaaagatgttatctacaagaacattactaatgtctagtctcttaaggggttctagctcctcattttgaaggtgagaactcaggtttgaaaggaaattcaaaagttgtctagttcacggttctcaactttcaatatggctacgaatcacctggagcaatttcaataactagattctgggagattccaatccagtaattcggatgtgaggactgagaatctgcatagcatctaactcccaggtgaagtagatgctgctggtctgtaatcatatttctaattacagaccaatcactttaaatatcaaccattgcctacattctgttagatgagcagctagtatatatttaaacctctcttagtaggaggcttctcatattctcttaaagtagtctgtctcatctttgaactctgaatatgagttcttt

SEQ ID NO: 689874 - DNA, 1596 bp, Homo sapiens
ccactctcaaagtcagaacagttatttcatttctcatcatttctagcatgcggtggcctcctatatcccaagacctttttatttccctaggtatgtggctaaagggagtgggtaggaccaaatctttatttcagcattcagctgcagaatgacatatggatctgattaattttcatattttgttttattcaaaatgtcttattgctccctcccaactttttttttttttttttttgcttaaactttggatttgaaataacaaaatattacagtggaagtctgatcattgccctttaaagttttttcttttttattcttctatatgaccaggctttacagaaagctattttactctaagaaattaggtttctggttatcaggagccctaaatagacatgaattacaagaacgtcctttgaaaaccccatgcagcacttgtttcattaaattccatgaagcgaccttaatttagtggaacactggataggctgttcttttaacctattatcactttggccaggcccataaaccatattcatggatgattccatcaagaaggacaacagtgggattaatattatttcaggatacagtaaatgccacaatgatgaagctgtttaagatctggtgctcacggtgtcacactgaatgcattgacatttactctgctatcacttcatttccaatattccttccaaatcagccgatgctaatgcttcagcatgtgtgcagaatacaatttgtgcgggggtggggagactggaaaaagattgtacaagtcttttgccttctttttttccttttggtactgagaatggggaaatatacttggatggtattttacatacactaggacccaagatattaggattgtaggttcccaggcactgggtttcctcctggagttggatcaaaataagtcatggggccccttttagctgtgactgaacatgtggtattggtcagatatgaaccaagaaagcattgcttggagtccttagcgtgttggtatatgaaattgagtacatatgaaaatgaaatgtctataatggcacaccatttagaaggtctaatttataacatttcctgaatctccttggtatttaaatttgatgctcccaacaacagtaaagatactggtagtttttgggaatctcttttagagaaatagcaaagatgttatctacaagaacattactaatgtctagtctcttaaggggttctagctcctcattttgaaggtgagaactcaggtttgaaaggaaattcaaaagttgtctagttcacggttctcaactttsaatatggctacgaatcacctggagcaatttcaataactagattctgggagattccaatccagtaattcggatgtgaggactgagaatctgcatagcatctaactcccaggtgaagtagatgctgctggtctgtaatcatatttctaattacagaccaatcactttaaatatcaaccattgcctacattctgttagatgagcagctagtatatatttaaacctctcttagtaggaggcttctcatattctcttaaagtagtctgtctcatctttgaactctgaatatgagttcttt

SEQ ID NO: 689875 - DNA, 621 bp, Homo sapiens
  misc_feature 189, 190, 191, 192, 193, 194, 195, 196, 197, 198, 199, 200,201, 202, 203, 204, 205, 206, 207, 208, 209, 210, 211, 212,213, 214, 215, 216, 217, 218, 219, 220, 221, 222, 223, 224,225, 226, 227, 228, 229, 230, 231, 232, 233, 234, 235: n = A,T,C or G
  misc_feature 236, 237, 238, 239, 240, 241, 242, 243, 244, 245, 246, 247,248, 249, 250, 251, 252, 253, 254, 255, 256, 257, 258, 259,260, 261, 262, 263, 264, 265, 266, 267, 268, 269, 270, 271,272, 273, 274, 275, 276, 277, 278, 279, 280, 281, 282: n = A,T,C or G
  misc_feature 283, 284, 285, 286, 287, 288: n = A,T,C or G
acttgtatcaacatgattagttccctaaatcctttcacctttcccttctccctttcctgcctgtttgtcagatgttaagcagagagatcttggagagctggcctgttactcttagggaactatcttatgtgtggcatttcctttgcagttgggaaaatgggacagcacagcctggtggcttgtcaggcnnnnnnnnnnnnnnnnnnnnnnnnnnnnnnnnnnnnnnnnnnnnnnnnnnnnnnnnnnnnnnnnnnnnnnnnnnnnnnnnnnnnnnnnnnnnnnnnnnnnatttactctccagtgaagacttttgtcattayggaagttttggtgctttctttctttgtgtgaccccaccttttatagggtgagaatatacatatatatatatgtatatatatatatatatatacacttatatatacttagtagctaagtaccagtttggttgggctgcatttgtgtttattgatcatatatatatatatatatatatatatatatatatatatatatatatataaagtgttttcctctcttcctctataaaacagttcttgctgtggttttcttacttcctttaattgctgaactctggacacaagagttgaaggtaggccg

SEQ ID NO: 689876 - DNA, 1591 bp, Homo sapiens
tgactagaataaggcagaagtgactgtgtgactcagactaggtcacaaaaggcagtgtggcagtgctctcttgtgctctcagatcacttgctctaagaaaarccaactgccatgtcatgagcaggctacggagaggcccacatagcaaggaaccgaagcctccagccaaccgccacatatatgagcatggaggatcctgtagcccagtcgagcctcaggtgattgcagctccactgacaccttgcttgcagccttgtgagagaccatgagccagaacaacccagctaagctgctcccagattcctgaaccacaaatactatgagacaatgtttattgttttaagccgctacgttttggaatttgttgttcagcactagataactaatatatatctatatagttacagatagatataaatatagaatcatgtggtctggaaccagaacagatattctgtatatgtttatatctatatctatatctatattaaaatacatattttggtacctggaagtgaggttccactgtaacaaaaaccaaaaatatgtgagtggctttggaaccaggcagtggacagaagctacaaagctgtgggacttgaaggagaatgttagcaaaagctgaaagtgccttgaacaggctatttgaagaattttggactttgagaaggttactagtaaataaagggagagaacccttttaggaatgggcaaaaacatcaaccttatgtagtggcagagtttagcaacactgtcacctgtagtaatgtggaaggtagaacatgtaactaatgaagtggctagctaaggcaattttcagccagaatactgaagatagtacgtggttcctttttaccacttacagtaaaatgcaagagaaatgatgacctcaaagaagaacaattaaaacaaagggtaccaagacttgctggttttgaatattcccagcctcttcaggcggcaaacaatgttaaaattaagaaatggcttctgagtaaagattgaatcagagtccccaggaaagcgtggtccaaagatgaagccaagggtgtcactgtaaattcttttgttaagacctcagatcttaaatgtggaatcctgtgttagaacctgagaacctaaaaaatgaagttagttcttttggcccagagtatagatgggagaatcttacactgccccttttcaataaattaacactctagttcattttttataaagcgccttactttaaagacatttttgcctgcatttcccaaaatcgctaatcacaacaaccctgagaattagacaggccagatattaataaaacaaccaagccagagtaacgggtgatttgaccaatagctcataattgagtcatgaaagaatctaactttcaatcaagtgcgctgtccacatcatcgaaccacttcatttagtaaatagacacttgaaggtatatctaaaattgtggatagcagaaaaattccaaaggcacttgtctacagatgttttaacattttgtttttaagtcatatttttcttctttgctgaaatctgtaatatttatagaccttccatctgtcaggtgattcctcatcacccaggttct

SEQ ID NO: 689877 - DNA, 1384 bp, Homo sapiens
tgaacagaaccaacagctcagaaatgttttcctagtgcacatgaaaatttctttttctcttggcaatggatatagttcagatgggcggtgttggggtggttctggagtgcagagctgttatgggccctggtaggctgtgctttcctttaggatgaccagtagtttgtcttcggtggaagtttcgtttcttcccctgaggcagcacaaaattattggggaaattactttgttcaagccccagtgtctactctgagagtctgctgcgtgaaaattctcacacagcagagcagtagctgaggtcaaaagacagcattaggtgctttatcagaacatggacagagttattttactcttttaaaatcagtgtctaggcccatctcctagttcttctttcattcctactgcctctgatcatgggcttttttttttttttttttttttaaaaagtcctttattggagggcttctcatttgtccttatttccatgtgaatctttaggtctgtttccatctgctttttctaggaaattcccaaagttctgatatcctaggggcaattctcttggtttttcatttctgttaaaattcatttttgtttgkgcattttctctaccatttcaatggaacttagggaatgagaccaggtgaacacttttcttcaatcagctatcttaaaccttcatttgaccttcttatctcaaataaatccaagattattttccagaaaagccatctttaaaatattctgctttatactaagcagtcagttagctagagttacagaagaaaaacaagttattatttccctcaaattaaaattattatccagaaaatacagaaacagataaaaagaaaattaaaaaaaatctaaaagtctcaccatcatatgcatgataacaatttgatgtgaatagtttgaattttttgtatacacacagaaatgttatcttccctgtaaaatggaataatcattttcaatatagctaatatttattatgcacttagtatagctcaggcacagtgttgagattttattttatttatacattactttatataatcaatttttaatccaatcatttcaacagtactttatacctgggattgctattagtcccttttttacagatgaggaatgatgcttacggagattaattatcttgctcacattcatctgatactcctaactatgacattgtatactctgccatacatatggttttataacctgatttggaaagcaaatctatggatttcttttcatgtcaataactctgcatttctatcacaaatagtaattgctccataatattacatcatatctatattaagtatacatgtagatatatatgtactctacatcatacgttaaaaaaataagtgta

SEQ ID NO: 689878 - DNA, 580 bp, Homo sapiens
ggttcattcaaagtaatgataagctgatgctataatgtcccatccagatctcccttcagaactagaagacttaattacccatctgtatgctgctggcaggcaccccttagccctctactccatttagaactgttggatgaaggtatttgccttgaccaagggaaaacccatatccatcagctgcaggcttccagtggctgcaagatgcagrgatataaaggctaggctctcttgccctggcttgggataattcttaagggttattccagcttcagaaccccctgtagggtagactgaggccttcattgggacagcactatagcccctcttctccctctgctcagtcctgccaacccatgacttcctttccagagacacgaccctaggagtactcctttgtcaactttctatatgttattctcggtctcagaattttttctctggggggcccaatctataacagctacattgggagtggtctgagaaagcagactctatgatacaagtttctagctggttcactttctccccaagaccctgtgagtggtggtggatggagtatagacaacccctggcccaa

SEQ ID NO: 689879 - DNA, 580 bp, Homo sapiens
ggttcattcaaagtaatgataagctgatgctataatgtcccatccagatctcccttcagaactagaagacttaattacccatctgtatgctgctggcaggcaccccttagccctctactccatttagaactgttggatgaaggtatttgccttgaccaagggaaaacccatatccatcagctgcaggcttccagtggctgcaagatgcagagwtataaaggctaggctctcttgccctggcttgggataattcttaagggttattccagcttcagaaccccctgtagggtagactgaggccttcattgggacagcactatagcccctcttctccctctgctcagtcctgccaacccatgacttcctttccagagacacgaccctaggagtactcctttgtcaactttctatatgttattctcggtctcagaattttttctctggggggcccaatctataacagctacattgggagtggtctgagaaagcagactctatgatacaagtttctagctggttcactttctccccaagaccctgtgagtggtggtggatggagtatagacaacccctggcccaa

SEQ ID NO: 689880 - DNA, 626 bp, Homo sapiens
atgtatacatacgtaactaacctgcacattgtgcacatgtaccctaaaacttaaagtataataataataaaataaaataaaaagaaaagaacacttttcaccatcaaaaaaaaaagaaaaccagtatataaatagtaaatattatgcaaacaaatatgctaaatcttgagtaagttactttctgttcgattttgaaaactgctttattaaaaattcaaactgcaatttataaacacatataaacttgaaaaatggttttaatatgaatcagtgaattccctttcaaaatatcaaaatatgctatagttaaaataacatttcaagaatttacattaagtacatttcatgtttcctaagatttcaataaaatacatatcacattaacagagaatatgaggggcttttggctattttgaggtttcaaagaaatatctaaatttgaaaatactgaatttccatttcaatttcctatctcatacaatttactatgtaaaaaaatgttatattgtgacctcagtttttaaatgtaatagttcatcttaatattattttaatattttatcatgtattttaaaattttacttttttrtacataattttcaccaatttagtttctttagaattta

SEQ ID NO: 689881 - DNA, 595 bp, Homo sapiens
tttgatattatattggagccctgtttgtgtggtgacaagtactgaggagatgaagtgttcartaatcgtccacttacatcttattgtttcagtgggactgtgtttagaagctgtgaatttacaagtgttttcccactggaatagctttttccttccggtacctcactctcttccctttctgcagttttccaaatctatttatttgaagccctgaccttcgttaaacattttttcacccttaggtgagacagaaaagctagaaggcactggactcagagcaattacttctcccaataggaaaagtctctggcaaatgcatcagcccctgtagagaagccacttataatggggaactctctgggtgtattttacagtggttattcttctcgtgcctctgacagagaaaaccaagaaattaaagaagagggctgaatccactcatactggatggaagaagaaaagatgacttatctgctgagaagcttatgagtggctacaaggtaagagatggtgagattatttgctgagaatgaaaggattgttgtcagaggcagtgggtataggataagagacagcaaggaggtattaaaatctc

SEQ ID NO: 689882 - DNA, 624 bp, Homo sapiens
ctttgtagggacatggatgaagctggaaaccatcattctcagcaaactatcacaaggacaaaaaaccaaacacctcatgttctcactcataggtgggaattgaacaatgagaacacatggacacaggaaggggaacatcacacaccggagcctgttgtggggtggggggagtgggagaggggatagcattaagagatatacctaatgttaaatgactagtyaatgggtgcagcacaccaacatggcacatgtatacatatgtaacaaaccctaaaacttaaagtataataaaaaaataaaaaataaatctcaagtttttaaaggatatgtttaattctacaaagatattcttccaaatagagatatttccattttaatgtgaatttaagagacttttgactgatcaattttaagcctgctgaagagtagtaactttaaaaacatacagaaggtatccttttctatcttgaagccactagtctgcaattattcagggcacaaatactggttctgtatttgctttatgctctagaaactttaaaaaagactaaatcacattatttgtgtcaaagcactattaagtattattacaatcaaaacttgaatgtatttagtaattctatt

SEQ ID NO: 689883 - DNA, 830 bp, Homo sapiens
tggatccagggcctggagcattgtcttctgtttctcatctccgcttttcactgtatttctgctttagttttttaatccatcccattttgaattcctggggaaaagactgattggtcggccagcttgagtgagggggattcgcccctcgtctaagtcatggccagagaaggcagggtcacatggcatacagtggccgccagagcctgtggctatgaagggaaggagcactcatcagactgccaagtaagttctctggagtatggagggcccaccccactcaagggcaatggggagatgaatatgagatgctcagtgtgctaaggcagaacagccaacgtattaacagtttggctacaagcagcaaaatcaaagcaagagcagctggagagctcattcagcccaagacttcttgcaaccttatggccatttcccaactgaagacggtggggaaggaaaagctsccaagaatgttgattagtagcctgtcaaaatctgtgcacccatcagctggaaaaagttgattcgtgatcaattgtaattccattacacaaatggtgcagaatgtttataatccaaaaaatactgtgcaatgaaacataacatgaagcaagactctggtctctggttttgtctgtttgggaggttaaatcattattctttgagaagggggtaaacattaaataatgctaattgttctgaagaggcaagtagagaaaatatatgagggacaaactctcaaataaatctaaataaaaaatggttacccagtctgaatgagcatgggaaaggccatcctctcacctggcatggacacctgtttttgctcaggt

SEQ ID NO: 689884 - DNA, 830 bp, Homo sapiens
tggatccagggcctggagcattgtcttctgtttctcatctccgcttttcactgtatttctgctttagttttttaatccatcccattttgaattcctggggaaaagactgattggtcggccagcttgagtgagggggattcgcccctcgtctaagtcatggccagagaaggcagggtcacatggcatacagtggccgccagagcctgtggctatgaagggaaggagcactcatcagactgccaagtaagttctctggagtatggagggcccaccccactcaagggcaatggggagatgaatatgagatgctcagtgtgctaaggcagaacagccaacgtattaacagtttggctacaagcagcaaaatcaaagcaagagcagctggagagctcattcagcccaagacttcttgcaaccttatggccatttcccaactgaagacggtggggaaggaaaagctgccaagaatgttgattagtagcctgtcaaaatctgtgcacccatcagctggaaaaagttgattcgtgatcaattgtaattccattacacaaatggtgcagaatgtttataatccaaaaaatactgtgcaatgaaacataacatgaagcaagactctggtctctggttttgtctgtttgggaggttaaatcattattctttgagaagggggtaaacattaaataatgctaattgttctgaagaggcaagtagagaaaatatatgagggacaaactctcaaataaatctaaataaaaaatggttacccagtctgaatgagcatgggaaaggccatcctctcacctggcatggasacctgtttttgctcaggt

SEQ ID NO: 689885 - DNA, 608 bp, Homo sapiens
tttttaagaaaaaaactttattttacagttttataaagcggctttacattaagcacaaacaatccatttactttgtatagaaacaaaatacctttccatctgcaaaaaatcaagttttgctgtatataaaactaacatgtgcacattgtgcttaaactgcaaagtctgtacagctttacaaaggactacccttcagaaggrcatcctgtaaacactttattgcatatttaacatatggtatataacccacatgtacaatggaagagaaacaagaaaagcaaccacaaggaggatgaaaatagcagctttcagtgagagtctgcactgagaaaggagaaggagccacgtctggagagttgtgcttgtgtcatttttgcacttgcttctgtgcgctggatggttcgtggatgaagcctttatgtacaataactcctaaaaggtcaaacttgaccttcatccagaaacttttggctggttttacaactgaagtagcaatagatttaacatcaaagtgaactcaagataagtggaaaaacaaaaacaaacctaatacctataatcttaaagcaaagaaaaacttaaagaaataaaacaataaaatttaaaaa

SEQ ID NO: 689886 - DNA, 1110 bp, Homo sapiens
attgtgcagtatatttttgccttttatctgttctaatgtatgtgtagtggcatcttgtgtttttctaatkactcataatgttgagcacctttttatatgtcatccttatatgtttgtgaaaaggtagctggtctcttttatttctctgtattttcttcttttatgatcagccaagtagatagtctttccaatatctttttgaccaaattagctgttattatctctgactatttagctatgctttataataaaatacacattttcatatatgagttttggttatctgtaactattccaagggaaggtatgtatagttttatataggtgagtatttgaatgataattttattgttgtctaaagctagattgcatcgtaggaatctatccaaagattacatctgtgactgaaaaaacatgtaaaacaagacgaagtgtaataaatactgctagtgctgaagattggcattggattgacaaatgttactctagaaaaataaattttagagtctttggtgagatcttttcacctttgagtatcaaatggacaaagaaacctgatactgtcttaggatatctgtcaatatggacaaactttggtatgttcttacaactaatcagttaatattaggtgaaagagattagaaatgaatgtttttaaacttgggctactttatataaacatttaaactagcaacttaaaatacttaggacttatatttagtttctgtcagaatggaatgaagacataacacgtttcagtggtagttttctaccctatttaagcctgatacttactatttctttttgtaaagacctatgtttaacccattagaatatgtgcggggatgccatgttatttaattaggcctttctatttgtttgctgtataacaaatagaaagttatacagcaaactgtatagctgctgtatagttcttgcccttttaagaactttactatattacacaaaataatatgcttagatttgaaaaatactgtatgcctagatttggaaaataatatatgccttaaaggatagcattcctgtcacattatgtgagtaattatgattgattctgttgataattctaattagctaagtgagttccct

SEQ ID NO: 689887 - DNA, 581 bp, Homo sapiens
aataagccaggcatggtggcatgtgcctgtggtcccagccactcaggaggaagagcagcttgctggggtttgctaggtcattatactgtttatctgtctgcttgctcagcctgaatcttccactgtgctgtgccacctggtgctgagattgtggggttccttctagttctcaggtacctgcagatattgaatgaacctaggattgtatttcaatcaacttcagacactatctatcagctggaagtcatgccgctatttttgcctactactaacacacacacccacaaatgctgccaattttatcaggaggcaccactgatgggaaatgaatcctgatttcagagctgttaaaatgtcacaaaaaaagtgcgtgttgaaattgattgatgaaagacagtwattgtgaataagcaattggcttaagttcatctgcaatgattactttctccaaactcactactctgctctttaaagggatctttaaaggctcttttaccacaaaaccaggacttgcaagtggaagaccatattcctgggaataaatctcaatctgtgttacattttttttgcctctatttctt

SEQ ID NO: 689888 - DNA, 665 bp, Homo sapiens
ttctaaaccccttgtggrctgggtgcagtggctcacgcctgtaatcccagcactttgggggctgaggcgggcagatcacctgaggtcaagagttccagaccagcctggccaacatggtgaaaccccatctctactaaaaatacaaaaattacccaggcctagtggcgtgtgcctgtaatcccagctacttggcagactgaggcaggagaattgcttaaacccaggaggcaggtgttgcagtgagccaaaatcccaccactgcacgcagcctgggggacagagcaagactccatctcaaaataaataaataaataaaccccttatgggcattttacaccccacttaattttcacagcatctcttcaggtggacacttttataatccccagagcaactacctctttggggtgtttcaagcattagtaagtgtaagccccatgtgtaagcccttgatgcatagccgggactcaaaaagagcaactgtcattctaacttatgaccagggacatgccttctctggcctgtcccaggctacaagataaaacggaaaatgtatttctccttccttcttgctaggacattatttttcccgctaacccaatatcgtaagtaacacatttcacaatatttgaatgcagtggtggattaagagccccgtggctgaa

SEQ ID NO: 689889 - DNA, 524 bp, Homo sapiens
aaggggaggtcctgagtttaggcaggctctgggtggctgagccacacttctgatcctctccytcccctggggctcctgtctaatctccttcatgtgaacagaaaacagcacagagcccaggaggtgaatgaggccaagtcttgatcccatcactgtgccagaaggccccagcagtcctcaccacctccaaggactgaatagcaccctgggggacgatggagggaggcagagcctaggagcaggggccccagctgctttcagaccacgttttaccttaaaacatgtgatcaaaattaaaaacctgtatgcatcaaaggacactatcaagagagtgaaagacagcccacagaatgggagatttgcaaatcagatgtctataagagactaatatccagaatatataaagaattcccagaacttgacaaaaaaattccaaacaagccaattcaaaaatgggcaaatggcttgaatagatattttcccccaatagcaaacaaccaagataaaagaaataataataataa

SEQ ID NO: 689890 - DNA, 524 bp, Homo sapiens
aaggggaggtcctgagtttaggcaggctctgggtggctgagccacacttctgatcctctccctcccctggggctcctgtctaatctccttcatgtgaacagaaaacagcacagagcccaggaggtgaatgaggccaagtcttgatcccatcactgtgccagaaggccccagcagtcctcaccacctccaaggactgaatagcaccctgggggacgatggagggaggcagagcctaggagcaggggccccagctgctttcagaccacgttttaccttaaaacatgtgatcaaaattaaaaacctgtatgcatcaaaggacactatcaagagagtgaaagacagcccacagaatgggagatttgcaaatcagatgtctataagagactaatatccagaatatataaagaattcccagaacttgacaaaaaaattccaaacaagccaattcaaaaatgggcaaatggcttgaatagatattttyccccaatagcaaacaaccaagataaaagaaataataataataa

SEQ ID NO: 689891 - DNA, 1197 bp, Homo sapiens
gagtagctgggactacaggcgcccgccaccatgcctggctaattttttgtatttttagtagacacggggtttcaccgtgttaaccaggatggtctccatctcctgacctcgtgatgtgcccgcctcggcctcccaaagtggtgagattacaggcgtgagccaccgagcccggccactttctttaattgttaacaggttactaagtaaatactgggaagagtagtgtcaactctgcattaaaatgtgtacacataagcaaaataaagtctcctaaatatgcttacggtttcaacttatgatgaaatgggcctgcctagaaacaagaaagtgctttcactatgtttctttctattcaggttgccaattcatgtcagcccttctccattaggtagttcaggttactgacagactaggccagtgttagcatttagcaaacagatcaatttagattttaactctggtagtaacatcagaataggagccaccgttatctagccaagtaggccaccgctatgtctgttctgctagttttttttttttttttccttttttttggttaggccagtagtttcctgttgttgctcctgctttgcttgtggaaatctgcttttgatcgatgtgaataccttttgcagggatgggctcttcgaacagttatttttcccttcattgccatcattttcacacccagccacttcatgcatttatttgtacaacttaccaagcmtctgaaacattttgagttttcaaccctcgaattagatgtttcttcacatgaaaatagttaggagtcttacacagagatttatgagaaaaacatatttgcttgaaaataataatcttttaagtatgtataacaattaaattaaaaatcctaagaatggaaaatattctgtataagtatgtatattatcattaaacatattaacaatttaaaattataatttaaaaatacaaattcatgagaattaggtttaaaacaacaatctctgagttagccatgtctctagatgagaatgattagctgtctctaatttactatttttatcattgtttcttgtctatcatcctttttaaagatgcattaggcctggcgcagtggctcaggcctgtaatctcaacactttgggaggctgaggcgggtggataacctgagatcaggagttcaaaaccagcctggccaaaatagcaaagccc

SEQ ID NO: 689892 - DNA, 1157 bp, Homo sapiens
catgagacaaatagcataaaagcattcaagtggtgtaatcctaatcaaaagaaaggaaacaaggtgcttggtttaaactagtaaggctcataatatgggtagataacttaagtttggagcttaagtttggagctctccgtggtaaaatacagtctttatacttggaattattggaatagatgaccataaaaaaaactctcacaagtctaaaaagtgggtatttaatacttatgataacaataccaaaagaaaaaaaaatacagatagcactacgattttattgtttgatccttgcctttcagaaaggcttataatatacttgaagtgactagatctacagaaagatacatattacattgctataaaaacttttatgtcaaaaagagtataagacaagtgtatttagaaaaactatccagcaggggatcatgtagcaggtgaagtgagtattgaaagtgagctgaaattaggataagcaaaaacagagggaaaatacagttatttaaggagaaaaagtgatgccagaaataaatgagcaaaacaaggattaggatctgactaggggtcattttaagactgagttgtgcaaatatatttgaccagtggatttgctacatagaaatcactcatttagtatttgccaaatgaacatggaatgaataaaatgcatttcattagactatctgttactcctccttactgaaagttatttattaatttttttattgttgytattgttggttgctccccttcaagtacttgacttcatgactcactggcttcttttcaatccttttctcatctctttttttctattaaatcactaggtgagctcctgcagactcctggctttagataccatctttatgctgatgacttccaaatattatttccaatctgacctctttgtctctctctgtctgtgtgtgtgtgtgtgtgtgtgtgtgtgtttactacctccttagcatctccacttggatatctgatatagactttaaatttgacatgttcaaaagagaactcttgattttcatttatcattcccacaaaaatttttttctcccccagtcttctccattagtagagagtactgccattcatccagctgacaaatccaaaaaccaaggggttgtattcaatacctaattcccttaaac

SEQ ID NO: 689893 - DNA, 1157 bp, Homo sapiens
catgagacaaatagcataaaagcattcaagtggtgtaatcctaatcaaaagaaaggaaacaaggtgcttggtttaaactagtaaggctcataatatgggtagataacttaagtttggagcttaagtttggagctctccgtggtaaaatacagtctttatacttggaattattggaatagatgaccataaaaaaaactctcacaagtctaaaaagtgggtatttaatacttatgataacaataccaaaagaaaaaaaaatacagatagcactacgattttattgtttgatccttgcctttcagaaaggcttataatatacttgaagtgactagatctacagaaagatacatattacattgctataaaaacttttatgtcaaaaagagtataagacaagtgtatttagaaaaactatccagcaggggatcatgtagcaggtgaagtgagtattgaaagtgagctgaaattaggataagcaaaaacagagggaaaatacagttatttaaggagaaaaagtgatgccagaaataaatgagcaaaacaaggattaggatctgactaggggtcattttaagactgagttgtgcaaatatatttgaccagtggatttgctacatagaaatcactcatttagtatttgccaaatgaacatggaatgaataaaatgcatttcattagactatctgttactcctccttactgaaagttatttattaatttttttattgttgttattgttggttgctccccttcaagtacttgacttcatgactcactggcttcttttcaatccttttctcatctctttttttctattaaatcactaggtgagctcctgcagactcctggctttagataccatctttatgctgatgacttccaaatattatttccaatctgacctctttgtctctctctgtctstgtgtgtgtgtgtgtgtgtgtgtgtgtttactacctccttagcatctccacttggatatctgatatagactttaaatttgacatgttcaaaagagaactcttgattttcatttatcattcccacaaaaatttttttctcccccagtcttctccattagtagagagtactgccattcatccagctgacaaatccaaaaaccaaggggttgtattcaatacctaattcccttaaac

SEQ ID NO: 689894 - DNA, 1376 bp, Homo sapiens
ttttagcaaagcacctgaaaggtcgaaaagatgttgtttctggaatggctggagatttaaagcacaagtgctagaaaagaaaacaaaggaaaattcaattcggatttatcaacaacatgaagccaggagacatgaagctggaaaataagcaagctaattaccatcagtgaataataaattagacctccactaaacagaacaacatttatttaagtagaaataaaaataaaagtacttcttatattgcccataatgttgcacagccattttagtttctttatatattcactggctttatattattttggaaaacataatatcggctctctatacactgaaacaaaaaggtacatttgaggactgtaggaggatatcacatcctgcctgcactcagaaaaaaacattgctcctgaggaaaaattgctgctcttaaatttgctgttgcatttcttagctaagaagcaaagattccttagtggaaggggaacgggacaaggcttagatgttccaactgctctaaaagaaatttaaaaatagagtaattgtaggtagtaattccaaataatacaaaatatttaaactcttattccagtaaaaatgtcttctgtttgtaaagataaagtagaattttgagtttaaattgttgaaaattaatgttgaattgttttttaaatacattgagaaagacacatgtcccattttgtgtccacttatttatatgtgctctgtttcttaacccatacacatttattttttatatgtgtatgtattctatacattattaaatatttgatgtgcatttataaatggtatatttagatatatacatgtccatacatgtatatgtaaatatctgaaagatcattaaatttttctgcgtactgaacactgatatttcaagtgatttgtttcttttttgtgattctctgtgatgtaaacgtctttgtaaaatcatcatgtatttatctatgtcacaagcaaaaaatgttagacatttttattagggtaaaaaatgtaactgcttaatatgtgagaaacagatctggctctttctcctgtatatccttctctataatataataaactttcttagggcttttaagaaatkaaatacctttctcacccctagacaccacctacattttaaactaataggggaaaactaaaattattattgtttcaattttattactttatagtgagccactgtattttttaagagcataaaccatatttgcctagaaccaaatcattcgctgtagatgattcttgcaaactggattgatgtgtaagaagcatattctgatccacacaagatagatggttcaatatcagggccagatgtgaagctcaataattcaaaaatcttcattcaa

SEQ ID NO: 689895 - DNA, 1438 bp, Homo sapiens
ggtggggaggggtgggcakagggtgtgatgtgaaaaccagctcccagatggcctccaatacttgctaccttctaggatttatgtcctgtatatttccctcacacatagaatcagggctaccccgtgtggagaattctgtgaacaggaaagtacataatttttgaggctacatcataaaagtcactatagcttctgccttgggctttttaattgcttagtctagaagaaattaacatccatgatatgaggctactcaaatagctctgtggcaggtcctcagtggagaggaactaaggctgcctgttagccatgtgagtggacttccaagaaagcaaattctccagcttggccaagcctcccatgactatgacctggtaaaatgttatactacaataatacaatagaattgccctatagcaaatatgtacagaataatcatctgatgatggagagttattaaaataaaaaaaacagctcaacagacatctattaagcacctgtttgtggcaggtgatattatagaataggacaagttacttgccttcaagagtccattggcagtgtctgggagacagatctagtcacaggaggtcattaaatgtgcttaaacagaggtttttagagaatattatggagtagacatatatgtctggaagttagaagggctccctgggtaggtatgttcaccttgggccttgagggactaatatgatggtcttctgcatacagactagcctaggtttttgttcacacagcctgggaataggagactgactttacccaaaaaagctggggctttaaggctttgcaagaagatagtgtttgcacttaggacatttgacttacagaaaaggggataaagagtttttagaaaggaggaacagcagagagcaagctcaaaggttggaacatgctcagcattttgaggaaaagaccctcctgtggatggagcatgaggaattaaaggtggagaagagaatggaaggagtcgaccaaatgttggggtgagtcctgcagcaacgcggcctgaagccacatcacaaaatgtgcacattttctgtatttctgaggaatcacctgaatattttaagtggatatttcaaggtcagatatgagtttagaaaatatcagtctgaccttgaatggaagatataatcaaggaaagtgagattaaggggggtgatatggtttggctgtgtctccatccaaatttcatcttgaattgtagctcccataattcccatatgtcatgggaagaacccagtgggagatcactgaatcatgggagcaggtctttcccatgctgttctcatgatagtgaataagtctcatgaaatctgatagttttataaagggcagttcccctgcagacactctcttgcctgctgccatgtaagatgtggtttttgcttctccttcaccttttgccatgattgtg

SEQ ID NO: 689896 - DNA, 632 bp, Homo sapiens
aagcgtggtggtgtgcacctgcagtcccagctactcaggaggctgaggcaggagaatggcgtgaacctgggaggtggagcttgtagtgagccaagattgcgccactgcacttcagcctgggtgacagagcgagactctgtctcaaaaaataaaataaaataaaataaaataaaaataaaaatacaaaaaaaaattagccgggtgtggtggtgggcgcctgtagtcccagctacttgggaggctgaggcagaagaattgcttgaacccgggaggtggaggttgcagtgagctgagatcgcaccactgtactccagcctggcracagagtgagactccatctcaaaaaaaaaaaaaaaaaaaaaggaagaaagcagcaacagtgaaaggatgcggcaaactagttaaattctctttttgattgtgtgtggcctccaaaatagagaggttgtcattgtcaactgttacaatatttaagattacgaggtttggagtctgaaatgctggctttgcctgttgttagctatgtgatcttagactgttcttcaatatctctgaactttagtttcctaattttaaaaatggggataatagtgccacctcataaggttgtgaagattaaattagacaatgca

SEQ ID NO: 689897 - DNA, 1108 bp, Homo sapiens
tctcaagcaaaatagaaatgattgtctatcttcatgctatttcaagtcacttatgtttttgttttcctctgtgatgaggaatgctgaagaatagacagtttttggctttgattttggaatcactaacccttgctttgcagcacgatatcaaggggcttggtttatgaattacacaacttcttacagcagcagacacataattctttttaatatagcttcagattatatgctgtcggttgaacatactgctcaatttctgtttgacaaatacacagttaaagattcaacaatcagaccagaaactacacaaaaatagcaatgggaagacagatttccttgggagagcttgtggttctgaggcatccgttaagggcctgggggtttcttgtggcaaaattcatgataaataatgagaacttttgccctaatgttatttttaccatggaccattttcagtatacaattcagtactatacatgtatatgttcayattgttgtgaaacacatctccagacctttttcatttatactcatcaaacaacaattcccttttccccctccactattattattattattattatttttaagagacagggtcttgctgtgttgcccaggctggagtgcagtagtgtgatcatagctctctgcagcctccaactcctaaactcaagtgatcctcctgactcagcctcttgagtagctgagactacaggtgcacaccaccatgcctggctgattaaaaaaatgttttcttgtagagatagagtctttctctgttgcccaggctagtctcgaactcctggtctcaagtgatcctcctgcctaggacccccaaagtgttgggattatagatataagccacggcatccagcctccactattattttttaaaattcctgaccatttgattgagcaggtgatgactgtatgaatatctaaaataacctttagcttgcaggattattaaaaaactcagagaaccaggagaattaactttaatcaggtttgagataaatccaggaaaagggggttacacctacctaatcctaagagcagaaatgtggtcagggtgtactgtcagaatcccaggtgtaccaattcattg

SEQ ID NO: 689898 - DNA, 1108 bp, Homo sapiens
tctcaagcaaaatagaaatgattgtctatcttcatgctatttcaagtcacttatgtttttgttttcctctgtgatgaggaatgctgaagaatagacagtttttggctttgattttggaatcactaacccttgctttgcagcacgatatcaaggggcttggtttatgaattacacaacttcttacagcagcagacacataattctttttaatatagcttcagattatatgctgtcggttgaacatactgctcaatttctgtttgacaaatacacagttaaagattcaacaatcagaccagaaactacacaaaaatagcaatgggaagacagatttccttgggagagcttgtggttctgaggcatccgttaagggcctgggggtttcttgtggcaaaattcatgataaataatgagaacttttgccctaatgttatttttaccatggaccattttcagtatacaattcagtactatacatgtatatgttcacrttgttgtgaaacacatctccagacctttttcatttatactcatcaaacaacaattcccttttccccctccactattattattattattattatttttaagagacagggtcttgctgtgttgcccaggctggagtgcagtagtgtgatcatagctctctgcagcctccaactcctaaactcaagtgatcctcctgactcagcctcttgagtagctgagactacaggtgcacaccaccatgcctggctgattaaaaaaatgttttcttgtagagatagagtctttctctgttgcccaggctagtctcgaactcctggtctcaagtgatcctcctgcctaggacccccaaagtgttgggattatagatataagccacggcatccagcctccactattattttttaaaattcctgaccatttgattgagcaggtgatgactgtatgaatatctaaaataacctttagcttgcaggattattaaaaaactcagagaaccaggagaattaactttaatcaggtttgagataaatccaggaaaagggggttacacctacctaatcctaagagcagaaatgtggtcagggtgtactgtcagaatcccaggtgtaccaattcattg

SEQ ID NO: 689899 - DNA, 1622 bp, Homo sapiens
cgttagaggttttgagaacttagcagccccccaagaaacctattagataagggaaaaaatatttcactacgttttgctagcttaaaataatcctctacctgaaattcgagttagcattttcagcctggctccgaggtagaatggatggaaataatcagagatcacctggcatgacccattaagaagtacattggaagacaagagcccctgggctgtatctcaccaagtaatagagattttcctctactgtcttttgatgacttataattttaacactgatgacctctccatgatatttgatcactacattcagaagtattccatttggtgttctcaacaacagtatgatattgcatttacatttaaaaattctgacccttttctggggtctaatatttgatgaaatgaaaacctgaattactttagattttgttatgcatttcctctttcagatgtcggcttaagaattcttctgtgtattaaccaaaaaaatcamataaagctcatctttggtttagtgaaaaaagattcccaacttgggaaatgaaagacatagtttcttcctggttctatataaatgttgatatgtcacatctcagagccttaattttcttaattacaaataaaggggttgaactgaactacctgattcccatgtactccttaaactctataatcatgctagacttaatgtgcttttttgagtgtaaaagtttacatttcccttggaaaatatttctcaagttcacccatatttttctccctactttgaagatcagaaaaaaggctctcaataatatagcccaagtatcatcattcagtgatcagttatattaaaccagataactattccatttttaaaaagttaatttcaacccatgtgctgaaagaactttttcataacagctaagaagatgaaatggaaatcagtacattgttttttcttccattttccttcacattaattgtcagctgatgtgaaaagccagtgaagaatccccagggtagagggctggttgatcaagccgctgaatcatcactctgtgaatgtgcggaggatccggagatggttctgtctctcagctgtctgtgagaacaggctgatttccaaaagtcacagctttggtaactcccccacctcccccaacatgcttttattcactgtttaccgaaagcctgcagaatttcagccattgagctaagtgctgagggtacaacaatgagcaagacagagctctgtcctcaaggactaagcagatatgacgtgcagtgtgattaacctacagagaggacacactactgttcagacatattttgagaggtagtttgggacaccttcccaggagaggggttgcctatgcatattaccaaatgatgagcaggagttggccaggcaaatgtgaagggagtgggagtgagaggctccattcagaggcttccatgcagaggctggttgggtcagggatagaagagcagagagagagaatggactgggaatgttggcgtttacctgagccctgtgatcctaaaagacaaaggcagttatataaattccactactccactgtgtcccagaaatggctttctgcggggggccatcatttcccctaggactcagataa

SEQ ID NO: 689900 - DNA, 607 bp, Homo sapiens
ttgtaaaaaatggcttttgtttttttggtcttggttaagaaagttttcccttgggaggctgaggtgggcagatcacttccatttaggagtttgagaccagcctgggcaacatggtaaaaccaagtctctgctaaaaatacaaaaaattagctggttgtggtggtgtgcgcctgtggtcccagctacttggtaggctgrggtggaagtatcacctcaccccagaaagtcgaggttgctgtgagctatgattgtgccactgcattccagcctgggtgacagagtgagaccctatctcaaaaaaggaaaaaaaaaaaaaaaggaaagaacgaaaaagaaaaaaaaagaaagaaaaagaaaaaaaagaaagaaagaaaaagaaaaaaagaaagttttccctatccttaaagattataggtactttctagaatttcttctaagaattctatcactttatttttttccatggaagtctttaatccttctggatttatttttgtacatatataatgttatcaatcatcccttcagtttttctagaggaatagccaactctgtcagcataatttattaaatatcctgtaattttcctaccaaattaaaacattac

SEQ ID NO: 689901 - DNA, 607 bp, Homo sapiens
ttgtaaaaaatggcttttgtttttttggtcttggttaagaaagttttcccttgggaggctgaggtgggcagatcacttccatttaggagtttgagaccagcctgggcaacatggtaaaaccaagtctctgctaaaaatacaaaaaattagctggttgtggtggtgtgcgcctgtggtcccagctacttggtaggctggggtggragtatcacctcaccccagaaagtcgaggttgctgtgagctatgattgtgccactgcattccagcctgggtgacagagtgagaccctatctcaaaaaaggaaaaaaaaaaaaaaaggaaagaacgaaaaagaaaaaaaaagaaagaaaaagaaaaaaaagaaagaaagaaaaagaaaaaaagaaagttttccctatccttaaagattataggtactttctagaatttcttctaagaattctatcactttatttttttccatggaagtctttaatccttctggatttatttttgtacatatataatgttatcaatcatcccttcagtttttctagaggaatagccaactctgtcagcataatttattaaatatcctgtaattttcctaccaaattaaaacattac

SEQ ID NO: 689902 - DNA, 581 bp, Homo sapiens
tgcgggtctctggcctcaggcaggagaggcagccctgggaaagctgctgcccttcccgccaaccaggcctgtgtcctgctgctgccctcccttcaacctgccaygtggtcacctccctgctgtccatcgccctccagctccaagggactatccaatcctggccacttcaaagtagccaagaaatcccctgcatattaagccaactcctctgcaggcttcggcccccagctcctcccaggacctccctggttccccaaatgcatggacttcactgtgtactgtctcccgcccaggaaaaccaggacaggcccagcccatgtcgcccagtagtggcaaggtgggcgcaccgtcggatgtactccacaatgaaggccagccagccctgggcggcatagctgtccccacaggcgcctggcttggccggcacattctggtagatggctgaatggagcttggccaggtcctcctttccaggaatgggcagtgataagtcctggaacgtttccactgtggtggatacctgtggggttgaaggtcagtctgctgcccatcctctggcaatgtctgcaccccaaacccca

SEQ ID NO: 689903 - DNA, 1278 bp, Homo sapiens
caatttaacaaactaacacagttcagtttattaagttacaatctgtaaccacctaatgtagctcagtgtatggtggatactagatataaacaagagtagggaagtctttggcacctgcatgatgcgtgccggcttttaaattcagaaagatgagaagctacaatgcaactttttttttaatctacagataccgccaaaagaagaaatgtttatcagattttgaatgacatagctgtaagttggcggttggcagctttccacataaaatttcatcagcaagtgaaacttgattacagcccaaactagacaaggcaattcaggtgcccrgaccctgaagtccacgtgagactacaggagaacgtgcattatggtgcttgccagccagtctcttgaggaactgcctgtaacagtcatggttgtggggagaaacaactccattttttttaagttttttttttttatggtattaaatataagtcttagcacctttggcatttttgtccaaacagacttcgacatatgaagtggggacataaccctcttcatcttcatttctccgaatgcgggtccagccatcgcctttgtcttcctctatgacatacaatgtttctccttcaactacggaaatcgttccttcattctgacctgaaaaagcaatatcaggatatgttagatgtcttggcaaatgcagggaggaagcaaacagtggccttcgcaatgaaacaagtgtcgtcgaagatgaagtccacacaaaattcaccccactcggaccttctcagatgcacggacccctcacccactgcctcaaaaccatctccttctgcacagaaatgtccaggttcttacctctgtctctctagggaccctctctaagtcctccagggccctctttctcctccctcccagaatggtaagtatttctcactggataaatctttggttctcttctctagtcttcttctgtctcacttggatctctctcaggagaaaggtaccctcgtggctccaactgcttctcttttgtctgttattttttgggggggttgtgggggatggagtcttgctcttgttgcccaggccagagtgctgtggtgcaatctcaactcactgcaacctccacctccccggttcaagcgattctcctgtctcagcctcccgagcagctgagactataggtgtgcaccaccacacccggctaacctttctatttttagtagagatggggtttcaccatgttggtcaggctggtctgactcctgaccttaggtgatccaccag

SEQ ID NO: 689904 - DNA, 1278 bp, Homo sapiens
caatttaacaaactaacacagttcagtttattaagttacaatctgtaaccacctaatgtagctcagtgtatggtggatactagatataaacaagagtagggaagtctttggcacctgcatgatgcgtgccggcttttaaattcagaaagatgagaagctacaatgcaactttttttttaatctacagataccgccaaaagaagaaatgtttatcagattttgaatgacatagctgtaagttggcggttggcagctttccacataaaatttcatcagcaagtgaaacttgattacagcccaaactagacaaggcaattcaggtgcccagaccctgaagtccacgtgagactacaggagaacgtgcattatggtgcttgccagccagtctcttgaggaactgcctgtaacagtcayggttgtggggagaaacaactccattttttttaagttttttttttttatggtattaaatataagtcttagcacctttggcatttttgtccaaacagacttcgacatatgaagtggggacataaccctcttcatcttcatttctccgaatgcgggtccagccatcgcctttgtcttcctctatgacatacaatgtttctccttcaactacggaaatcgttccttcattctgacctgaaaaagcaatatcaggatatgttagatgtcttggcaaatgcagggaggaagcaaacagtggccttcgcaatgaaacaagtgtcgtcgaagatgaagtccacacaaaattcaccccactcggaccttctcagatgcacggacccctcacccactgcctcaaaaccatctccttctgcacagaaatgtccaggttcttacctctgtctctctagggaccctctctaagtcctccagggccctctttctcctccctcccagaatggtaagtatttctcactggataaatctttggttctcttctctagtcttcttctgtctcacttggatctctctcaggagaaaggtaccctcgtggctccaactgcttctcttttgtctgttattttttgggggggttgtgggggatggagtcttgctcttgttgcccaggccagagtgctgtggtgcaatctcaactcactgcaacctccacctccccggttcaagcgattctcctgtctcagcctcccgagcagctgagactataggtgtgcaccaccacacccggctaacctttctatttttagtagagatggggtttcaccatgttggtcaggctggtctgactcctgaccttaggtgatccaccag

SEQ ID NO: 689905 - DNA, 640 bp, Homo sapiens
tcttaagggccaaaagactctttygtgcttctgcatggattgagattttggcaaggaacacatagtacttttgttgaaaggaagaaccagaaagagaagtagatggcagattgaaagcctcttcttgaaagggcctttgatcgtgcctgccacaggacacgtgtcccctccctgatgcaatgtaacctcgtggttcattcctctgatcttggagcctgacactttgccttggggagtccctcctgagccctcccttccctgcacatgagtggagagagccgggatcctcttcccagatgtgtgacatgaggctggctctggctgctacgtgacccctgcctcctggggatcagagcctgggctgagggctgcttctaacaaccaggtcagggactgctggggctgatttgggctcggaacccaagtccttctccaatgcccagcaccacccgagcacccgctagctgctggggtctgctgccaccaccacgttctgacctcccagtgcaccccctgtgtgagcacacagatctcagtggggctcactgggcgcctctgcccgagcccctgctgccttggcttcctgctgtgctggtggcccagtcacagagtggtcaggataaaatggtcattgctggga

SEQ ID NO: 689906 - DNA, 640 bp, Homo sapiens
tcttaagggccaaaagactcttttgtgcttctgcatggattgagattttggcaaggaacacatagtacttttgttgaaaggaagaaccagaaagagaagtagatggcagattgaaagcctcttcttgaaagggcctttgatcgtgcctgccacaggacacgtgtcccctccctgatgcaaygtaacctcgtggttcattcctctgatcttggagcctgacactttgccttggggagtccctcctgagccctcccttccctgcacatgagtggagagagccgggatcctcttcccagatgtgtgacatgaggctggctctggctgctacgtgacccctgcctcctggggatcagagcctgggctgagggctgcttctaacaaccaggtcagggactgctggggctgatttgggctcggaacccaagtccttctccaatgcccagcaccacccgagcacccgctagctgctggggtctgctgccaccaccacgttctgacctcccagtgcaccccctgtgtgagcacacagatctcagtggggctcactgggcgcctctgcccgagcccctgctgccttggcttcctgctgtgctggtggcccagtcacagagtggtcaggataaaatggtcattgctggga

SEQ ID NO: 689907 - DNA, 640 bp, Homo sapiens
tcttaagggccaaaagactcttttgtgcttctgcatggattgagattttggcaaggaacacatagtacttttgttgaaaggaagaaccagaaagagaagtagatggcagattgaaagcctcttcttgaaagggcctttgatcgtgcctgccacaggacacgtgtcccctccctgatgcaatgtaacctcgtggttcattcctctgatcttggagcctgacactttgccttggggagtccctcctgagccctcccttccctgcacatgagtggagagagccgggatcctcttcccagatgtgtgacatgaggctggctctggctgctacgtgacccctgcctcctggggatcagagcctgggctgagggctgcttctaacawccaggtcagggactgctggggctgatttgggctcggaacccaagtccttctccaatgcccagcaccacccgagcacccgctagctgctggggtctgctgccaccaccacgttctgacctcccagtgcaccccctgtgtgagcacacagatctcagtggggctcactgggcgcctctgcccgagcccctgctgccttggcttcctgctgtgctggtggcccagtcacagagtggtcaggataaaatggtcattgctggga

SEQ ID NO: 689908 - DNA, 629 bp, Homo sapiens
aggcattcaagatataatgatgtccaataacattgaaaaagaacacctttttaaaaaattaagattgtttttctcttgaaaataattttgcattaaaagcatgtgctacttttttttctttgaaaagaattcacattacatgtgtgctacttattgatatatggactacattgtggtttgccatattagattataggttttgaaccaaaagtatgatttaaaaggacatgttaaaaataaataatgaagagagtttaataatgtaagagatcmgtatgaacaagtagtgctaagtatgtatctcacttcagctcctgcagtgggactttcacatgcaaatagatgcattatgggtaccagttatatgtagttatctcccttttcctcaagtagatgaacgtatgacaggttgcatttacaataatccctatggataatatttttttctaagtatatacaagatatttttttatacctttattttatcaaacattaagcaataactaaagcaataaacattggtttacaattttcatttatactgtatctcagttgcaatgttgcctagcatgtgacatatcttccactgacatttgtaatgcatgtcaaaataaaaatgatgtttattg

SEQ ID NO: 689909 - DNA, 756 bp, Homo sapiens
  misc_feature 7, 8, 9, 10, 11, 12, 13, 14, 15, 16, 17, 18, 19, 20, 21,22, 23, 24, 25, 26, 27, 28, 29, 30, 31, 32, 33, 34, 35,36, 37, 38, 39, 40, 41, 42, 43, 44, 45, 46, 47, 48, 49,50, 51, 52, 53, 54, 55, 56, 57, 58, 59, 60, 61, 62, 63,64, 65: n = A,T,C or G
  misc_feature 66, 67, 68, 69, 70, 71, 72, 73, 74, 75, 76, 77, 78, 79, 80,81, 82, 83, 84, 85, 86, 87, 88, 89, 90, 91, 92, 93, 94,95, 96, 97, 98, 99, 100, 101, 102, 103, 104, 105, 106: n = A,T,C or G
ataaacnnnnnnnnnnnnnnnnnnnnnnnnnnnnnnnnnnnnnnnnnnnnnnnnnnnnnnnnnnnnnnnnnnnnnnnnnnnnnnnnnnnnnnnnnnnnnnnnnnnnaaccatttattagccatagggaaaaaagaatcattagattgcaagctcacaccaaatatgcaataataaattccagataaattagagatataaatataaaatataaaactataaaagtactagaagaaaatttgggtgctcatttcaataatctcaaatgagaatcgttttcttataaaaatacaaaaaaatccaaaaagtaaraagagtggtaaatttggctaaataaaaagtttctatggttaacattatcataaacaaatttaaaataatagaaaactgccaaaaatatttgcaatgtacaagacaagaattagtgtccttcttcaataaagatcatttataaatcatataggctgaaaataagtacagaatattgtgcagacatttcataaaatgaaaactgccagtggccaataaatatatttaaatgtttaattaataattgaagaaatactagttaaaataataatagcaaatatttttcacctatcctattggcaaatatgataacacatattggtaagaatatggaatgagaaaatgcttcctggcactacaacatgctccaggctcaacctgtatgtttcctggcccaagcttagtatcagctattactccatggagccctgttttgtattattggagca

SEQ ID NO: 689910 - DNA, 655 bp, Homo sapiens
tttcttttgagtagataccgagtagtgaaattgctgggtgaaatggtcattctatttttagttctttgggatatctatagagttctattttcagttatttgagttttctatagaggttgggagctaaacaatggggacacttggatataaagatggagaaaatagattctggggattctaaaataggaaarggtgggagggttgaaaaattacctgttaggtacaatgtttactattagggtgatacattagaagctcaatctccaccattacccatgtaatactcatgtaacaaacaagcacatacaccccctgaatctaaaataaataaataaaaaggctttatgtcctttccttcattcccatgatttgctcctcttaattttgttcctattattctcagtgtctgaattgtccaggtctctcagctctactttgtacagatacaccgttgtggtctttcaacttaagtaatcaaatcacatttttcacaccccttgacttcattatcttgagtaagaggttcattttctggaagtgtcaatttcctcatctgcaaagctaggatgcaaatgctgtttttctagtgttgtctggctggttaaacagcctactatattacctagaagagggcaagctatcagcaaattagcaa

SEQ ID NO: 689911 - DNA, 655 bp, Homo sapiens
tttcttttgagtagataccgagtagtgaaattgctgggtgaaatggtcattctatttttagttctttgggatatctatagagttctattttcagttatttgagttttctatagaggttgggagctaaacaatggggacacttggatataaagatggagaaaatagattctggggattctaaaataggaaagkgtgggagggttgaaaaattacctgttaggtacaatgtttactattagggtgatacattagaagctcaatctccaccattacccatgtaatactcatgtaacaaacaagcacatacaccccctgaatctaaaataaataaataaaaaggctttatgtcctttccttcattcccatgatttgctcctcttaattttgttcctattattctcagtgtctgaattgtccaggtctctcagctctactttgtacagatacaccgttgtggtctttcaacttaagtaatcaaatcacatttttcacaccccttgacttcattatcttgagtaagaggttcattttctggaagtgtcaatttcctcatctgcaaagctaggatgcaaatgctgtttttctagtgttgtctggctggttaaacagcctactatattacctagaagagggcaagctatcagcaaattagcaa

SEQ ID NO: 689912 - DNA, 655 bp, Homo sapiens
tttcttttgagtagataccgagtagtgaaattgctgggtgaaatggtcattctatttttagttctttgggatatctatagagttctattttcagttatttgagttttctatagaggttgggagctaaacaatggggacacttggatataaagatggagaaaatagattctggggattctaaaataggaaagggtgggagggttgaaaaattacctgttaggtacaatgtttactattagggtgatacattagaagctcaatctccaccattacscatgtaatactcatgtaacaaacaagcacatacaccccctgaatctaaaataaataaataaaaaggctttatgtcctttccttcattcccatgatttgctcctcttaattttgttcctattattctcagtgtctgaattgtccaggtctctcagctctactttgtacagatacaccgttgtggtctttcaacttaagtaatcaaatcacatttttcacaccccttgacttcattatcttgagtaagaggttcattttctggaagtgtcaatttcctcatctgcaaagctaggatgcaaatgctgtttttctagtgttgtctggctggttaaacagcctactatattacctagaagagggcaagctatcagcaaattagcaa

SEQ ID NO: 689913 - DNA, 655 bp, Homo sapiens
tttcttttgagtagataccgagtagtgaaattgctgggtgaaatggtcattctatttttagttctttgggatatctatagagttctattttcagttatttgagttttctatagaggttgggagctaaacaatggggacacttggatataaagatggagaaaatagattctggggattctaaaataggaaagggtgggagggttgaaaaattacctgttaggtacaatgtttactattagggtgatacattagaagctcaatctccaccattacccatgtaatactcatgtaacaaacaagcacatacaccccctgaatctaaaataaataaataaaaagkctttatgtcctttccttcattcccatgatttgctcctcttaattttgttcctattattctcagtgtctgaattgtccaggtctctcagctctactttgtacagatacaccgttgtggtctttcaacttaagtaatcaaatcacatttttcacaccccttgacttcattatcttgagtaagaggttcattttctggaagtgtcaatttcctcatctgcaaagctaggatgcaaatgctgtttttctagtgttgtctggctggttaaacagcctactatattacctagaagagggcaagctatcagcaaattagcaa

SEQ ID NO: 689914 - DNA, 655 bp, Homo sapiens
tttcttttgagtagataccgagtagtgaaattgctgggtgaaatggtcattctatttttagttctttgggatatctatagagttctattttcagttatttgagttttctatagaggttgggagctaaacaatggggacacttggatataaagatggagaaaatagattctggggattctaaaataggaaagggtgggagggttgaaaaattacctgttaggtacaatgtttactattagggtgatacattagaagctcaatctccaccattacccatgtaatactcatgtaacaaacaagcacatacaccccctgaatctaaaataaataaataaaaaggctttatgtcctttccttcattcccatgatttgctcctcttaattttgttcctattattctcagtgtctgaattgtccaggtctctcagctcyactttgtacagatacaccgttgtggtctttcaacttaagtaatcaaatcacatttttcacaccccttgacttcattatcttgagtaagaggttcattttctggaagtgtcaatttcctcatctgcaaagctaggatgcaaatgctgtttttctagtgttgtctggctggttaaacagcctactatattacctagaagagggcaagctatcagcaaattagcaa

SEQ ID NO: 689915 - DNA, 2585 bp, Homo sapiens
  misc_feature 1530, 1554, 1555, 1556, 1557, 1558, 1559, 1560, 1561, 1562,1563, 1564, 1565, 1566, 1567, 1568, 1569, 1570, 1571, 1572,1573, 1574, 1575, 1576, 1577, 1578, 1579, 1580, 1581, 1582,1583, 1584, 1585, 1586, 1587, 1588, 1589, 1590, 1591: n = A,T,C or G
  misc_feature 1592, 1593, 1594, 1595, 1596, 1597, 1598, 1599, 1600, 1601,1602, 1603, 1604, 1605, 1606, 1607, 1608, 1609, 1610, 1611,1612, 1613, 1614, 1615, 1616, 1617, 1618, 1619, 1620, 1621,1622, 1623, 1624, 1625, 1626, 1627, 1628, 1629, 1630: n = A,T,C or G
  misc_feature 1631, 1632, 1633, 1634, 1635, 1636, 1637, 1638, 1639, 1640,1641, 1642, 1643, 1644, 1645, 1646, 1647, 1648, 1649, 1650,1651, 1652, 1653: n = A,T,C or G
ggacctagaagtggccataagtctataaaggctgacttttagatgtttctccccttaacctcagcagggtaacatttttaaatagcatgtggcctttccttttaagattgcatatgttcccattggtggtataactttataacttacatttcttttagcaaaattctcttttatgtttgttttttatttttttccccataggaaaccaagagtttcttcattctgtaatggtttttggaattatgtctttttaataatagacttttttgaacattttaataaatctaatataaaagtaaaaacatgtcctcaattttcttccacactggagaaacaggggtgggaaatcagagggagtgatgaatttagaatgttagacttaattagtaagatctgaactggctattggcaccattttttcatttgaaaaaccatttgctacgctttccgctttagggatgcagatacaagttaccacaggtacctgacttcaaaaaatttagagctcagcaggagagatggggagaagacagatagttatgacagtgacagtgcagtgtgataagggacttttcccaaatcccacagtttactaccgacaaatccatgaacagaacctccatatttctaccctttgttaaggtatttaagagagagaaagtaaattttgaattaacttcagtagtttacagacttcttgaaaaggtaagacagccatcaaaaatgaagcgcttggcagatggtgcatgacaccctaaagaaactctagggtgcatggtgtgcacagtgaagtccctgcatggtgcaaagaaaatgagtttggggtgaaatcgctcactcagggatgttaagatttagggaggattggaagaactaccctttcacctgcaaatatgagccttttctaatctttatcctattaaatcaaagtgaatgtctgaccttttaaaaaccttcatagttgaacactttacgatccctttttctttggactttattaactgtttgagcatacattttctgtactaacgtgcatattctactacaacctgagactccatctgtgatcagtctttgcgcagagaatatcaaaaagcagaagtaaattgttaccctcagtaaaaattaactgttaaggcaatcttaagaagttgaaggaacgcattccagggagtaaagggattccttcagaacactctccagtcaaaggataagatgacagggagatgtgcaggggtggcagcatcatgattcctcagcacagtttaaactgtcgcaggtgccaatacttyttgtttttgtcatttatgttgctgtatttgttgcagtttttctggtgtaagattctacatcacaaaaggtccacagactttctctttttaggtctgattttcatttgagcttccagatggtagggcacagatgctcaacactgagtgacattgacaagatgtttctttctcttcctaggacattaaaaaaagtaggttgtatgaatgtctgtgagcaagtgtgtgtatgtgtgtgttnggggtttgcagacgttggagaatnnnnnnnnnnnnnnnnnnnnnnnnnnnnnnnnnnnnnnnnnnnnnnnnnnnnnnnnnnnnnnnnnnnnnnnnnnnnnnnnnnnnnnnnnnnnnnnnnnnnacgacagctatcttagttgaaggaagtagataagagatagggtggaaacaggtgtctctgcaaatgttttgtgaaattaagggagtaggtagttatttttcctcaggagagcactatgatatagttgggatttgcatggcagaatgtggagcttggcttaatatgggagttataaatgactaaactggagtttttgacagtcatgtggaaaggaggagtaaggaaaatgaaagaaaagaaaaacacagaaatcagcaaaattgatgatgagaagccaggggcctacaaagagctacatagagagcagtgaatgtcatgtggaaggctgggatcaaaggatattaaagaacagttctgtctaatgtaacagaaatccaggttagtgcagaaacttggatagccacataaagaatggaagacagtgttaggcatctaccaccccattcccaaaccaagatcttctgggaaccaagaaacactttttctttcagtgaagaggtaagcaaaaggatcccagcaacccttatctacatattatatcttcagacttcactattataatctcctactgcctggattctacatagctgtgttgcctcagagaaggagctgacaatctgtctcatgccctgtggccacatagctactgtgctatgccatcttggtattggaattacaactgtagtctgtcttgttcttggggcaagtagccatgacatcccttcaacttagaggttaaggcacggctgaatcactccagcctggtggcccaaaattcttaagccatgctggaagcagctgttacatcttaccgtgtgaggccaaacagaggtggagcttctatacctatccttccctctagcaccttgggccagaactgaagcaatctcctgggaaaacagtaccttaaccactcagagctgtcacacctc

SEQ ID NO: 689916 - DNA, 664 bp, Homo sapiens
catggcttagaggcattacaatgctttttaattctctttgtctttagcagctcaaaaatctttacaatttttaggtgattcttacacaaaacctttgtggcagacagatggctaatttaacttatgagaaaatgagaacaacaagaagtcaaacgatcaacctgaacaactaaccaatgaaaaaatgaaagcaaatgtaactctattctctttgtattactttttattttgaaaacaaaatcctatgaagtttctgattttgaaaataaaattctctaaagttataattatagcatatcattgtttcctgactgctctgttcctagatgttttcacttactcamccatagacgaagaatagtaagtgtagaaaggatgccgtgagcctattttggtaagtttctagttttggaactgctgcccaaatgtatttaccactaagaagtatatagtgtaatagtccgtatatttaaaaaataattcagttttattatgtgctctgtgcagagaaattaaaagtacaaaaatgacaatatggacttatatatatatgtgtatatatatgtatatatgtgtatatatatgtatatatgtgtatatatatgtgtatatatatgtgtatatatatgtgtatatatatatgtgtgtgtatatatatatgtat

SEQ ID NO: 689917 - DNA, 2173 bp, Homo sapiens
  misc_feature 194, 1409, 1426, 1427, 1428, 1429, 1430, 1431, 1432, 1433,1434, 1435, 1436, 1437, 1438, 1439, 1440, 1441, 1442, 1443,1444, 1445, 1446, 1447, 1448, 1449, 1450, 1451, 1452, 1453,1454, 1455, 1456, 1457, 1458, 1459, 1460, 1461, 1462: n = A,T,C or G
  misc_feature 1463, 1464, 1465, 1466, 1467, 1468, 1469, 1470, 1471, 1472,1473, 1474, 1475, 1476, 1477, 1478, 1479, 1480, 1481, 1482,1483, 1484, 1485, 1486, 1487, 1488, 1489, 1490, 1491, 1492,1493, 1494, 1495, 1496, 1497, 1498, 1499, 1500, 1501: n = A,T,C or G
  misc_feature 1502, 1503, 1504, 1505, 1506, 1507, 1508, 1509, 1510, 1511,1512, 1513, 1514, 1515, 1516, 1517, 1518, 1519, 1520, 1521,1522, 1523, 1524, 1525: n = A,T,C or G
atttgtcattaagattttttaaatgtgatttgaaaacgatactattgagtcttccacttccaggaagatgagcacatgcctttccctatccctcctgctaatggcaatgggaaaccctaggcattatacataaaacaaatgtgggaagactctgaaaggtgggaagcagaaggtagacctaccaggaacctcangacctggggactgacaaggatgtgagttccctgttgtgggtatgtagtgggaggtacatagtaggtgtatatctttaaggggtacatgagatgttttatacaggcatgcaatgtgaaataagcacatcatagagagaatgaggtattcataccctcaagcatttatcctttgagttacaaataatccaattacattattcaagttatttaaaaatattcgattattattgactatagttttatatgtgtgtgtgggcttcatctatcccagacttggagcagatgaaaatggcaacacagaaactccagcaggcatgaaccatccaaaaaagtcccaacaaaaaagcttgttttctctatccaaaggcccaggaaagaggcaggctagtaagacagaaaacttttaggcaataacccctttactcagccaaacaccacagaaaaaaactgtggctgcagcccacccaggccagcaacagtcgtggggggtagcctggagttccactcttcagacaaatctcaaaatcattatatagagtgaaagaaaccaaactaaagaaatacctcctgcatgattccattttaaaaacatactgcttagaacaacagaaagctgatgagcattgcctgggaagctgggaaagaccaagggacaagaagaagcttcagagcatgggatttgctcattatcttcattccctgaacttctccttattaactggaacaagagggtctggaacactcataaattaagttggatgctcccattagttataaaaacaaaacaaacaaaaaataaaaatagaagaagatgaatttcttctctctctgaatttgaatatatatatatagagagagaatatatatatagtccatatatatatatatggactatacatatatatatatatatatggacaagttaggggtaaaatataagattttatcactcaacatatttgaaaaactttaaaagtaaaccactttaacaaatggcagggtcccgtctgcgagggtctgcaggctgaatcctcaatgtgcctgcgtcagttcagacgcaaacaagggctgaacgctacagtccacagagctgaatccaggaaaacccattaacacccttgcatgggataaactgggatgcataatggatcatggcttcaatttattttagtaaatggtccaataatttgaagtgaaaataaataattcatcctnctcttcctctcagcccnnnnnnnnnnnnnnnnnnnnnnnnnnnnnnnnnnnnnnnnnnnnnnnnnnnnnnnnnnnnnnnnnnnnnnnnnnnnnnnnnnnnnnnnnnnnnnnnnnnnttttaagcagagtatgctgttatttgaaaaacacatacatatttgatatttcactcaaaatatatcaaccttcatttggcatatccaggtaatatttttaaatcacttaatttttttttcaccaaaatccacacataaaattgacgctcacgtataaatccacactgggtatttgttctgttagtgtcaagcgctgctgagaacacgaccctatttcccagtgaaatgtggacttcaggatgggaaacctgagtagatcccaacttcagatgacggaagtaaagcccagaggttgcaaatcaatcttttctcttcttttaactttattttccacttacttcataaacattcttccgtttaatcctcacargaaacctacaaggaaaggaggaagaacagtgttgttactgtctccacttcgtaggtgacatccagcaaggtgacaggatttggctgctgcctcccaggttgccatggtgaattccagcccagaaaacaagataacatacagagccaagagtgagaacaccatgggacgtggtgacagagggagatggcagctttgatgggagcactgagggggcaggtaatgcagcctagagatttatggaagacctgcgcttcacttcaatggcaggcaatagtgac

SEQ ID NO: 689918 - DNA, 1555 bp, Homo sapiens
ccacccctcagaaaaatctatgacatcagataaacagagggtgaatcctccttctctggtatgcgacattatcagttaacttttaaatcatcaagtatttattgattccctctttgctccaaactgatacctaacatcttcgagcaccttatttgggaacttaaaagataatcacaacaccaaaatggttttattttacaaataaatatgtctattttgatataaacaactcattcactcattcctacattcatttccaaagaaccgtaagtgtcagggtctctgaataaaagaagcaaaaaaatacaggaagggaagagtatcttacattctttcctgtctctagtttgtttgattgttgtcattgttgattaatatcaaacacacactttttctcatttccactacttactcctttgcaggcttaccaaattctcataaagatcaggtcaatgcccagcacatcatagatactcaatagaggctcacagagcaatgaatgcagatccacttgtcacacctttcaaggtcagaagagagcaacggtggctccagccaggcgccatcctgcccaatgacctagatgctcaggaatctgatcaggccactttgcagaggccgtccaccccactcactgcccatcagtttctattctgatgaccaagaatgagaacaaaggaaatgaaatgccagcaactttcagtctttcctcatccaattggatggcctctttgtttttacctattcagatctgttttgggaactgttaaccaaaggacagtctaagcctctcaaactgccgttcttaacttttaggaagaaaaagtttctcacagttttctccttgcacgaagtggaagatgaggaataatcctggatgtactggatcctctattagagatggcagctgttaccacctaacgatcattctaattccttacagccagtgctatgcatttcaaaagattcccttccacctataaaattccatgagagattggtagcgtgggcagtgttaaaytagcaatcggtgaagaatctgaagctaagtatagggcagcaacttgctggagatgacaaactagtgatctaggaaccaggagttgaaccctggtctttcaaatagtagtaggattacaagagccgttggcattttagagaaaataaactgatgtagatcaatgctgttcaacagaaacttcatgggagccacacgtgtaagttaaacattttccacatttaacacaaattagccacattcacaaagcaaaaggaaacaggtgaaattaatggttttttaatgccaatatattaaaatattatcatctcaacatacagtcaatataaaaatttttcatgagctattttacatgctttgttgtacatagaggacatctgaatttgaactggccccatgtcaagtgtgcaatagctacatgtggctgatgactgccagacaagccagcatataggtaaaggaggaagaataagacaataggctccatttacaaatcaagtgagatttccttcaaaaaaagaaattgtgttgcagtgt

SEQ ID NO: 689919 - DNA, 1555 bp, Homo sapiens
ccacccctcagaaaaatctatgacatcagataaacagagggtgaatcctccttctctggtatgcgacattatcagttaacttttaaatcatcaagtatttattgattccctctttgctccaaactgatacctaacatcttcgagcaccttatttgggaacttaaaagataatcacaacaccaaaatggttttattttacaaataaatatgtctattttgatataaacaactcattcactcattcctacattcatttccaaagaaccgtaagtgtcagggtctctgaataaaagaagcaaaaaaatacaggaagggaagagtatcttacattctttcctgtctctagtttgtttgattgttgtcattgttgattaatatcaaacacacactttttctcatttccactacttactcctttgcaggcttaccaaattctcataaagatcaggtcaatgcccagcacatcatagatactcaatagaggctcacagagcaatgaatgcagatccacttgtcacacctttcaaggtcagaagagagcaacggtggctccagccaggcgccatcctgcccaatgacctagatgctcaggaatctgatcaggccactttgcagaggccgtccaccccactcactgcccatcagtttctattctgatgaccaagaatgagaacaaaggaaatgaaatgccagcaactttcagtctttcctcatccaattggatggcctctttgtttttacctattcagatctgttttgggaactgttaaccaaaggacagtctaagcctctcaaactgccgttcttaacttttaggaagaaaaagtttctcacagttttctccttgcacgaagtggaagatgaggaataatcctggatgtactggatcctctattagagatggcagctgttaccacctaacgatcattctaattccttacagccagtgctatgcatttcaaaagattcccttccacctataaaattccatgagagattggtagcgtgggcagtgttaaactagcaatcggtgaagaatctgaagctaagtatagggcagcaacttgctggagatgacaaactagtgatctaggaaccaggagttgaaccctggtctttcaaatagtagtaggattacaaragccgttggcattttagagaaaataaactgatgtagatcaatgctgttcaacagaaacttcatgggagccacacgtgtaagttaaacattttccacatttaacacaaattagccacattcacaaagcaaaaggaaacaggtgaaattaatggttttttaatgccaatatattaaaatattatcatctcaacatacagtcaatataaaaatttttcatgagctattttacatgctttgttgtacatagaggacatctgaatttgaactggccccatgtcaagtgtgcaatagctacatgtggctgatgactgccagacaagccagcatataggtaaaggaggaagaataagacaataggctccatttacaaatcaagtgagatttccttcaaaaaaagaaattgtgttgcagtgt

SEQ ID NO: 689920 - DNA, 672 bp, Homo sapiens
ccatatcatttcagaggtttcatrgactcattcacacactgctgggggagaggcttgtcagtagatttcaggttaagaacccaggtcacactggctgctacagatgagtgtttatatctgtttagcagttttagatgttaagctacttagggacagggacccttcgtgtatttatctcaacagagcacctggcactgtgcctcatacagctaatcctttaattaattctttttgaatataatatggagaagaaaattaatcattcatccaataaacgtttattgaacatataccatgtgcagtgacctgtgctggttgtcatggaaaatacaaagatttacacaaaacgtagaaggaaaatcagccaacaacacaaggaatggcatgaacaggaagggagtacaggatagaatgggacaaggtaggcttgttaaataaggcaactcagcatggctagaacagagggtgtggagagggcttgctggagccaaggttaggaggtgatgggcagtggaagcaactctcaagcaatattttcctgtggctgagttggcaggaggatcatttgacaatgttcaaaatacattgactctgaaaggtggtgggcagcctcctttattttcctgttttcatgctggaagatggaaaatgggttggatcacactcttcaga

SEQ ID NO: 689921 - DNA, 2828 bp, Homo sapiens
  misc_feature 1729, 1730, 1731, 1732, 1733, 1734, 1735, 1736, 1737, 1738,1739, 1740, 1741, 1742, 1743, 1744, 1745, 1746, 1747, 1748,1749, 1750, 1751, 1752, 1753, 1754, 1755, 1756, 1757, 1758,1759, 1760, 1761, 1762, 1763, 1764, 1765, 1766, 1767: n = A,T,C or G
  misc_feature 1768, 1769, 1770, 1771, 1772, 1773, 1774, 1775, 1776, 1777,1778, 1779, 1780, 1781, 1782, 1783, 1784, 1785, 1786, 1787,1788, 1789, 1790, 1791, 1792, 1793, 1794, 1795, 1796, 1797,1798, 1799, 1800, 1801, 1802, 1803, 1804, 1805, 1806: n = A,T,C or G
  misc_feature 1807, 1808, 1809, 1810, 1811, 1812, 1813, 1814, 1815, 1816,1817, 1818, 1819, 1820, 1821, 1822, 1823, 1824, 1825, 1826,1827, 1828: n = A,T,C or G
ccgaaaggggctgggctagagaaagcttgaaaataactcctttgcaattgtaaaatgtttttggtatgtatcagaaggacacagattattcagacagctcaacaaatcaaattttaaggagcaggatctttccactccagccattgccacattatttttaggcacccccaaattatgaggtgtgtcctggagctattaataatttaataggaattgtgtcattccattggcattttaatacaagaagatacatttatttcccccatgaaagtaatttttataaaataactttaagtcctaagtactgaatatacttaactattatatgtatttattactattaacatgtgttattttttctaataaattctttatatagtttacctgcatagagtacataaattactggttgcttaaagaaaaaagttacatgtttgcctraaatgtcaaaataggtacttcacctgaactttttaatgaatgggcaactaaaaataccccaaatcagccataatgtgatataaaaattcttaaaccttattttcactaaatcaagatgtcgatttattgtaacacaaattttatttcataacacatagtccagggggctatgaaccttgtatgtcttagaggagattaacatttttttatttcatctataggtttaaaatatatatattaaaattctcactagagactaaactgagataactaaactcattttagtgatgggtttagtccgttttagtgattgggccaaggtttgtcaaggtgaactacaaatgcattaatatccacagtgctgccaaatgctgaattattaacactgtcagctcctcggtttcagttcattctctatagaggagtcttgtgagattcatcagaacttagtcttgcaacatgtttaccagcatcctggaggtaacatgtcttcagctgaaaataagatgactctcaaccaaggaaaccactattgaggccagactgaggtttataaatgcaaagaaccagtctgtagtgaaaggagcagatgaagtcaggtgacacctcatgccagatccttgccaagtcactcgagataccaggcagatgacttaaggtggctgttcatttgccaggatcaacagcattatgtacaaaatctattagttatgtatgtcaatgcagtatctgaggaccaaaagggtgctgaaaaatggctccaaaatgacaatggtttatcgatgtattctattgactgggcaaattccttagttctcttaaccaaacatagttatttaaccgaaggagtcctgaatttttcctccagtgaagaaataaaagatttccttgtttctatgctagaaccaccttcaaagttcccatatatccaaattagttttgtgggtaagtgcacattaaaagtagtcttttataaactgggaatttagagtataattatttttgaaaatcaaaggtttttaaactttactcataccttatattctatcttgatgggaaagtgaaataaaaactgatttttatgcacagaatgaataaatgaatacaaaagggttcaagacttgtgaaaactaggatttctgatactctgtttttcaatctttcattcaatagatatgctgcctataaatagaagcattcctgaaaaatattgaattgtggtagtaaaatagtttaatttgtgcataaaacttaataatcctaatatgtttaaacacaagttaaaccnnnnnnnnnnnnnnnnnnnnnnnnnnnnnnnnnnnnnnnnnnnnnnnnnnnnnnnnnnnnnnnnnnnnnnnnnnnnnnnnnnnnnnnnnnnnnnnnnnnncatctggtacatagtatgtgcttaaaagctgtgttgattaaaattatcatacaattagaagaacagacaaggacagaaaaaagtaagcatactctcttaaattacatcaccagtcacatcagatatttaggaagccccaagttaggagtttctaacatttgttttaaactattttttacaggatgaaatgagatgaaacatgggtcaaattacatgtgaagccacacctacctccgcagattttttttttttttccagagtgatagggtctcactatgttgcacaggctggccttgaactcctgtgctcaaggagtcttcctgcctcaggctccctagcagttgagactacaggcacacaccacctcccagcctgatgttttatagagataaaaatatgactaaaactaaccccaaggaaagactcacaagaagaatgatgtcataaatggctcaatgtaaccaatggggtaattgtgggacctgaaggagaagttctacccttttgcctttataaaggacatgtggtacataaacagactaaagtatttagacctcagatcaccttcaactttggtgcaagaggctttttctctgttcatttaacaccttctctgatgatcaatatcttccctaaccaatgccatcaacctgctatcttctgaattccaatggattaaaccataggcctgccaaaaagtagtgaaagataatcaccaaaataatttcattgctatgacagagccttatggcgacaacctccattctttaccaacattttctctatccctaactttcctcttgcagtcccctaacccccctccaaaaaaaaaaaaaacaggcagaggattgggggaaaacagctatgttgggtttatgtttcaaaattctttaaagataaaaatatttttcctcccagttaacagctttaacataaattgattgcaaatgcctctaggagaggtaatatcatgagttccttccacactaagatatatatg

SEQ ID NO: 689922 - DNA, 798 bp, Homo sapiens
cacttacaaaatactaaagtaaaatattaatttttcttgaaaccatcagagagctgatgtcacagtaaccacgtaacctgaaaactaaggtaacatggatctctcccaggagtgatggaatacaaatactggctcacctgtggcatcagaagaaaaatagcacctctctgaaagcaggtaagataaattaaactttttaacaaagtgctaaatgttaagtgtaggctaatgagagagaggagagaaacttcaggtgtggcagatcaaagggaaatttcactctcttacaggctctttttcrtgaacgtctactgggtgctcataagaaagaatggtggtgcggagaagattggacagtatctccttggtgaggcaggctagagagaagaagaaccaccagtgtagaaagaaatgaaatgcactaaagaccctacaaaacaaaaccccgaaatccctgaggaaaaggtagtacatctcagcatccctagaacatggtgaagacccattgtagctgcaatatatgtcgaagaaaagaaacccggcactgtagaaaggaagaaatgcatcctgtgcccagaccatgagaaatcactgtctgttgggagaggagctgagtcacagagaaatgaccactcatgcagcatagcaacacaggtccctaagattgaaacaggactgaaacaggacaactaagaacccaccgtcatacctaccacccactttagcaaacatcaaaacgtaagaaagagaggactactgctgagagaaggacagaagggtagagaaaagatctattca

SEQ ID NO: 689923 - DNA, 798 bp, Homo sapiens
cacttacaaaatactaaagtaaaatattaatttttcttgaaaccatcagagagctgatgtcacagtaaccacgtaacctgaaaactaaggtaacatggatctctcccaggagtgatggaatacaaatactggctcacctgtggcatcagaagaaaaatagcacctctctgaaagcaggtaagataaattaaactttttaacaaagtgctaaatgttaagtgtaggctaatgagagagaggagagaaacttcaggtgtggcagatcaaagggaaatttcactctcttacaggctctttttcatgaacgtctactgggtgctcataagaaagaatggtggtgcrgagaagattggacagtatctccttggtgaggcaggctagagagaagaagaaccaccagtgtagaaagaaatgaaatgcactaaagaccctacaaaacaaaaccccgaaatccctgaggaaaaggtagtacatctcagcatccctagaacatggtgaagacccattgtagctgcaatatatgtcgaagaaaagaaacccggcactgtagaaaggaagaaatgcatcctgtgcccagaccatgagaaatcactgtctgttgggagaggagctgagtcacagagaaatgaccactcatgcagcatagcaacacaggtccctaagattgaaacaggactgaaacaggacaactaagaacccaccgtcatacctaccacccactttagcaaacatcaaaacgtaagaaagagaggactactgctgagagaaggacagaagggtagagaaaagatctattca

SEQ ID NO: 689924 - DNA, 798 bp, Homo sapiens
cacttacaaaatactaaagtaaaatattaatttttcttgaaaccatcagagagctgatgtcacagtaaccacgtaacctgaaaactaaggtaacatggatctctcccaggagtgatggaatacaaatactggctcacctgtggcatcagaagaaaaatagcacctctctgaaagcaggtaagataaattaaactttttaacaaagtgctaaatgttaagtgtaggctaatgagagagaggagagaaacttcaggtgtggcagatcaaagggaaatttcactctcttacaggctctttttcatgaacgtctactgggtgctcataagaaagaatggtggtgcggagaagattggacagtatctccttggtgaggcaggctagagagaagaagaaccaccagtgtagaaagaaatgaaatgcactaaagaccctacaaaacaaaaccccgaaatccctgaggaaaaggtagtacatctcagcatccctagaacatggtgaagacccattgtagctgcaatatatgtcgaagaaaagaaacccggcactgyagaaaggaagaaatgcatcctgtgcccagaccatgagaaatcactgtctgttgggagaggagctgagtcacagagaaatgaccactcatgcagcatagcaacacaggtccctaagattgaaacaggactgaaacaggacaactaagaacccaccgtcatacctaccacccactttagcaaacatcaaaacgtaagaaagagaggactactgctgagagaaggacagaagggtagagaaaagatctattca

SEQ ID NO: 689925 - DNA, 1161 bp, Homo sapiens
gaacccgggaggcggagcttgcagtgagccgagatcccgccactgcactccagcctgggcgacagagcgagactccgtctgaaaaaaaaaaaaaaaaaaaaaatccaaaaaatgataccataagttatgtaaatattataggtagatatcaaataggggacataagatattttataactttaccagctcttattattcacacagaaatctgtctgggtctacattcaggacatatattcatttagaagaagtataatgactctaattttaaaagtatatttattatgcaaattaatagcattccaaattgtcctgacttgaagagtttcttagcaatgaatgtaaaagacttagagtatttttttctttttttcctcttatttcatttttattgctattgtaacactagtattaggtttctatatttaaaacactgatacagattgacaaaatacttacaaaaaaaaaaggagctctacaatagataaagtagggattgttaaattcctggaaaaaggaagatgtagtaattgaggactattagaaactgtaaaaacaagacatggaaccacatcatatttgtctctttgaaccagaataaacttgatcacttaactagtaggtatatcataaatacttattgaactttaattaaaagtgatacagaaagcagaacaattcagacttgtctagccaattacctcttcaaaatgatctgatttcctgtagacctctactctcctcttgttctctttaccattttttcctaatcatctcacatctaaaaaaaaatcatgttcattckctatactccaggaactaagtgcttcacctgatctttgacaccccaggaattctactgaacaacttttcaggcccaattttacttttactttattttccttatcatcgtttgtctaattgagatgaaatttacttaacgtaacatattggcttattccattttgtgttgctataacggaatacctgagacggggtgatttataaagaaaagaggtggatttggctcacagttctgcaagctgcacaagacacatggtgctggcatctgcttaacttatggtgaggcctcaggaagcttgtattcatggcagaaggcaaggggagttggtgagagagagagcaagagagagcagggaa

SEQ ID NO: 689926 - DNA, 816 bp, Homo sapiens
ggcatcagttctctctttctgtagaagaaacacaaaggtttgaaattgaatcaaagcccgacattcaatagggcattagtccaggacaaattttccagactgtattttttttctgtgactgaaaacccttacttcttcaaatctgaatcttaaaagatgaataaaattcatctttaaataaaatatctttaatgtgaactaatattttattttagtgataaaataaatgaataaaaagagtttcaacyggtttctcttgtttattaaataatgtaataaatatatattacatctatatcatttttaattgatccatggtggagaatttgaagagcttaccttttcttagtagagtttgtgttgggaaacacagaactagatggctctgattctgaatagaaaaatgtgttagagttctttgccgatacaaagagccaaaacgaaggtttcagctggtggtgttctagtttcagggggccagggcagaaacacttagaacagaaactgggatggcatcccagcttcctgcctgttgttcaagcccaccctgactttctgggtgagggacctgtttgccaatgctatgcttcacttatgaccctgaataaaaatctggatacgctgttctatggaagtaaagcaaaaaactttaatttaggaactgtcatatactagtgtatggaaatccatttctgaggccctttgaattcttgttttcataggacaagatcaatggctaagaatcagatagtcaaatgctggaggactctttactgagctctgctacaggcacagtgctatgtgaagacatggtcc

SEQ ID NO: 689927 - DNA, 2500 bp, Homo sapiens
tggatcacgaggtcaggagatcgagaccatcctggctaacacggtgaaaccccgtctctactaaaaaaaaaaaatacaaaaaaattggcgggcgtggtgtcaggtgcctgtagtcccagctacttgggaggctgaggcaggtgaatggcgtgaacctggaaggtggagcttgcagtgaaccgagatcgcaccactgcactccagcctgggagatggagcgagactccatctcaaaaaaaaaaaaaaaaaaaaagaaaggagactggagaaatctaaatcacaatgttatccccgattttaactaggtagtgacaaaatgtttaaattcgacatttttctttctatttttttcctcatttttccaaactttccagaataagaaattttgcaatgaaaaaagtattaaaaaccaggtcaactaaaaagcctattgtgctattgtgaggcatttaactttatgattactctttagaaatgtttgtttagcaacaccacttaaagcacttttaattcccagaagagatatgcattccaagaggatgattacaattagaatatttatctcattaggtgaagatcgtcctaatagaatcctgtcaactttactgagataaatgcggtagaaacatttggtcactataagacatgctttaaaaacactcaagcacgtacaacttactacggtggctgaaaatgattccaaagatacccaagatttagacatgtaatgactgcttgttttcacctgaccagagtaaaaataacaactgtttgcttcttcgttctcacatcagatgttacctcgccccaccacctgctctatcctttaatcacatttgtggatattagaatattttcctatgaaaataaagggtatagagactcctcattgctttttttgttatgatcatgtagtagggttgtcaggattcagctgaagatgatcttaagaaaataaaaatatcatcaaacaaattaaaggaaaaaactaggagatatacttaaaacaatgagactgttccaaggtttttaaaacattataggccaacagatgacgatgtttccaagagaattgcatcaattaacctgtataggttcaacatggcttcaaatcgctgtggataaagtagctctagttgctatacataatacaggcaagaactttacaaatattatcttattcagattgacctcttccttgattggttctaaattaaattttaatacatgcatagaagctctacaatagaaagaaggatcagagctgtgacggtattaatagaaatatggtatctctttttataaaacaaaaaacatatatatgtatgcatacgtgtatatatacaggcgtacatatatctatgcatacacaaaaaaacaggcaactcaaaaaatagaaatggctaatagatatatctcattggaaaatcataaaagtgcaaaataagactgttattatgtcaaatagaaagttagaatgcaaaattatatataaattcatataattatatgttaattatgtgtatgtgtataactgaaagaaatataccaacatgttaactggttggaatcatggatactgtgaatattattttcctaatttgtaaaggtagtaaattctctaaaagaatctaaaattatcatttattttttcattatgagaatttattttaactttctgaaaaagagtaactgatatgtctcacttaaaatgtcaacacagcctattctaatcctgaactagrttttggcaagtatcgcctaaaactgatcattaatatagaagccttcaaattttgcttcagtttgactttcttcaacttatgtagtaaccccattattggaacaaatttctatcaaaagtttagagatacatggacactattgaataaaaagttgtttggggtttgcctatgcatatttccaatgtgtgttaaaatcagtgagatctttatatttaaagtacacccacacatatacaaataaaccctaccagggccaagtgttagaatatacagcatgtggcaatccaaatatatttcaagagaataaattaggaaacttcaaaaactgcatttattttaaatcataatgatgaaactgccaaataaaatgatgttcagcttttaattctataattttcattcacccaaaaaactcaaaatattgaaatatttcttccattaataacctgttctatattctgatgtggcactttatggaggaagtaaaggaatattaaagcaagcagaaaagaagagtggtttaaagcagtgattctgatgtcagagccatctgtgtctggattctcaatcctgactcctaattagagttatttaactttcttaaacattaactttgtcatatataaaatggaaataattatgctatatcatataattaaaagattacatcttattatgtacatatgacacttaaattgcacatattctgtattaagcaaacaaaaccgtattaactaaaagcaaacagtcaatgg

SEQ ID NO: 689928 - DNA, 583 bp, Homo sapiens
taggctggaaaattgtctgagatgaagatcaaccttatctttatataatcaaaaaattatatatttgaaaagatactagcatatcatggttactcaactcataatcaatgaacttgaaggaaggactcagatttctccatttctcatctattctggaaaatttatctggctttttttcccttatatttctgttatgtttataaattaaataagcagcaaataaatacacaaattatgtaatacaaatatataatacaaaaagtaatacacagatatkatacaatattttgatgatataatattttggcaatatttacataatattttggcaagttaacttgttgtgcaaagttctgctttataactgtgaaatacaaatgtagaatgaatcatttaaaatctggcaaggatttgccaaaacctttcacataaggaaaattttggaggtgatggatacaattttggcattttttaaatgtgagtgtgtattgttggtgtcagcttctggtgacaaggttgccgcacatacccgaaggccccttctacccacaaaccactgccaccagtgagtgttacctctcca

SEQ ID NO: 689929 - DNA, 1740 bp, Homo sapiens
  misc_feature 2, 3, 4, 5, 6, 7, 8, 9, 10, 11, 12, 13, 14, 15, 16, 17, 18,19, 20, 21, 22, 23, 24, 25, 26, 27, 28, 29, 30, 31, 32,33, 34, 35, 36, 37, 38, 39, 40, 41, 42, 43, 44, 45, 46,47, 48, 49, 50, 51, 52, 53, 54, 55, 56, 57, 58, 59, 60,61: n = A,T,C or G
  misc_feature 62, 63, 64, 65, 66, 67, 68, 69, 70, 71, 72, 73, 74, 75, 76,77, 78, 79, 80, 81, 82, 83, 84, 85, 86, 87, 88, 89, 90,91, 92, 93, 94, 95, 96, 97, 98, 99, 100, 101: n = A,T,C or G
tnnnnnnnnnnnnnnnnnnnnnnnnnnnnnnnnnnnnnnnnnnnnnnnnnnnnnnnnnnnnnnnnnnnnnnnnnnnnnnnnnnnnnnnnnnnnnnnnnnnnattcaaaaaaacaaagtctgtatctggctcccaaattaattattaatttttgtctgtcaagccagggtctgcctttttaataggctaaatatcaacctattacctaaaacaaactaaaaacactttgccttttagaaatctccagtacgactgkgaggcctagtggctgctgtgctattactattcacaaatacacaatttcctcaacctataggcatcaggtttggccgtttgcctcattttgatcaacagactgtgagcagaagtgacattgtcacttttttttaagagagggagacttactctcttacctaggctagtgtcagcataaccatctctccaaacactctcatcaaaatgaaactggttggttatagaaaaaaaaatgtgagcatccacatagagataatcaaatgaaactacaacatttatcctctgtcttccacactcttagtgctcctaagaaaaagttctgttgagtgatatcgtatccatggtaattagagttcagggaaatatttgaggcaatactccaattacaaaggtaagttattggaaatagttcagatgaccatggtctagctcaagctttttgtttgtcatgtccaatcagaggtttgaaagaatgcattatgccccaagtttcacttaaatcaaataaaaatgcccttctattggtcagtggaaatgaagctccgctctgatcacagacaaagatatattgtgtatgtataaagaaaaagtagtttacagtaatacttggaataaatataaaaaggctgctcatactgggaggcaaaatagcacacataaaccaggcttctaatcttggatgcacttcagaacaatgattcccacaacctcttttcacaaatatccctttgacactgtaaagacgttaagaaaagtgagaattcatgcttcctggtttctctctaacacataaaaatgacataagtgtgtttggattcccgctgtgtttttttcaagtacatcagactctgagtcatgctactccctgaaaaagctgatgagccttgcatttcctgtaagtagagggtaagacaaatattaaataaaggaaactactctgggcatgagtttataaaactgtcaaaaagaacttaagggtccaaaaatgtgcccacaaaattggtatgtgaggtacttcagcctcacaaatgcttttctgatgctctttttactgtctttagaaaaagatcttaaactcagccaaagtgggagtagaactattctgggattgctaatagccatgacgcttgtagttccataaaaggatgggaaatctggctcttattccagacatcagaggtaaagaattggccttagcattcaattacacagtgtgcctttcaccttataactaaaacattagtgacttgagaaccacaagtatactaaaaagagataaaattaatcacaccagaatgaggaacttaaatacagtcagccctttatatgtatgggttttgcatctgtggattcaaaaatatgccccaaaacattccaaaacattgcatctgtattgaacatgtacaaacttttttcttgtcatattccctaaacaatgcaaataaaacaactatttacatagcagttacattgtattatgcattat

SEQ ID NO: 689930 - DNA, 345 bp, Homo sapiens
cacacacacacacacacacacaygcacaccaatttgtttaaaataaaaaaagattagacgaaagcataaaatcagccctctggtctgaagcaattaatctgtagaagatgctacatatgctgggtgtagtggctaatgcctgtaatctcagcagtttgggaagctgaggtggcaggatcacttgagctcaggagttcaagaccagcctgggcatcaacacaagaccttgtctctactaaaataattttctaagaatagctggatatggtggtgtatgcctgcagtccctgctgctctggaggctgaggtgagaggattgcttgagcccaggagactgaagcttca

SEQ ID NO: 689931 - DNA, 647 bp, Homo sapiens
agaaataaatacctgaaagagttgatttaataataaaaatgttgaccatgagaaatggaaagttgctagcatcaagatatataaaacccaaggggaacaggccacaatctgattgaggtaagtccataatccatcttctttgaatgttgtggcacaatgactggacaaatctgtgaattcmccaaaaaaaaaaaaaaaaaaaaaaggcaataaactacttatcagtctccaagaagataaaatcactgcagttctatatagggagaagagaaagtatggcacagatcatgattcaattttaggatttcattttccacatgacagttcaaaaactaaagatgacaaaatggtggctcaatgttaattgaggctatgataacactgtataagtagttaacagtgaaggaataaagaaaaagggtccgtaaaatctttactaaaatcagcattcagcataagatatactagcctgaagttaattatttgtttagaacactccctaccttattcatgtttatagcaactatgggtctattacaggactgaatataaactcttattaagcattcagatgaacaggccattgctgtgggcacaagatatcccacaagcacctagatatcatcagaatacaatctaatagcatg

SEQ ID NO: 689932 - DNA, 2497 bp, Homo sapiens
  misc_feature 2050: n = A,T,C or G
tgtatgattccatttttataaagttctagaatacggaaattatgctaagagaaatcagaacagtggttgcctctggggacagggaagactgaaaacggacatgagggaacttgctggggtaacagaaatcttctatatcttgactgggataaaggttacacaggtgtatacatttggcaaaacttaagggtgtacactaaaaaattcatgcrttttaattgtaagttatatttcaatttaaaaaggaatatggaaagaatacatatatgaatactcacaaaaattatggaaaacaaggtataaacactatcaagattcctgatcctcacctctgagaacagtacattgtgacttgggggatctaaaactaacactatattgggaaatgttagtaggtatgttagtggatataataaataatttaaaataaaatgaacaatttgtaattggataaactgggcaaacacagaatactagagatgtcagccttgccttatccactcccattttggaattcataatacaaacattaaagcttctggaaagtttgggaaatacttatgttccattagtaaaaacaggaaaatcaattctacttttttgtttcactaaaaagcaagaacaaatctggttcacagtaggtaagcgtaggtaagtgggcacctaaataagacaataaacatagcaattaagacactagagtatcaagacagatcaaggtgtgaaccctgaatccattatttcctactcagagtaatacatgtcagatcacaggcctggtgcggtggctcacttctgtaatcccagcactttgggaggccgaggcaggtggatcacgaggtcaggagatcaagaccatcctggctaacagggtgaaaccccgtctctactaaatatacaaaaattagccaggtgggggggcaggcgcctgtagtcccagctacctgggaggctgaggcaggagaatggcatgaacctgggaggcggagcttgcagtgagccgagatcgcgccattgcactccagcttgggcgacagagcgagactccatctcaaaaacaaaaaacaaaaaacaaaaaacgtgtcagatcacaatagcagtgatctttgaaaattcagagaaaactgaagaaaatccctaaaggttggagacattaaaaaagaagaggtgaatttctagaactacaaatcaaagagcctgtcataccctaggataattctacatcatattatcagtgtatcatcataagcacacggaaaataatgtggggataactaacggcacagatgattttattaacaaaaaacattattatagtaatctaaattctaaattttcagttattagagggaatgtgtaagaaatgctgctggtgtgtcttgattttttttaaaagctaagtaaacattccatgacattaattcaaatgagattatgaaatatgggataatgactgaaggttaaacaactgtactcagagagtatttattattaccatggggtcagtatagaagaggctccacagtaccagttttcccctttggttctatccttttttttttttttttttttttttttttttttaacaattcttaccattgatttgaaggaaagcacaggaaaaacaagggcttaacatatttgcagggactggtgccatttaaactcactggagcctccctgcctgattctcctgcctcaacctgccgagtgcctgcgattgcaggtgccccccaccacccctgactggttttcgtatttttttgggggaaacggggtttcgttgtgttggccgggctggtgtccagatgctaattgagagtgatcggccagcctcggcctcccgaggtgccgggattgcagacggagtctggttcactcagtgctcaatggtgcccaggctggagtgcagtggcgtgatctcggctcgctacaacctccacctcccagccacctgccttggcctcccaaagtgccaagattacagcctctgcccggccgccaccccgtctgggaagtgaggagcatctctgcctggccgcccatcgtntgggacgtgaggagcccctctgcctggctacccagtctggaaagtgaggagcgtctctgcccggccgccatcccatctaggaagtgaggagcgcctcttcccggctgccatcccatctaggaagtgaggagcttctctgctcggccgcccatcgtctgagatgtggggagcgcctctgccccgccgccccgtctgggatgtgagaagcgcctctacctggccgcgaccccgtctgggaggtgaggagcgtctctgcccagccgccccgtctgagaagtgaggagaccctccgcctggcaaccgccccatatgagaagtgaggagcccctccgcccggcagccaccccgtctgggaagtgaggagcatctctgcccagcagccaccccatccgggagggaggtgggggtcagcccccgccaggccagccgccccgtccgggagggagg

SEQ ID NO: 689933 - DNA, 1497 bp, Homo sapiens
taaatatatttgaaaatcccatatagataggttcatttaagtctaaaacaactttgctaaaaagtcatttttttattagaaaaggaaaaaaaacttgtcaattcaatgctagacagtttaagggaaaagaagtttgcatgtaaaagagacagacacttgatttattgcattaaaaaactttatttcttttaaaaggtccaatataagccaaattaaccccaaaatttacagctacacttagagatctcctgaactaaatggcattgtttgagatgagtgtcttgttaaaggaggtcatttgctattaccaccatttcacccaaagtagttctagagcagaagctggtattataatacacatcagatatttcagatgtcatcttttatgtataagttaaataaagcaaacaggcttttctactctgtgtgaggataagaaacactacagaacagggcctgaatgctttagacatacaaggtgtaaccataaaggaaatttctacggtgctgtgttcattcattcaagtaattaatgtacttattccaacaatactggcatagttcaaataccatttgagacagtactttggggtttcccttcattgggtgcagaccaaaggaagtggttaagctggggggcagactctcacagatggattacaaaagtaatgaaatagttttcttagtggggtggcattcgcaagaactaccttaatgtttttggtaacagcatcatttacatataagtgatgcaggatagaagttctggtgtatgtgataaattaaaaacagcttgtcactttatagctacaccttggatttcattagatgtggtaaatctaatagtgtgtcaaatgagtccttctggaaatcacttcagcagagaagtcaaacagcctgtaaaagagaagacatggcagaatgtgcgagattcatccttccaacattctcagggttctcttggaggacagacccaggcccaaagacagaagttaccgggagggaggcttcaactccatctaaggaagacctttctaacagttagagctgctcaacaactgaatggactgcttggtgaggtagagtcacttggaagtgttcaaggtggaaagatcacccttgtagaagggactcctgcatttgttaagaggttagagactggatgaacctcaggtctctttcaattctgagattctagaaaattccctcagggaattcagaagagaattcctaaaaggaaagagaaagcacacatatgtatacttttagaatctgcttgatttttttttttttcaaaaggtacaatagaaaatgtagtccactgtcattaaaatgcatattcaccttcctactactaataattaggaagggttcattatgacttctttatattataaagaaaagatgggggattagatttataatttcygtaaatattttagaaaaaatgcttaaaatctagtagtcaatgccctagaaactttatagatttgtaga

SEQ ID NO: 689934 - DNA, 1921 bp, Homo sapiens
aatttaaaacatacatatttagactgacttcctaaatacttgaataaatgtaaataagcaaacttgtcttcatattattatcctacttgagataatccaaacttctacatcgagaattcaggaagttaactacagatctttctaataatcaacatagtaggctactgtgttagggaacaggcattctaaaaataatacaagttcaaatgacaggtcatcttttcatgagtatacaatgcttggctcacggcagacattcaatggatgtgtgacacggattcatttaaagtcttgatttcaagtctgattctaaaaagcctgtgttttttttgttttgttttgagacagggtcttgctctgttgccccagctggagtccagtggcgtgatcatagctcactgcagccttgaccttctgggcttaagtgatcctcccacctcagcctcctgagtagcagggaccagaggtacacgtcaccatgcccagctaatttttcttttaatttttttagtgatgagggtctcgctatgctatccgggctggtctcaaaattcctggcctcaagtcatcctcctaccttggtctctcaaagtgctaggaatacaggcatgagccactgtgcccagccaagcctgtgttcttaatcacagttcagtgctccacatcaactgcaaagacagctagcaacttgagtcagtgcttgaatattcggatttctcaaattaaactgaccatacccaccccataatgtgccatagctaaaaaagaagtaattcttttagcaaagaaakgcataaccgagccctgcttgaatatcaccacataccaggcattgtcctagctgtacaaaagtaagactgaagatttgtcagactgaagttgtcttttttttttttttttgagacggagtctcactctgtcaccaggctggagtgcagtggcacaatctcagctcactgcaacctccgcctccctgggttcaagcgattctcctgtctcagtctcccgagtagctgggattacaggcgcatgccaccatgccccagctaatttttgtatttttagtagaaacggggtttcaccatgttggccaggatggtctcgatctcttgaccttgtgatccacccgcctcggcctcccaaagtgctgggattacaggcgtgagccactgcgcccggccccgagttgccttcttcatacagtctaataaaagggctttccagaaaagtcttttcaaaatccaacatggcaactgaacatatattatttacactggactaaatgctgagcaggacataaagaaataaataaacttcaaaggactataatgccatttcttgtagaaaatgtcagaaagtagcagcaagagataaacttgctctgggcctcactgatctctttataatgaatctgtgtagaaacttgactacttaagcttgactatctcaaagattaaagtgactgtaggtcacggaattctactgttttaggattacatctaactttgttcctcaatactaggtcaatgaaaattatgctactgaaagaatgaactctgaggaatcatacattaaatataaaagacaatataaaaagaagagtttagccagttgtggtggctcacacctataatcccagcactttggggaggctgaggtggaaggatcatttgaacaggagtttggggccagcctgagcaacacagtgagatctcatctctgccaaaaataaataaacaaacaaataaataagctggacctggtggcacatgcctgtggtcccagctatgcaggaggctgaggtggaagtatcacttgagtctaggaggtacaggctgcagtgagctgggattgcaccactgcaacccagcctgggtgacagaatgagattgtatctctaaataaaaaaaaaaaaaaaaaa

SEQ ID NO: 689935 - DNA, 602 bp, Homo sapiens
atttcacaaaatttaaggaggctcccacaccttccaatacacttcacctgccagtactaaattctcatagcccagggaccccatctgttttcatggccagctgtcttcaggctgcagctacaggtcccatccagcarcctctgcattctgcatgggtgtgtccatggcaagaggatatgcttcatacctcactccttttggtagaagaacttgcagacagatccaaacgcacaggaaactccatcgcacagaagtttggattccagccacttcccatgtgagactatgaaatgttccatctggctggaacagctcagaggagctctgctctgttaactatataggcttgtagaaataggaactaataacaaatcaagtattggaagcaaacaccaaatttaaatgtgaatgctaattttgcttactagaaaaatttcttatagatacaaaggtcagaactttttattgtcaccaaggcaatagtttattaagccatcagttcattaaatacagcacagagtttcattatgctcatgctactttcttttgcacagatttttttttttttgaaatgggatgttcttctcattaaattacctggg

SEQ ID NO: 689936 - DNA, 646 bp, Homo sapiens
catccagtgctacttaaagaaaatggaaacaggagagaaaagttaccaccttctttggtctcacttacaaactctttttggctcagggcaacagaaatttttacatctataccagatgatatcttcagacctctcccttcctgctgccacctcagtgtagggacagtttaggcagcatttatgttttaattcttttcattgaaaaaaaaaaaaaaaaaccctaacttaaattagcttaaatagaagtgaaaaataatgggttaatgcagctgaaatattcagaaatcatactggctgcaggtgtggtgggattaatgggctagatgtacttttttactttttgttttgttttgactaatttctctttcaggcaggcttcctccactggataacaatgatgggcatcagctgcactaggcaagaatcctaatagctttgtaasctccatgagaaagacagcatgtttttagtgttctgtcaaaatcccagggaataaggtcatcattttaccaacttagaccatgaatctatccttgagcaactcactgagactagaggtgagagttatttggctggataggtcacattagccccacatctaccacaggactgaaaaaggtggttacggggcgagggcagtccacaa

SEQ ID NO: 689937 - DNA, 642 bp, Homo sapiens
aaaaaaaaaactgggtctgggtgactctccttgctagaaatactggatggctgaacccgggtctctactgcgggtggcctaacacttgagccaggttgccctgtctgcagccacctccaggtacaaaggacacctcaaggatggggaagatggtactgggagctaggttttcccgtcaccacctacccaccctcaggcctcaggtctgaagtcagacgccttctgaggggccgtccctagactctgagatccacgcgggccttcctggctcttgagggagagggagatggctggagttatacttgcccccgctgatcagcacttgtgctgtttgtcacagcagaaaatgggctgaaaatggctgatctaggctgggtgcagtggcccaagtctgtaatcccagcactttgagagctagaggcaggaggrtcacttgaggtcgggagtttgagaccagcctcgccaacatggtgaaaccccatgtctactaaaaatacaaaaagtagccaggcgtggtggcacgcacctgtaatcccatctacgtgggaggctgaggcaggagaatcacttggacctgggaggtggaggttgcagtgagccaagatcgcaccattgcactccaggctgggtgacagagggaga

SEQ ID NO: 689938 - DNA, 554 bp, Homo sapiens
  misc_feature 87: n = A,T,C or G
gtgggaacccaccggctctgcatgctggcctcacaccctgggcaagaagggaggtgtgggaaatggcactaacaaagtgctcaccancggggagagctccctctcatgcggggtcctcttaactggacactccgagatcccctctcagcaatgctgttatttttaaacattttatttttatttttaattttttagagacagagtcttgctccaacactcaggctggagggcagtggtacagtcatggctcactgcagccttgagttcctgggctcaagtgattctcctgcctcagcctcccaagtagctgggatyacaggtgcacatctctgcagccagcgatgctatatttttcagatcacaggttcccacatgctggagactgatcgtgtttcactcctgtttgcttcctagggggctcagagctgatttgcagcccatctcgatgtgcctcatggctactgatctcatccctgcattcttctcctcctgcttccaccagctttattaaggtatcattgacaaataaaaagtgtatatatttgcagtatata

SEQ ID NO: 689939 - DNA, 1207 bp, Homo sapiens
ttaagttctgggatacatgtgcagaacatgcaggtttgttatatgtgccatgtggtttgtatacatgtgccatggttgtttgctgtacctatcaacccatcatctaggttttaagccctgcatgcattaggtatttgtcctaatgctctccctccccttgccccccacccccaaaaggccccygtgtgtgacgttcccctccctgtgtccctgtgttctcattgtttaactcctacttatgagaacatgcggtatttggttttctgtccttgtgttagcttgctgagaatgaaggttttcaacttcatccatgtccctgcaaaggatatgaactcattcttttttatggctgcatagtattccatggggtatatgaaggcacatcctttattgatttcaggtttatcacttatggtaatggcatagcaatctgttctctcgcttcgacttatctgtagttcaatcttcatttccttaccttttcctataattgttccatgaaccatgatgaagttgatttttttcatatttaggtaaaagtctataaagagcaactgtgtctaatttatttttttattctctacccactctcctgccccatcctattactaatgtgtaacatgcatttaagaaatattttgtaactacctgtatttcaataaaaagctcaatctctctaatacagaaatcttatttctcattacccttagataaaccatggtcctgattttgctggattttcaggattaatgcactaaaaatcttactgaacgccagatgaggtttctggataatttgtttttcttctttgcgcttttctgtgttttctagttcttctctactgggtaggtattacttagctgtacaaaaactaaatgttagtaaaactctagatagtagacattacgtcaatttgtactggattctttattccatgcagaaggaataacaataaataatcaaactatttggggctggctttttggtgactttttgttgtagttgttgttgtgagacggagtctcactctgttgcccaggctggagtgcaatggcgtgatcccagctcactgcaacctccgcctcccaggttcaagcaattctcctcttcaacctcctgagtagctgagattacaggtgcatgccaccatgcccagcttttttttttttttgtattttttttgatttttagtagagacagggtttca

SEQ ID NO: 689940 - DNA, 611 bp, Homo sapiens
agaaaaaataattttgaaacccaatgcaggcttcttgtgagattgtttttcggttcgtttgtttgtttagttccaaagattgactttgctaataaagattcaaagtttggtgaactcccaatttagagtttgttcattcattcattcactcatcctacaaacatttattgagtatctgtaaagtgccaggcactgggtattcagtagcaaacaaaataatgtgttctcatggagtttatgttccaatgggtggaaatgagcatatatcagcaaataaacaaayagtatgtcaggtgataataagtgctgtggggaagaagaggcagagagaaggagaagagggtcacagagggcatagggttgctattctacgtatgatcatgagggaagagggtcacgcaggtgcatggcagttgaccagacctgaaggcagtcaggaaaaagatatctggagtctaagcaatggggacagcttgtgcagaggcctgaggcaaaagagcagagtgttagagaggaggcaggaagggcagataatatagggcttcctgggtcaatatcagagctttggattttattaagaatgaaggggaaaccaatgaaggattttgcgg

SEQ ID NO: 689941 - DNA, 1124 bp, Homo sapiens
cttcataaatgcatgaagtaaataataagaaaaacatgaagggatttcttcagtaaagttcaaaatttgattgaaataaaaaacccacaatgaagtagaattgtactagatacagctcttattaataaataaaaaaattatataggccatcttgtcgccatgggacaaataattgctgtgaatttatattatcttcaataaaacatatttgtaatcagtaaataggtatactcttcattatggcaactagtatggaaatttgggtacagaagataaattctgggtgatactaaccctacctctgagactttttttttttttttgagccagagtctcactcttttgcccaggctggagtgcagtggcgcaatgtttcactgtgctatgagagaagctatgtttcatccactaagcttctcttgcaaacaattatctctcttattcacactgtcattgttcatcctgaacgttctctatcaagcattcacacggatttcccatactgaaaccaacactgtttggcttacatactcttagacacattgtttgccacatgagtatgaccagggtaataaggacactcaaagtgctatcacagaaagactccaaggatcttgagaagactcatactggacgtataagtggcttttatatgccatgaaagaagattagacttttttatgtgattttgagagctttagaactgggacctaccgttgaagttaaaagtaaagcaatttcagttcaaaataacaaagttagatctatccaagattaatggaatattattaaaaagttgtataaactgaaaacaggtaaatagacacaaattttaagcatttgatgaatggctagacaatccaatctttaatatctctcatatcccaagatttaatggttctgggtgcagatggttcaccaggctctttatgcccccaagctcacaactcacacattcaccacttgctcaaacaatgaagacttgcacacacaatcccatcctcctcctagtttgttaccagctgctgycaatgatttaatactggagactgaggagagccagagtagtttcaattgtactccctaaagaggaaaaaaatcaagctaaatccaatgaggaagga

SEQ ID NO: 689942 - DNA, 606 bp, Homo sapiens
agcaagttgatgtagcttcagtgcagcaatgagcttgacattctgcattccactgggtttggaattttttaaatgtttctgtgttttggtattcagaaacagcatctcaggactgaaatgaaagattagaggagaatgtatttatagcacagaattcccttaagaatgtaagctcttgagacaaattgcattggttctaatctactctccatttactggctgtgggactttcccacacctttgtttcctctacataaaataggaatgctgacattactactgatctcaaaactactgtgtgtattaaatgaggttatctacataaaacattttgaacagagctttttcacttggtgaatgctcaataaatattaatcactgtttattaactaaaaatttagcaagtttgaaaattctctgattaatgcatagacaaatcatgagatgactttaagcatattttggtaatataatgagagttccaagaaataaactggcttaaagcttagtgatccttcacctatatgtttaaaaatcttatcaaattactacaacttaaaagtgataggtgaarttgaagatgctaagacaaatcaaattcttgca

SEQ ID NO: 689943 - DNA, 1444 bp, Homo sapiens
ttggaggtgtagcttgatgaagaaaaatattggcattgttgtaatgagaaataagaatacttactacttaataagatttactaccaccctgtgggaaggatgtctaacacaagctagcataatcaaattgtgtcacgaactatttttatacagattataagactttctagaattgatcctgaccctcctaaccaaaagagtcaagggatcattttttattttttcttttggcaccaagagaagtcctagctaacgagtactataacttcactcccttctcctgttccaaaagaattcttgtcactgatatataaaacaatccttggaaacatattctcttcagagtggggattataagttatctgcattgataacagatttatgcattacatgcaactttctttacaaagccttccttttaaatgatggaaaaatttataataatattttggttaattgtccttatgttcaagtaaattcttttccatatctgtagttttttttttttttttctcaaagaatccctccattatgatgttggaactgaaatagctacatgaatgttctctttaatgcaaatgagttattaccaggttcagggaaaataaaaagataatttttaacaatgatggctaaaatggtagggtttccttgtttcatttcctctttttgacaaagttttatacaaaagtagtgaagatgcagattcagaaagttctgaattaagattctaaatcaaggccaatttatttcaagtaccaagtaaattctaagttctttatatatacataaatacagaactctctctctccctctctctatatataataggtggtagtttctacatgagctttgtagggggattaggtagggtctttgtacccaaatcatttctgccatgacccatgtgcatagcacctatatgctatgttaaatgctatttccccttttctcccttctagtttttcagtattttcacccaagcatttgattaaactacatgtaagcctttaaaaatcaagaagaaaaagactccaggagtttcggtgtctttgggatttcatcaacaaaagctacattactactttcctgagagccatctctgtcgtgtcctcttttgatcagccrctggatcacttctctatgcttcttaggacaatttttcatggccccactgcttcacatttatttaagtataggtattatggaggccgttgaatcacaagctccttgaagtcaggagaatttatcttattcgtctttctatatcacacatcatttatttaatattatattttagatgatcaatgtaggttgaatattattttaaactcaaacagattttatgttttctcataagaaaaaaattataatacattctgataatcaaaaaaatctaatgcaaaggaactgagaaagtcatcaccacctagtataaatgcag

SEQ ID NO: 689944 - DNA, 1525 bp, Homo sapiens
tgcagacctgtgaagttcaaactcatgttgttcaagggtcagctgcatatacggtgaaagtaaccttgatcagaaatatcaaagtcatgaattaaagattacaactttggaatttgtgagtataatttaggccagaattttcctacgtatttagtttttactctacattactagtaaattacattactagtaaatggtttcaacaaaatcttccagttggtggacggcagaaaatatgatgaaataaagagtacaaggaatttccaattctactggttctaagaattcaattttgtgcctaccaaagaatacttgcagatgtatataagggtacttttttggaaaagatgagtttcagagcaatattacaaaatttcagttgtaaattagagttcatgcaggaaattattgactttttccctccaaagtctcagtatattattaatctagcaaccatagaaaatacaatcyctaaagttggctgtataacataaaagaaaacctaaggaattaaatatcaataaaatagcttttatgtctttactctgtattttgcaatagtagcacatacaacatatttattaaatttgtgatatttcactcaaagaaaaatgtatagtaagcactatttatgtaccatatactgccctaaacactaagacaatgttaataaaaagaaaaacatcaacagtacataacaattatccaaaggctgttatctgtcatgtactgcttaaaaccatttatgtagattatattacacagttttcgttagagctcttgcagttaatctcttgagcttcactttaagtgaagaacatgagccatcaaaaagatacacaatttgctggagataatttacaagtgatgaagtcaaagtaaaaattaaaatcttacactaaagtattctttcttatcctattcattgctactttaggaaaataagatgatgtatatcttgacaacacccttacaaagaagaattaacaaagaaaaataataaaatgtgttaagtgctgctagatagatttaaacaaattgtcttgtgagtgcctaggaagttgcaaagttataaaaggcttcacaaaggagccattttttttttaaatttgagacagtgtcttacttgttatccaggctagagtgcagtggtgcgatctcggctcactacagcctccgcctcctgggttcaagtgattctcctgcctcagcctcctgagtagctgggattacaggcacaccccaccatacccggctaatttttgtatttttttttaatagagatgacgttcccatgttggccaggctggtcacaaacttgggaagccaattcttgaagcaagttttgaaagatgtatcaagtataccaaagaaacatgatgtacattccatgatttgaatatataaggaggaatgaaagagcattaatggtaaatagacagtaggttataaaatgttattacaagttcaagcagatgtgtcttaatacccaagtagtcttttgttaaaaaaattatgaagaaat

SEQ ID NO: 689945 - DNA, 647 bp, Homo sapiens
aggctacagtgaggtatgttcatgtcactgcacttcagattaaacaaccaaagagactctgtctctaaacaaaaataataaataaattattgctagaccaatgtatcttaaaaatattttcttccctcacagttatagacattctcctatctgtatacttatatttgtgtgtattcatacatacacaaacatgtatctcattgtattactttaacatgtaaaacttagttatttggatttcatttttctatatgctctgaggtatggattcgactttatttttacttaataggctatttttttcccaagacaattacacagctcatcattgtctattgttgctcattgatttatggtgctatctttaccataaatcaatttatcctatacttataactcagtgtgccagctctgtaatatttttattggtctattaatctatatctatttttatctccacagtattttattttattgaagtttagcgaatatacraaagatatataaaacatgagactacagctcaataaataaacttgattatgattaagaaataaaatattactagcatccatcctaatcaatacaccttgccttctgtccaaagaaaatgactctcctgatctttaacactataattatttaga

SEQ ID NO: 689946 - DNA, 1911 bp, Homo sapiens
ttcctaaaaggggatagaacaggaaggccactactcatttaaagtgtatgtgcttttcagagggcttgacttatcccaggtagtaaacaggtaacctaccaacaagtggcacactgtaacatacagattgtagtaatggacaaattgattgacagccaaatcttgaattatcaatgaaacagatgtaaggatccatggacaatttacaaataaaaatagcagagtactttaaccatttgttttaatatcttctcaagtattataactatgcacagcagtgcaaaaatcatagtaaatatgaatagttttaattgtcttctttattctctgatgcatctccaaatgatcaaggaaaaaaaaaggcagaagaaagaagtagcctgaacaactcaaactgtacaatcattttctacacatgattgccccaataggtttgttattctaaattgctggctggctagacgtgaagcaactgtctgcttagctcattcttctgggtagtgcaaaacagcagtccccaaagcagggcgtgcaaggcaaccagctctcaaacaaaaagataatattagaagtcccattcctacttatttttaccttattctttttcaataccttatttgtgtgtgtatcttataatagtatagtcatacatctaaataaattgtaagtaaataactatatatatgttgattatgtgtactagaaaatgttttaatgaaagggatataaattaaaaacccttggagagctctgggccagaagtggagaatcatgaatatgaaacctgctttagccgcttatcagtcatgtgaatttggtcaatcgactcttttataatctgtaaaatgggagtaagaacaccagtccttccttcctcacagtgttgtactgagaacagaataaagcaactgtaattgtttgtaaattctataaaggctgtgcagattatgattttttttttttagcttttaaaatcttttcctcaaatgtattcagtacccacatttaatctttatagaagaccatattcgaagtagtgggaagacattttacttttaggatcaaaggagaaaaatgtttaaggtttaacaattctctaattctaaaagagttatatttctttccaaactctcagaaagttttgatggccagatattttaaacaaaataaacttgggaattaaaaaaggaaagcaattaaaagtaagtctgagatttagctgtaacttgaggagaaaagaatttttacaagagggataggaaaagataaggtcttaaaaacaaggaactaaaaattaagactgaagttttgtaaccttaggagccaggattttgatgccaacagttaattatcccagaaatttctttttttttttattattatactttacgttttagggtacatgtgcacaatgtgcaggttagttacatatgtatacatgtgccatgctggtgcgctgcacccactaactcgtcatctagcattaggtatatctcccaatgctatccctcccccctccccccaccccgtaacagtccccagagtatgatgttccccttcctgtgtccatgtgttctcattgttcagttcccacctatgagtgagaatatgcagtgtttggttttttgttcttgcgatagtttactgagaatgatgatttccaatttcatccatgtccctacgaaggacatgaactcatcattttttatggctgcatagtattccatggtgtatatgtgccacattttcttaatycagtctatctttgttggacatttgggttggttccaagtctttgctattgtgaataatgccgcaataaacatacgtgtgcatgtgtctttatagcagcatgatttatagtcctttgggtatatacccagtaatgggatggctgggtcaaatggtatt

SEQ ID NO: 689947 - DNA, 1911 bp, Homo sapiens
ttcctaaaaggggatagaacaggaaggccactactcatttaaagtgtatgtgcttttcagagggcttgacttatcccaggtagtaaacaggtaacctaccaacaagtggcacactgtaacatacagattgtagtaatggacaaattgattgacagccaaatcttgaattatcaatgaaacagatgtaaggatccatggacaatttacaaataaaaatagcagagtactttaaccatttgttttaatatcttctcaagtattataactatgcacagcagtgcaaaaatcatagtaaatatgaatagttttaattgtcttctttattctctgatgcatctccaaatgatcaaggaaaaaaaaaggcagaagaaagaagtagcctgaacaactcaaactgtacaatcattttctacacatgattgccccaataggtttgttattctaaattgctggctggctagacgtgaagcaactgtctgcttagctcattcttctgggtagtgcaaaacagcagtccccaaagcagggcgtgcaaggcaaccagctctcaaacaaaaagataatattagaagtcccattcctacttatttttaccttattctttttcaataccttatttgtgtgtgtatcttataatagtatagtcatacatctaaataaattgtaagtaaataactatatatatgttgattatgtgtactagaaaatgttttaatgaaagggatataaattaaaaacccttggagagctctgggccagaagtggagaatcatgaatatgaaacctgctttagccgcttatcagtcatgtgaatttggtcaatcgactcttttataatctgtaaaatgggagtaagaacaccagtccttccttcctcacagtgttgtactgagaacagaataaagcaactgtaattgtttgtaaattctataaaggctgtgcagattatgattttttttttttagcttttaaaatcttttcctcaaatgtattcagtacccacatttaatctttatagaagaccatattcgaagtagtgggaagacattttacttttaggatcaaaggagaaaaatgtttaaggtttaacaattctctaattctaaaagagttatatttctttccaaactctcagaaagttttgatggccagatattttaaacaaaataaacttgggaattaaaaaaggaaagcaattaaaagtaagtctgagatttagctgtaacttgaggagaaaagaatttttacaagagggataggaaaagataaggtcttaaaaacaaggaactaaaaattaagactgaagttttgtaaccttaggagccaggattttgatgccaacagttaattatcccagaaatttctttttttttttattattatactttacgttttagggtacatgtgcacaatgtgcaggttagttacatatgtatacatgtgccatgctggtgcgctgcacccactaactcgtcatctagcattaggtatatctcccaatgctatccctcccccctccccccaccccgtaacagtccccagagtatgatgttccccttcctgtgtccatgtgttctcattgttcagttcccacctatgagtgagaatatgcagtgtttggttttttgttcttgcgatagtttactgagaatgatgatttccaatttcatccatgtccctacgaaggacatgaactcatcattttttatggctgcatagtattccatggtgtatatgtgccacattttcttaattcagtctrtctttgttggacatttgggttggttccaagtctttgctattgtgaataatgccgcaataaacatacgtgtgcatgtgtctttatagcagcatgatttatagtcctttgggtatatacccagtaatgggatggctgggtcaaatggtatt

SEQ ID NO: 689948 - DNA, 1911 bp, Homo sapiens
ttcctaaaaggggatagaacaggaaggccactactcatttaaagtgtatgtgcttttcagagggcttgacttatcccaggtagtaaacaggtaacctaccaacaagtggcacactgtaacatacagattgtagtaatggacaaattgattgacagccaaatcttgaattatcaatgaaacagatgtaaggatccatggacaatttacaaataaaaatagcagagtactttaaccatttgttttaatatcttctcaagtattataactatgcacagcagtgcaaaaatcatagtaaatatgaatagttttaattgtcttctttattctctgatgcatctccaaatgatcaaggaaaaaaaaaggcagaagaaagaagtagcctgaacaactcaaactgtacaatcattttctacacatgattgccccaataggtttgttattctaaattgctggctggctagacgtgaagcaactgtctgcttagctcattcttctgggtagtgcaaaacagcagtccccaaagcagggcgtgcaaggcaaccagctctcaaacaaaaagataatattagaagtcccattcctacttatttttaccttattctttttcaataccttatttgtgtgtgtatcttataatagtatagtcatacatctaaataaattgtaagtaaataactatatatatgttgattatgtgtactagaaaatgttttaatgaaagggatataaattaaaaacccttggagagctctgggccagaagtggagaatcatgaatatgaaacctgctttagccgcttatcagtcatgtgaatttggtcaatcgactcttttataatctgtaaaatgggagtaagaacaccagtccttccttcctcacagtgttgtactgagaacagaataaagcaactgtaattgtttgtaaattctataaaggctgtgcagattatgattttttttttttagcttttaaaatcttttcctcaaatgtattcagtacccacatttaatctttatagaagaccatattcgaagtagtgggaagacattttacttttaggatcaaaggagaaaaatgtttaaggtttaacaattctctaattctaaaagagttatatttctttccaaactctcagaaagttttgatggccagatattttaaacaaaataaacttgggaattaaaaaaggaaagcaattaaaagtaagtctgagatttagctgtaacttgaggagaaaagaatttttacaagagggataggaaaagataaggtcttaaaaacaaggaactaaaaattaagactgaagttttgtaaccttaggagccaggattttgatgccaacagttaattatcccagaaatttctttttttttttattattatactttacgttttagggtacatgtgcacaatgtgcaggttagttacatatgtatacatgtgccatgctggtgcgctgcacccactaactcgtcatctagcattaggtatatctcccaatgctatccctcccccctccccccaccccgtaacagtccccagagtatgatgttccccttcctgtgtccatgtgttctcattgttcagttcccacctatgagtgagaatatgcagtgtttggttttttgttcttgcgatagtttactgagaatgatgatttccaatttcatccatgtccctacgaaggacatgaactcatcattttttatggctgcatagtattccatggtgtatatgtgccacattttcttaattcagtctatcwttgttggacatttgggttggttccaagtctttgctattgtgaataatgccgcaataaacatacgtgtgcatgtgtctttatagcagcatgatttatagtcctttgggtatatacccagtaatgggatggctgggtcaaatggtatt

SEQ ID NO: 689949 - DNA, 991 bp, Homo sapiens
cttattgaatttttctcttctctccctcctctgaattccagtcacattgaccttctttcagttctttatacatgccatgctcaagcctattgcaagacctttgcacatgttattccctgtttagaatgccctcttcgtgcccattcatctaattaactgttacttatcctttgaacttagtttaaatgctacttcctcagggaaggccttccctgacagaccccatatagatttctcagagtttctctgttatacactcataaaatgcacttcctttcttcaaataatttatctctgtttaaaactgagagttaatttgggggaatatttttattttaatatctggtgtgtatatatatatgtatatgtctggtatatgttacacacataatttgttcagtgaatattcattgggtaagtaaatgagtaagtgaagaaagagggtccaccaataaactcaagtgcatataaaatttcaaagcagaaaaagtgttttcmatcagtagaaaaaatgatggctgatatagtttagatatttctccttgcccaaatctcatgttaaattttaattcccaattctggaggtggggcatggtggaaagtgtttggatcatgagggcaaacctctcatggcttagtgctgccctcatgatagtgagtgagttctcatgagatctggttgttgtaaagtgtggcatctcatcccccactctctctctctctctctcactcctgctttcgccatgtgaagtgtctgctcccagttcaatttctgctatgagtaaaatttccctgaggcctccccagaagctgagcagatgctggtgccatgtttgtacagccagcagaactgtgagccaattaaacctcttttcttataaattatccagtctcaagtatttctttagagtaatgcaagagtgacctaatacaatgatgtatcaggctgtgtttgcaatactataaaaaaaatctgagcctgggtaaatta

SEQ ID NO: 689950 - DNA, 648 bp, Homo sapiens
ggtcattttttaacaatttcatgcttaaagttgagataatataaattttctccctgatgttaattgtaaggaaatacttctttcagccatttgtgtaccatccttcagttttgttggttatattatttttctttgtcaaagtttgaaacattcaaattatattttcccacaaattactatagttatttaaataaattatttaaattgatggaatgcctaccaaccgttattcatgaattacatttctatttgagttccttattttatacatttcttgattagcataggattttacttttcataaagctagkgtaaaaattatatttcttataactttgtgtgcctaataaagtcagctgcctcagtctcaaaggaaaagtttgatgagtataaaattctaaggtcacactctctcttagaatattttactcattgctccattgtcttctggcagttgctatgaacaggtatgaaggcatcctatttctcatgagtggaaaagttattatttttcctgcctagatcgtaaggaatcaggaagttagcatctattatagccatggatgcattttctgttccatctgttacataaaacatatctctatattaaattgttttctttactcttcgtatctgttaacttccctc

SEQ ID NO: 689951 - DNA, 879 bp, Homo sapiens
aaggttttacagcccagaagctccaggtaaatgctacactgttactggcacccaggctggagtgcagtggcgcaatcatagctcactgcagccttgaactcctgggctcaagggatcctcctgcctcagcatcccgagtagctaggactacaggcatgtgtcactattcctggttaagtttctaattttttggtagaggtatattttcactattttcatcccacgttggtctcaaactcttggcctcaagcaatcctcctgccttggcctcccaaagtgctgagattacaggcatgagccagtgtgcctggccaygcaaccttattttttatggaagtgggcacagcactcccagtagcctgcagtcaccgctgggcagtggggcacaagccaggggaagtaatcccattctctgagcaccatgctgggtgcttccccaccatcagcctgaaaggagggtgctaatggctctcctctcatagatgaagaatttgaggctcggggatgaaggtcactcctgcttaacatgtgttctggtgatgagaaagccccctctttgtagagaatccctcccccttggcctcatcctcaaggccattgacttccaagtagctacctggtcctattgagagagggctgtctttggattgctaagggtcctgggatggtgagagaagtacacacttggaaaaggatctacagacacctcctgaaaatgagccagaaagagccctccatgcagtcggagaaggatgaatccatcatggaagaagctagctcagttttccttcagtttcagctcctgacagtccctgcattcagtgctgcactctagatttacccagaggctgtggttctccctcacacccaactctttct

SEQ ID NO: 689952 - DNA, 622 bp, Homo sapiens
ggtctcagcaaatgcagccaggtcttggggtcggtctagcatttggaagtgatacatatacacagagtgggtttatctatctgctcagcaaggcctatttaaaactcgatttctttccttttaattttcctccatataaaatcccctcccctccccggataaatcaaccaatcttctcacttgaattataggtagtatattaaaaaggatctaaataaagggaagttctttctgacagtgctttgtactaaaagggaggaggtaattttcyttggagttcttccccagcccccagcaatttctgtttttatattaatggattttatgggaccttgtctttgatcttgccctcttaaaaaccaaaggaggaatggaaggttaattccagcaattctaccctagtgtacctctgctattttgcatgaagaacacaaaatgaatataattgagcctagaattgtactgaggatatgattattttcttctgtgctaggataattttcatctttcctgaaaaaaaagaacccccatggttctcagtatatatatattatatgaaaatattgactaaatagtatatatactgatatatattatatatatataaattcagtagatgtac

SEQ ID NO: 689953 - DNA, 1002 bp, Homo sapiens
aagccacaatgacacctccctccagaaaygtcattccaaatgttcactggtgagcaggtgtctgcccacagaccctgctccccagatgctaccggcaatttgggaactatatttttaaaatcaccacagatgggaagactaaattgaaatgcaacttggttgaaaacgctgcttttagcattttagccccatccttcatccttcattgcattcaacttttcagatagctgcccccaatagcccatgatctttttgattgctcaacaaagtctcctggaaaagagcttctgatcactgctagctctgtggcctctccttaccatcccataattcttgttctaatccatttcagggctattgaagtcccatatgatcaatgttatggcctctttaactgactctgctatttgcataaacatgggcatatttgctttttcatcatgccttagaggtctgtaacagtgtcaatgatctttcctactgtcttaattcattttgtgctgctgtaacagaatgccagagactaggtaatttataaagaatagagatttatttcttacaattctggaggctggaaagtccaaggttgagaggcctgcatctggtgagggccttcttgctgtgtcatcacatggtggaaggtagaagggcaagagagtgcatatgtgcgtgacagaaaaagagagagaagtgggggtggactcactttttaatcaggaacctactcctgcaataactaactcttgcaataatgacattaattcattcatgagggcagaactctcctgacccagtcacttcttaaaggttccattgctcaacattgttgcactggagattaagtttccaacacatgaactctgggggacacattcagaccacagtacctaccatatcaggcagtaactttaatttaagttctaggctgagcatgttcatttgcatacatcatctttttatccacacagtaatgctcttcctgcatctatattgctactttcc

SEQ ID NO: 689954 - DNA, 1002 bp, Homo sapiens
aagccacaatgacacctccctccagaaatgtcattccaaatgttcactggtgagcaggtgtctgcccacagaccctgctccccagatgctaccggcaatttgggaactatatttttaaaatcaccacagatgggaagactaaattgaaatgcaacttggttgaaaacgctgcttttagcattttagccccatccttcatccttcattgcattcaacttttcagatagctgcccccaatagcccatgatctttttgattgctcaacaaagtctcctggaaaagagcttctgatcactgctagctctgtggcctctccttaccatcccataattcttgttctaatccatttcagggctattgaagtcccatatgatcaatgttatggcctctttaactgactctgctatttgcataaacatgggcakatttgctttttcatcatgccttagaggtctgtaacagtgtcaatgatctttcctactgtcttaattcattttgtgctgctgtaacagaatgccagagactaggtaatttataaagaatagagatttatttcttacaattctggaggctggaaagtccaaggttgagaggcctgcatctggtgagggccttcttgctgtgtcatcacatggtggaaggtagaagggcaagagagtgcatatgtgcgtgacagaaaaagagagagaagtgggggtggactcactttttaatcaggaacctactcctgcaataactaactcttgcaataatgacattaattcattcatgagggcagaactctcctgacccagtcacttcttaaaggttccattgctcaacattgttgcactggagattaagtttccaacacatgaactctgggggacacattcagaccacagtacctaccatatcaggcagtaactttaatttaagttctaggctgagcatgttcatttgcatacatcatctttttatccacacagtaatgctcttcctgcatctatattgctactttcc

SEQ ID NO: 689955 - DNA, 674 bp, Homo sapiens
gggatttgagccctaaactatttttcataaaccacaggctttacagcagcccacgtggctcatcgagtgtgaggaaattataggaacggacacagatatggtgagaaactctagatgcccgaggcatcccttaaatcattctggacatttactgagggcctaccgtgtgccagctgctgaaatatttaacctgaagcttaaataagcttctctattggtagaattcagatgaatcatgagaatcatctgaaaatagagactgcgagaggagacgggaaaggccatctcatctacctgtgtcttaaggttgggggcgggggtgggggtgggaaactgatgtccagagaagggaaaagacctgtacccggaatatgatccaggtgtccctgactctgtcccttgctctttcatagacaggacagccaaaaacaaacaaacaaacaaatgaacaaacagaaaagttccagactctggtgaaacacatgtttcaggcccctcagcaagagtggacaagacaaacatctttacaaggtttgtatttgtatgctgwatggttagatgccaggcccctttcaagatcctctggcctcaggaaattctacagacttctgccagcctacacatcctacattagtcctgtccaaagataagacagcatcaaatatagcctgaaa

SEQ ID NO: 689956 - DNA, 631 bp, Homo sapiens
ggcagtgacctgggcaggagaaccacaacttcctttctaactgtaataaaattagaaaartttgccaatgttacaaaataaagtccagaaatagactcatatatctaattacctgatttgtgattaaggtagtgcataggaaagaaggcatagtttgtttattaaatgtcgctccatcatgcgctttatacagcattttcacttaacagcctccctctaatgacctccacctggtaatctttatttaacccaaaactcaaggcctcagtcccctgtacagatcagcctgtgtcccacaggactggccggggggctctcatgtttgtgatagaagaggaatgaatctccaagttggccactactggattccctagctcagcacaaacatttcaggtgcacctgccacacagggtcattctaagagtatgtttaaatcattgctattaggtgcatttaccctatagcagatgtaattaagttagagatcttgtgttggggagatgatcctggattatttgggtggggcataaagaccatcacatgtgtccttatatgacggaggctgaagttggtcatacacacagacagaagagaaggccatgtgaagatggaggcagagattggaatgatg

SEQ ID NO: 689957 - DNA, 631 bp, Homo sapiens
ggcagtgacctgggcaggagaaccacaacttcctttctaactgtaataaaattagaaaagtttgccaatgttacaaaataaagtccagaaatagactcatatatctaattacctgatttgtgattaaggtagtgcataggaaagaaggcatagtttgtttattaaatgtcgctccatcatgcgctttatacagcattttcacttaacagcctccctctaatgacctccacctggyaatctttatttaacccaaaactcaaggcctcagtcccctgtacagatcagcctgtgtcccacaggactggccggggggctctcatgtttgtgatagaagaggaatgaatctccaagttggccactactggattccctagctcagcacaaacatttcaggtgcacctgccacacagggtcattctaagagtatgtttaaatcattgctattaggtgcatttaccctatagcagatgtaattaagttagagatcttgtgttggggagatgatcctggattatttgggtggggcataaagaccatcacatgtgtccttatatgacggaggctgaagttggtcatacacacagacagaagagaaggccatgtgaagatggaggcagagattggaatgatg

SEQ ID NO: 689958 - DNA, 631 bp, Homo sapiens
ggcagtgacctgggcaggagaaccacaacttcctttctaactgtaataaaattagaaaagtttgccaatgttacaaaataaagtccagaaatagactcatatatctaattacctgatttgtgattaaggtagtgcataggaaagaaggcatagtttgtttattaaatgtcgctccatcatgcgctttatacagcattttcacttaacagcctccctctaatgacctccacctggtaatctttatttaacccaaaactcaaggcctcagtcccctgtacagatcagcctgtgtcccacaggactggccrgggggctctcatgtttgtgatagaagaggaatgaatctccaagttggccactactggattccctagctcagcacaaacatttcaggtgcacctgccacacagggtcattctaagagtatgtttaaatcattgctattaggtgcatttaccctatagcagatgtaattaagttagagatcttgtgttggggagatgatcctggattatttgggtggggcataaagaccatcacatgtgtccttatatgacggaggctgaagttggtcatacacacagacagaagagaaggccatgtgaagatggaggcagagattggaatgatg

SEQ ID NO: 689959 - DNA, 1310 bp, Homo sapiens
cagctattacacaacctctttggactctccctttccctcatatctggttacttgccaaatcctaccgatggactctccataacgttccccacctcttcactcttattgccctgtctgtacctaggctggggcccaatgcacatatctctcaaccatagcttgccattcaaaggcttctagggccagcctcatcctacctcataaaccaaccttccactatcccactgttcactcaaatgagcaacccactcttgtcaaagtagcctactttaaaccagtctgcgttcctttgctcatgccatttcttccatccggatttctattttccctgtgtattcattcaccactcccaccccatccatgcattcaacagatgtgaatgagtgcctgctatatgctaggcactcctctaggtgccaggaacccagtgatgattaagacaaagtctttctgccctgggaactcacattctcctggagaagatagaaaataaagcgggggaaagggataaataatggcacagtgtgtatgtgtgtgtgtttgtctgtgtctctatgtgtgtgtctgtgtgtgtgtgcatacacgtgtgtgtgcatgagtgtgttttaggcagagtagagtggtcatgaaaggcttctttgaggaggggttcagatcagagacatgaatgaaatgagaactagttatatgaaaattggtgtaagagcttcaaagtcctctcctccaacagagggcaacataagctgtatataagccaccctaacccctgaattccagaacttactgcctgtgaaattcacacatctctgagcatatcctgccttgagttgcttcttaccttttcaagcctgactagatgataagttctttgagggtagtagcttgatcttacttcataaaaatcacagattactggggcattgtggcatgcaacacctagtgaaggtagaataagggagaaatcatttcactgtgcttctgtgagactacaagaaaaaatttattccttgtgatttaaggaagacygttttgcaggtgtcattcattccatgttggacgtattcctagctggaagctaggaaggtaactgaggtcatttctctgatttgaatccacgagcagataaataaacccctcatgactcaggcaaaaaaaaaaaaaaaaaaaaaaatgccaccacagccctaaaataaaaaaacatccactgccaaactatcttgaaatcattgagctgaagtcacaaagcaaacgccattccgaggtgcttctgcccttaggagaaggagtccaggatacatcagcaacattct

SEQ ID NO: 689960 - DNA, 859 bp, Homo sapiens
tccaaggaggttgaggctacagtaagctatgatggcaacactgcactccagcctgggtgacagagagagaccctgtctcaaaaaaaaaaaaaaaaaaaaccgaaaaaagaagataaaataagagaaaaaagttgactactagttagtgaaggaaggtaacacaaaagaatgttacaggcagaggaaactgtgcatacaagttcagtagtggaaaggagaatggcactcgaaacaagggcaaggtcaacagtgctggagtgaaagaggcacaggatgaggctgggggcggtggagcagcaagaggcaaaaccaggcacgctgtaggcaagtcgggggttgtggcttaccccaggggctgtaaaaagccatctcacatttgagtctcggggaagcataccagcctccataaaaccagaatcatatagatcccctctttgaggtaaaaaaaaaaaaaaaagatacatatatatatatatatatrtgtgtgtgtgtgtgtgtgtgtgtgtgtgtgtgtgtatatatgtgtgtgtatatatatgtgtatatatatgtatatatatgtgtatatatatatgtgtgtatatatatgagaaatgaatcaccttttaagaagcaaatcagctttaattaaagacaaatggaagaaaatcacttggacctaaaagtgcttttgtttattcaggcattacgctgtaaaatgcttttcttgcctaatgagagaagctggaggataaaaattgtttacaatctaggtagttaaagaatctatatgcttgcaagtcagattgagataaggtctcagtaaaactaaacatgattatgctcttcttaggtgacaaatttctcagttgccacttca

SEQ ID NO: 689961 - DNA, 595 bp, Homo sapiens
cttaagggccgttccccttgccggcctgggctcaaacaacagccggagctgcgccgccccgccccgccccgccccggtcccgggagcaggccggctgagggcggccatggaccccacaagggcttgggccgccgcggactcccccctcggggctaggagacggggaccgagatgggccagaagcccccaagccagcccctggcgagaagccggaaagacgcgccctccgcctcctcccacccaagcctcgcgcagtcccagcccggcctgggatgggcaagtcgcgggggaaaggggcgggcctgccccgcccggggagccggagcctctccggggcaggctcccctttgtcccgggactcgaagcgccccctctccgtcctcgccctgccccgcggggccgcggccgggcrcctcaccgtgatgttgcagtggagcgtgagtggcggcggcagcgagtgcgggctgccctgctgcggcaccaggaactggcagtgcagctcgtccagcttccaactgacgatgcggaatcgctcgtggttcttgtcgaagatggacgccaggaacttcagctcggccttgagccctgacacgga

SEQ ID NO: 689962 - DNA, 1197 bp, Homo sapiens
gcttatgggaatactgagtaaacatcacaattttataaacaagcacataaaactaaagcacaatagttggccaggcagtggctcatgccataatccyagcactttgggaggcccaggtgggtggatcacttcaggccaggagtttgagaccagcctggccaacatggtgaaaccctgtctctactaaaaatacaaaaattagctgggcatggtggcgcatgcctatagtcccagctactcaggaggctgaggcaggagaatggcttgaacccgggaggcataggttgcagtgagccaagattgcgccactgcactccagcctgggcaacagagtgagactctgtctcaaaaaaaaaaaactaaaacacaatagttatgtcatttctccccaatcagtaaaggcttcgttaaagatattttaacattaaactatgaaaaacgtaagaactatgacttggtggctagtaaaagactggtggtgtcagcaagagaaaggttaaaaatttactatttttcagtcttgtgtttattttgtatatgtaaatatttggctgggttacctaacattccacttccaaaactgatcatgaggttttatgacaaaagaagtactttttatagcaattttactgcctgatccaaaaacagtctacggaagctttaaaggtaacaaaagaaaactgtacacaattctaaacaactatttcacacccaacctgggatttccactcactgtgatagtatatttgtgatcaactttgtaaccacctgtcaaaaggaaacctctaacatctgctcacgaaggaatccttcagcatttcctgctctgcagcagaaaacacatgggaatcactcagaactccagatttccaaaagaacagcctttcccagagagtaagccagaggacaccgtcctctgagatgctatcgtgtaaattattaaacaaatttgggaaaaatagaaaacagcattaagcctccaagaagtcctttggtaaaagatattctgaacctggtttcccaaaaccttgcagtcccctcaaaacaaacatctattaacaaaccactaggtggggtgcggtagctcatgcgtgtaatcccagcactttgggaggctgaggcaggcggatcacgaggtcaagagatagagaccatcctggccaacatggtgaaaccccatctccactaaaaacacaa

SEQ ID NO: 689963 - DNA, 1869 bp, Homo sapiens
tgtttatctttttgtgtaccttctaactactattattattgtgtatttatcaaccacttgtagggaacatattgaagtcacagtaggaataaactaagtggacaccatacccacaagaggaaacaaaaacttatttctgrtttgaaatgtctacatggaatgccaatcatgatagcttgcaatgacaatttcagaaatgatgaaagttcaaaacataagatattttaatctgaatccaagtaacaatgatttactgtcaagaaacatgtatgttagaatatgtttttaaaataattgcttttttttcagaataaaaacgcaatcattcattttgttcttaaacttcatactcattctctatgatgaaatgatttattttttgtatatgaaaacaaataattgtatcacatatgctgatgaggtggagggtacaaacatctactacttaaaattgaatgtagaaatgtagtaaacttggcaaaagtctacattgtataaagtccaagtcttggcatttggggcttcatagtaaatacaattacctcaacaaatttggtctattggtttctgaaatccatgttaaaataagaatgaaatgttgcattttgggatttgtagttcctttgggctgaagactgcattaatgattagggagatactgatatattcctctctatgcatccttgggtcatccctccctaaaataaaatgaacatatgtgagagcaaacatatgttgtcattattgctaccatattgccaatgcttataatcatcttctgctacttcttctaatgctaataatttttctaatacatttgtttcaaaaaatcatacaatgcatacaaatgatcaatttttaagaataatagtcgtttgctgataggtaaattatatgtcaaaattgttcatggaactgttatccatggtatttgatagaattgtatttgaattaataaatactttattgtcaatttgattctaattctactgccaagcatttctgtaattaatctttcagagtcaagatgaagatgccatctgaaatttctattctatgaatgacatctggatattgatttcctgaaattttcttgaaactacaccttgtcctctctagtaagtatctaaaatgcttcctaaataaagaacattaaagactaaattttttttttgtttttgagacagagtcttgctctgttgcccaggctggagtgcagtggcacgatcttggctaactgcaacctctgcctcccaggttcaagccatcctcctgcctcggccccacctagtagctgggattataggcacacgccagtgtgcctgactaatttttgtattttttggggagatggggttttgccatgttggccaggctggttttgaactcctgacctcaggttatccacctgcctcggcctcccaaagtgctgggattactggcatgagccaccgcccccggcctaaagactaaattcttaaaagccacaaaaatttttttggcttcttgagagcttttaaatcaccaaagagcttacaatttagggaagactttaggaatgctctattcaaacctaatatgaacaaatttctttaaatattttcaactacacatgattaattgacagtgatttccctccaattagactatctgtaatgaaaaatatgcaggtaaatggatctaaactattccacaaaaactcattcataggttttcttatacttgtgaacattatttggagaatttaaaaaaaaaggtttagaaaattattaaacaacgtaacacactgggattgtttaaatagttttaaaatacgttataatgtatatattacaggaggaaaagacagcaaattaattcaaagatgag

SEQ ID NO: 689964 - DNA, 1149 bp, Homo sapiens
tgaccgatctttccattttttggtgtcctcttcaatttatttcattgaggttttatagtttccattgtagagatctttcatttctttggttaattactaggcattttattttacttgtacctattgtgaataggattacttttaaacttttttgcagattgtccactgttggcatatagaaatgctactaattgtgtaggttaatttagaatcctgcaactttgctgaatgtattaattagttctaatagtttttcgatcaagtctttaggtttttcaaaatataagatcatatcatctgcaaacaagaataattttactgtttcattttcaatggattccctttatttcttttttttctatctgattgctttagctagcacttctagttctatgtcaaataacagtggtgaaagttggaatccttattgtgtttcagatattagaggaaaggctttcaggttttctcctttcattctgatattagctgttggtctgttgcatttggcttttattgtgctgaggtatcttccttctataccctatttttaaatgaktttttaaatcatgaagggatgttgaattttatcaaatgtatttttagcatctgaaaagcaagagaagttttggaaactatacagtgattttgaaactgtaccgtggtttgttcttgattttctaattctttaaaatcaattgaaatgatcacaaggtttttgttcttcattctgttgctatcacattgatttgcttgcatatgttgaatcatccttgtatccctgagataaattccacttggtcatgatgagtgaactttctaatgtgttgttgaattccatttgctaatattttgttaacaattttaccaacaatgttcatcagggatattggcctgtagttttcttttcttttctttctttattttcttttttttttttttttttttgatatatctttgtctggttttagtatcagagtaatactggccttgtagaatgaatttggaagtatttcctcatttattttttggtaatactttgagtaggattggtattagttcttctttcaatgtttggtaaaattcagccgtgaagccatggggtccacggctttatttttttgctgcaggacttcttactatgctttcaat

SEQ ID NO: 689965 - DNA, 630 bp, Homo sapiens
ttttgtctccttttgtttcccacgttgagacagaatgaggtaggttatgtcattgtaaaatataaccagatatttyactaatataaataaataagagcttacttctcatgtatacgttctgtccatgctgtatttgtggttcatcctgatctctgtaaacctcacttcaggacaccaaagcacaaaggcttcaacacttagcatatcaccaccctgtaaaaggaagggggggaccataaaaaaccatgcacagtcagcttctgcctggcaataatttataccactttcgttcatattttttggtccacataacgaactcctcagtggaaaagtgcaattttctaatgtatactttatttttcaacaattatttgggtctcatttctttatataataaaattgattcttaccaaacacaggagtaataatccaaatccctactcattcacaggatgaagatgaaatttcaagatttctagggaacataagaaacccataaactaaaagttaggatatttgcatgtttgcttgcctctcccaccatacaaattacagtggtagaacattgtatggtaaaacattaatataatatcccaaacctttctgattcataaaagaaaaaaaaatgag

SEQ ID NO: 689966 - DNA, 630 bp, Homo sapiens
ttttgtctccttttgtttcccacgttgagacagaatgaggtaggttatgtcattgtaaaatataaccagatattttactaatataaataaataagagcttacttctcatgtatacgttctgtccatgctgtatttgtggttcatcctgatctctgtaaacctcacttcaggacaccaaagcacaaaggcttcaacacttagcatatcaccaccctgtaaaaggaagggggggaccataaaaaaccatgcacagtcagcttctgcctggcaataatttataccactttcgytcatattttttggtccacataacgaactcctcagtggaaaagtgcaattttctaatgtatactttatttttcaacaattatttgggtctcatttctttatataataaaattgattcttaccaaacacaggagtaataatccaaatccctactcattcacaggatgaagatgaaatttcaagatttctagggaacataagaaacccataaactaaaagttaggatatttgcatgtttgcttgcctctcccaccatacaaattacagtggtagaacattgtatggtaaaacattaatataatatcccaaacctttctgattcataaaagaaaaaaaaatgag

SEQ ID NO: 689967 - DNA, 417 bp, Homo sapiens
ggtagcggtaaattttgtggatgtgcaaatgggtgtgtgtgaatatgtatgtgtgtgtgtcagagagagagagwaaaaaagaagtatcaattagaattaagaaaatatgacaacagaaaggaaacaaagccatagtggcaaattggagattagaaacattctatgaccccatgtgtaaatattacaaagacagacaactggccttaaataacagaacattaagattagtctgtgtcacctataatgtaaatttaataaaaacaaatttggcataaataaactgagtgaattttaaccagactatatgactgacatattataattttgaatgattaatgaaataatttatttgaacctgctgatagcgatttattgtaaaaattgaagtatatattgtttatagggtttcttgaacaa

SEQ ID NO: 689968 - DNA, 643 bp, Homo sapiens
tgcaattacttttacacgaacttaatataaatgtatactgaattatgttttctttttgcatcttttgagatgaacctatggctttgcttttttagtacattgtttcatctgttgttgatgttgttctggatgtttgtggcatattctargttctttgtatgtctgactaattttggatctaaatgttgtgtattttacagagatggatgttaaattttgtcatattcctttaaatattgtttgttgatctttgatctgaacatgcttaaattaattggagtagtttaatatttttcagccttttatagaaaaccttttcaaggatgagtcaagagaaacttttaattacagaagtgataccattccaaggctctacctttaggaatagattaaaattacatagatgaatataaaatatcattctggtttgacatgaagttgcttatgttgccctacgttttaagaagtctttcaactctgactaaaacataagctattcccagcccagtgtgaactctggaaattgttctgccaactgcttttcaatggttctttcaccaatctcagctagttttttctcatgcatgcacagatcaatattcagctaaagcctggaagagttcccttctacacagcaccttgt

SEQ ID NO: 689969 - DNA, 600 bp, Homo sapiens
cagacttcttggctcctgcaggccatctggacatatatgtgcaggtcacaggggttacaatggctgagcttcggctcagaggcctgacagtttactccataaattctagttgctttgatctcccagctcgttcggtctttgtctcgcctattcagcaagggtgctatgtttaggttcctattctgtttgacctagaaaatgaggtcaggcaaagtgacttatgcctgtaatccaagaactttgggaggccgaggagggtggatcacctgaggtcaggagtttgagaccagcctggccaacatagcgaaacccaatctcaactaaaaatacaaaaatattagccgrtgtggtggtgtgcacctgtggtaccaactacttgggaggctgaggtaggagaatcccttgaacccaggaggcagaggttgcagtgagccaagattgcaccactgcactccagcctgggtgacagagtgagactccgcctcacaaaaaaaataaataaataaataaaagaaattgaacagtacactggaaaaattgttgggttcactttaatagtttttccttcttttaccactcctggttgcatatcatctattg

SEQ ID NO: 689970 - DNA, 318 bp, Homo sapiens
ttcttacagtgtggctgggcatgtgggcctctttctgtaaattggtgtttagatcttggggctcgaatacatttatcttcaatttttgtggcaagaatgtgttttagatggtgttacatatgtcttattgtgccacattagaggcaccctgataatcacttttcatgatgttaagattgacccatgagttcaggtgttaattgaatccactgactaaaatatcccattaatgtttcaactaatggtttggcagtccttgatgatcattgtttaatcctttatctcactgggcattactaaasgatgattttcaaattc

SEQ ID NO: 689971 - DNA, 595 bp, Homo sapiens
gctaacacttgctatgatacgttattattttaatgtcatgttcatccattcacttgttcttgcttcattattatgcagtggaaagagcttgtagcatgcaggtgtycctgagcatggctgggtttaaggggatggggctgtggagcagcggtgccctctctgtatccacgctacctgcgtgggcctgagcagacctgataatacatgacagtgcagtgtaacatcattcccaattaaagttcacaggaatcccaggggaggtggggaaagatttccattaaagtccccagagttagcctggagctaaagactaacattgctagtgcagtgtgttaaaacctgattcatgacacatttgaaaacgataccattttaacataaaacttacaaaataattagaaatacttcacaagagagcccaaaacaaggaaaggaaagggaaaaaataaaaccccacaatttgcaacccctctgaaccatctctacagaatgactctctactgaagtgcagaactttgctattcagtgaggtctgggagccagcagttttctcattcccataagcttattataaatgcggaacctctgtatcagg

SEQ ID NO: 689972 - DNA, 695 bp, Homo sapiens
tctaaagttcccaggtagcaatgtcttgctactattttcataggctcaggtggtttgtcatactaacaatattagtatgcatgatgctgatacattcttcttgattctgaatgtcctctgctttgaagaactggcctttgaagaactgagcacttcagggtcatacatttttcagtgtgcggtagagtagagagaggacctttcccttttctgttcagtggccttcactggcccgtgcagggagaggcatgtgtgccctttgtgcccggcttcttcttgaaccccagcattgttgctgggatcactgacgtgcattgcaaactcattcgatcatctttgcttgtccattatctggggatcatcgcaacaatctgcgattgactccctgctgtgaactagaccctggaaaatttaggaaactgacttttgacacttttctttttattcccttaatttcttaatgtctgcatctgctgtaattacaacaaatttaaattataatggagatccaactgtgggggtaaaatgggattatgataattgttagaatggaaagacatagaaataggtttcaaaagctttcagaaaagctatctgaccaaaacgagatcaatgcrgttggctgctaattaaagcaaacagacaaaggaacgcaacctagctgatttttaatgtatgcgcttcataacacagct

SEQ ID NO: 689973 - DNA, 787 bp, Homo sapiens
tgccacactatctaagtttttcctgggacacatcaccagggctttggggagtaagaggaaagccattgtgtccatgctgaaagctttctttgttaaacattgtgcaccaaaggaggtcacatccatccagatgcagttatagatgcaatatcrttaggattttagaagacagatgttcaatgtgtttatctcctagcaatttggattaagagccttacacctaaaagagtgagtgccctcacgcttaattcactctttccacttcccagttctatgatgggtctttttctgggttaatgtcttcgatgctcagtttatgccacgtagacagagaaagaaacaaaagcccagttaaaatgagctgattaaagaatgtggaaattatactcatgaaactgccccttttaaataagaaaattggtgtcatgtgtcttttatctcaagcgtcttctttacagatgagtttttctaatcacagtgtgcattgaaccaaaatgaaccaagcttgaaggcagctctactagtgctcatttattattattttttctttctcattctgggaaaactagatttttccttgctcaagtactcttttacccttccaggaatgcatcattggcttttctgagtgaccatagacaaatgagtttctagtaagttaataaagatgtagtttctacatttttatggtaaattgagtttatcattgtaaaacaaggtctgtgtgaggcatattaaatatgtgttctaagtgcccagatatttcttagagctttcccctaaaccc

SEQ ID NO: 689974 - DNA, 626 bp, Homo sapiens
ctaatgttggacacttatgttgattcaccattatgaatggcatcattgtgaataacactaattagcatatatatttttcatattttgaacaatagccttaagacarggtcatctcagtgtgattgctgattctaattatataaatattttatggagtttttaatgtgtgtggtaaaaatatttttcagaatagccatgttattttgaccttaagtagtgaagcctttgttttaaggatagcatttacacttttacaaatgataaaatacccttgcattttagatgaacaaatatcatcttttctaacttcgtgttgtctttgtgcagtttaaaatagatacctggtcattccccaaaagagaagcatgaggacaatgacctcaattatctgcctctcctttaaaaatacaaaaccattaaaaaatgtaaaatgattatctttatacattttattttttagtaagtgaaaaaccttacaaattctgaccacttcaaattaactttaagtcaacatgaatttgcctcaatattaacatccttaacttaagtacttacatcagctttgcgactttcattgcgcagtaatgcaaggtgattctaccttttgtgctaaaactgtaatattc

SEQ ID NO: 689975 - DNA, 626 bp, Homo sapiens
ctaatgttggacacttatgttgattcaccattatgaatggcatcattgtgaataacactaattagcatatatatttttcatattttgaacaatagccttaagacaaggtcatctcagtgtgattgctgattctaattatataaatattttatggagtttttaatgtgtgtggtaaaaatatttttcagaatagccatgttattttgaccttaagtagtgaagcctttgttttaaggatagcatttacacttttacaaatgataaaatayccttgcattttagatgaacaaatatcatcttttctaacttcgtgttgtctttgtgcagtttaaaatagatacctggtcattccccaaaagagaagcatgaggacaatgacctcaattatctgcctctcctttaaaaatacaaaaccattaaaaaatgtaaaatgattatctttatacattttattttttagtaagtgaaaaaccttacaaattctgaccacttcaaattaactttaagtcaacatgaatttgcctcaatattaacatccttaacttaagtacttacatcagctttgcgactttcattgcgcagtaatgcaaggtgattctaccttttgtgctaaaactgtaatattc

SEQ ID NO: 689976 - DNA, 626 bp, Homo sapiens
ctaatgttggacacttatgttgattcaccattatgaatggcatcattgtgaataacactaattagcatatatatttttcatattttgaacaatagccttaagacaaggtcatctcagtgtgattgctgattctaattatataaatattttatggagtttttaatgtgtgtggtaaaaatatttttcagaatagccatgttattttgaccttaagtagtgaagcctttgttttaaggatagcatttacacttttacaaatgataaaatacccttgcattttagatgaacaaatatcatcttttctaayttcgtgttgtctttgtgcagtttaaaatagatacctggtcattccccaaaagagaagcatgaggacaatgacctcaattatctgcctctcctttaaaaatacaaaaccattaaaaaatgtaaaatgattatctttatacattttattttttagtaagtgaaaaaccttacaaattctgaccacttcaaattaactttaagtcaacatgaatttgcctcaatattaacatccttaacttaagtacttacatcagctttgcgactttcattgcgcagtaatgcaaggtgattctaccttttgtgctaaaactgtaatattc

SEQ ID NO: 689977 - DNA, 634 bp, Homo sapiens
caaataaaataaaatatgctaaatagacagatatatgtacccaaggtgcataatcatttttattatgacaacaaactagtgtttctaaagcactgcctttattatctcatatccgtgatcaaaagtcttcaaggtcctaccatctcttatggctttaaatgtaaatttctctctcctaaactatgaaatcttgggctgggacttgtcttagttatctttgcaaccccagtgaaacactagtgccatttattcaacacacatttcctttaactgggaataagatggacttttaaaattgtcactgggcataataagatgctattggcttcaagtaacagaaaatacaactagcaatgacattamaaaatacatgcttatcgcatataacagaattatagatatagtgagtttctggattagttggctctataatgtcatgttttttctctcctcatcctccacccttagcatattggctttttatcctcaaccgtgcaccctcatgcttccaactggctgacatagctttgggcatcatgacctctcatgaacacatttaaagtaggaatcagtgaagacaagcaacatgagagctctccttacttccctctctctctctttactagtgaggctg

SEQ ID NO: 689978 - DNA, 634 bp, Homo sapiens
caaataaaataaaatatgctaaatagacagatatatgtacccaaggtgcataatcatttttattatgacaacaaactagtgtttctaaagcactgcctttattatctcatatccgtgatcaaaagtcttcaaggtcctaccatctcttatggctttaaatgtaaatttctctctcctaaactatgaaatcttgggctgggacttgtcttagttatctttgcaaccccagtgaaacactagtgccatttattcaacacacatttcctttaactgggaataagatggacttttaaaattgtcactgggcataataagatgctattggcttcaagtaacagaaaatacaactagcaatgacattacaaaatamatgcttatcgcatataacagaattatagatatagtgagtttctggattagttggctctataatgtcatgttttttctctcctcatcctccacccttagcatattggctttttatcctcaaccgtgcaccctcatgcttccaactggctgacatagctttgggcatcatgacctctcatgaacacatttaaagtaggaatcagtgaagacaagcaacatgagagctctccttacttccctctctctctctttactagtgaggctg

SEQ ID NO: 689979 - DNA, 593 bp, Homo sapiens
tgtgccatgttggtgtgctgcacccattaactcgtcgtttaacattaggtatatctcctaatgctatccctcccccctcccccsaccccacaacaggccccggtgtgtgatgttccccttcctgtgtccatggcttgcactaaagttttctccagcttctggctccatctggttggccactgactcccagtggaatactgtgggtgtttctcctgggaggaaagtctcatcgacgggcagcagtccctctctctgcctccctgcctgtggctccagggggcccctctccatgctgctctctgcatactctctgcctgtgaatagagacagagttccctgggtcgggaagaccccgtgggaggcagtgtggtgggcagaatagagacggcctggaactggcctacatttcggaatgaatgagtccagctttgagcccaggagacccaggaacgtgaactgcagcttgaacacttgaagactggctgacttactctgtgacaggacaccttgtttccacagagcaggctactctgccgtcactgaggcctcttaggcgcatctgaggccggctgggcaagcgattgaatggggat

SEQ ID NO: 689980 - DNA, 1096 bp, Homo sapiens
ggaatatagagaaaagaattcaaaagcacttttgaagctatcaaagccttggtgactagaagaataatagtagaaatataagaaggctaggtgagagaggaggctggactggcagaaatcaacagcaaaagaaagatgagttttataccaaaaaaaaggcgagtctgtcacaacagtaactgcctctgaggaaaggggaagtggatttggggacagtcatcaataatgctcttttgttccttaaaacaagaaagataaagtaagtataattaaatgttcacgggtcataattctaacaaatgcaggtatctgttatattattgattgtacctacctaaaagaaatccattaatagaatctttttcagtagtaaaacaacttatgcctgcattgtaaaagcattaacatcctttgccttggatattatttttaattttacaaattgcaaatgcttgtacattaaaacatgtacaattacactctcttgctaggggctaatatagtggtgactttgaagccaatgttccattacaattctgaaaattatagggcccttaagaatgatgctaaatctactctgcctgtgcctctacatacggaacaagttttaactttcaatagttcaacaaatgaaatgatataacaaaataaatataagaccccagagcttaaggatagaagagactttaatgatctagcacaactcttyccaaaaccttaacactgacaaccactaaagttcaaataattctatcttaatatgaatgacttgcttatactcttaccatatcataaaaataaagtacatcttatataattttatgtaagatatgattaccaaataaatcccaaatgaaaacagagtttactaattgatcccaatgcctactcccataatatcttaattctcagcttacccagttttcgtcatacaataccaaagcccaaaaaggtaatttggtgttagaaactttgttgttgctgaaacagagtttcgctcttattgcccaggctgaagtgcgacagcgcgatcttggcccaccacaacctctgcctcccaggttcaagcgattctcctgactcagcctcccgagta

SEQ ID NO: 689981 - DNA, 626 bp, Homo sapiens
aaactcaaaaaaaaaagaaagccaaccaattattatatttaaaatatattgtgcccttactgtgtgccaggcactgtgctgaaccattttcacacattatcaaaaaacagaacaaaacaaaacaaaactgggcatggtggctcactcctgtaatctcaacactttaagaggtcagggcaagaggattacttgtgctagaagtttgagaccagcctgaggcaacacagtgagaccccatctctacaaaaaatttttaaaagtagccacacatggtggcatgtgcctgtagtcccagctactcgggggactgaggcaggaagacagcttgaacataggagtttgaggatgcagtgagccatgatcttgccattgaactccagtttgggcaacagagacccagtctcaaaaacaaacaaaaaaaacctataaggtatacactatcatctccaaattacagatgggaagaaataagacctgcagaggttgaagtgtataaagtcatatagctattaagtgatagagcttgaactcaacaacagataactacaaagcctttgctacccgtaaataaaataacaygaaatataactgccagaagaaacgtaaaaagaaaggaaaaaaccaat

SEQ ID NO: 689982 - DNA, 1358 bp, Homo sapiens
attctcgataaatgctagctattattatttcctgagaaacacaacctagagagtaatttttttctagagattaaatttaagcaaagtaacaaggaaatagtctaggcattcacatatcggcrggggggtggggggggggaacctaaaccaagtaaagattacacagagggttttctctaattaggtgaatcaaattcataaggctgagatttttttttgtaagagttctttaaacagaaatacagttaactttactaacaacaatgaagcaacacataaagttctgaaaaggcagtcaggagtccccggagtgttaacagaaagaacacaggacttaaatacagaactcaggtccaaatagcagatcgaaccacctgccaggtagacggcatcaaaaaggtaatttaaattctctcattctgttttttcacttataaaattaggttaaaaaatagctgtcacagaaagcatggccagcaggtcctccacaggacctttccgttctgtgcctaaaattctgaactgtgttttacaataagcctgaaagttcgttcaccgcaatatagtatttgcaatccaaagtcaatatttcaacacaaaattggcaggcaggaaaggagggagagtctttcgctaagtctaagtaagagtctgacttctcactaggagcatgtctgttgtacttacttcaaacagcatgcaaagcatgactcatcaaggaataagaatttcaatgagtgctttttggttaagaagctattgtgaatatttctgcctttggagatggctaaagaaatagcattattaagccggtgcagtggctcatgtctgtaatcccagcactctgggaggatgaggtgggtggatcacctgaggtcaggagttcaacaacagcctggccaacatggtgaaactctgtctctactaaaaatacaaaatttagctgggcgtggtagtgggcgcctataatcccagctacttgggaggctgaggcagaaaatcacctgaacccaggaggcagaaggaggttgcagtgagccaagatcatgccactgcactccagcctgggcgatgagagcaaaactccatctcaaaaaaaaaaaaagaaacagcattattattaaacaatacgcacagaattcatggaagaaacatgaacttcccacatataccttccttcatttacccagcttttccccactgctcttcaaacaagatcattcttatctgcactaattgctgaattgtggccacaagatgaacatactcctctttcactgacacctacaagatatttaagcttacattttaagattgctaagaagttgaagtcagttagcaaaattccttaatctgct

SEQ ID NO: 689983 - DNA, 678 bp, Homo sapiens
gggcgcggtggctcccgcctgtaatcccagcactttgggaggccgaggtgggcggatcaccaggtcaggagatcgagaccatcctggctaacacggtgaaaccccgtctctactaaaaatacaaaaatgagccgggcgtggtggcggcgcctgtagtcccagctactcgggaggctgaggcaggagaatggcgggaacccggggggcggagcttgcagtgagcagagatggcgccaccgccctccagcctgtgcgacagggcgagactccgtctcaaaaaataaataaatacataaataagaaatagacatgcatgaaaataataggtaggctatataatacacagaaaacatttatacaaaattaatgtccaggccgggagctgtggctcacgcctgtaatcccagcacttttggaggccgaggcgggcggatcacgagatcaggagatcgagaccatcctggctaacacggtgaaaccccgtctctaccaaaaatacaagaaattagccgggcgtggtggcggcgcctgtggtcccagctactcgggaggctgaggcaggagaatggcgggaacccgggrggcggagcttgcaatgagccaagatggcgccaccgcactccagcctgggcgacagagccagactccgtctcaaataataaatatataaaaaaaaga

SEQ ID NO: 689984 - DNA, 649 bp, Homo sapiens
attttcaaagctgtgttgtggctagatagggaatacacaatttagatagtgaaacaatcaagcccattctaagtgccaaaagtttaatcccttaatgagaatctaaaaaagttttttttttaagtgtctctgagaaatactaatggtaactttaaaaatgtatatatttatatgcttacttttattagcgattcttagtaagctcccccataccaataatctcatattactgagcaatcactccatgtagttagagcaaaagtcttctgctgttgtacggaaaaattgatctttagsctgtgtagtggatgttgttgttgattggcacagatcttttctgggtctgcacttgtccatcaactgctctgagtattatctcagtggttgtcttttctcggccaagccagagcccctacggctaggaaggtatgctgctctctacctaccctcttccaaagcccagagccaagactgactgtttttcttgccataaaatggaatcaactttctggcactatccatactctggagcttcccactggacaggctgaagttaggttatagctacttagctttttccccctggcttatcctgctttttttactccccttatccagagagcacgtgtccaatacattactggaaaaa

SEQ ID NO: 689985 - DNA, 649 bp, Homo sapiens
attttcaaagctgtgttgtggctagatagggaatacacaatttagatagtgaaacaatcaagcccattctaagtgccaaaagtttaatcccttaatgagaatctaaaaaagttttttttttaagtgtctctgagaaatactaatggtaactttaaaaatgtatatatttatatgcttacttttattagcgattcttagtaagctcccccataccaataatctcatattactgagcaatcactccatgtagttagagcaaaagtcttctgctgttgtacggaaaaattgatctttaggctgtgtagtggatgttgttgttgattggcacagatcttttctgggtctgcacttgtccatcaactgctctgagtattatctcagtggttgtcttttctcggccaagccagagcccctacggctaggaaggtatgctgctctctacctaccctcttccaaagcccagagccaagactgactgtttttcttgccataaaatggaatcaactttctggcactatccatactctggagcttcccactggacaggctgaagttaggttatagctacttagcttttyccccctggcttatcctgctttttttactccccttatccagagagcacgtgtccaatacattactggaaaaa

SEQ ID NO: 689986 - DNA, 612 bp, Homo sapiens
aattccattatagacaagctccaaatattgatttgtgccttttatttccttggtctttgacatcattgtaggactaaaaatgttcaaatctgttgctgcatgacrgaaagaaaatggtcaagagatctcagatacatcaaaaaatagtttactgaatttatactttacaagacactgtttttgtagtgtaggcctacgtgggtccaaaggagaaccaagtacaaaagtgtgagcagggaacagctttggaacacactcagtaaaggtacctggaaggggcttgtcagggaagcctccatggagtggcctcagagaggcacactgacatcatggcagccaacagagaaggaaatattgtcttaaacagaattcacaatgcctattttgtaggcatgcaaattattaaatatttaatgtgagctcttggggtaaagcaaacaaatatataaacaaaaactctttgtctctttaccctttgaaatctatgtcaccataaatagctagaaaaatgctcattgaacaaataaatgaatgagtgaatgaatgaacgataaattcagaataattactttgtatttatttggcactagatgggggaataaaatatgttcc

SEQ ID NO: 689987 - DNA, 612 bp, Homo sapiens
aattccattatagacaagctccaaatattgatttgtgccttttatttccttggtctttgacatcattgtaggactaaaaatgttcaaatctgttgctgcatgacggaaagaaaatggtcaagagatctcagatacatcaaaaaatagtttactgaatttatacttyacaagacactgtttttgtagtgtaggcctacgtgggtccaaaggagaaccaagtacaaaagtgtgagcagggaacagctttggaacacactcagtaaaggtacctggaaggggcttgtcagggaagcctccatggagtggcctcagagaggcacactgacatcatggcagccaacagagaaggaaatattgtcttaaacagaattcacaatgcctattttgtaggcatgcaaattattaaatatttaatgtgagctcttggggtaaagcaaacaaatatataaacaaaaactctttgtctctttaccctttgaaatctatgtcaccataaatagctagaaaaatgctcattgaacaaataaatgaatgagtgaatgaatgaacgataaattcagaataattactttgtatttatttggcactagatgggggaataaaatatgttcc

SEQ ID NO: 689988 - DNA, 615 bp, Homo sapiens
ctgctgtcacatctaaaaaaggcaagatttagctgtgacacttgatcgaaagaactctgtactccaacccaggtgtgtgggatggaagggtccctgcgacaaaacacccctcataatccaagttcttgtgttactcttgctcatgtggctgcacacccctcaggaatttggctcgcagtaggccttccagacatgcaaagccgccattattattgtgtgaccttgcacaacccactttctctaagcccagtttcatcttcaaatcgaacaggactggaggagtctggcagttcctcaaaatgtcaaacacayagttacgacatgatccagcaactccacccctaggtatagacctaagagaaatgaaaacatatgttcatggaaaaatttgtatgtgaatgttcacaacagtattattcataatagcatcaaagtggaagccatccaaatgtccatcaatagttgaccagatcaacaaaatgtggtctatccatataatcaaatacttagccatagaaaaggaatgaagttcggatacattcttcaacacctgaaagcattatgctaaaagaagtcagacacaaaagaccacgagacaattaagataaagtttcc

SEQ ID NO: 689989 - DNA, 655 bp, Homo sapiens
ctggcatctagtgagtggaggccagagatgctgcaaaacatcctacaatgcacaggtcagctccttacagcaaagaattatccagtcctaaatgtcaatagtgccaaggttgagacaacctggattggatatttcccggctcccacccttgttctccttaagaactttggttcctgcttgcttctctgactattcctacttgagacaagaagaatgcagcatttgagttcttgccttggaccaaatctgggcaccaaccagcttggccgctgccccagctgggctggctccaggcccaccaggaakggcacgtggatggtctcatgcttccccacttccctttaatgctttgttaacatttgaattacaacactcactacagaaactacagcaagttgtaaacatgtccccccaccccaaggggccagggccatactttattcatctctgttttttccacagcaccaagctctgtgcagttgaactgggtaggtgttcgatagacattcattgcatcaaatagattaatatcactttaatttttatcatgcatctgggcatctctttgaaaggtcatggatgtagagaatataaatgcccgttaaagcaagagctcttgtgtttctgttcctgtggagtgcagctgaaatgaccg

SEQ ID NO: 689990 - DNA, 626 bp, Homo sapiens
gagttccatttggtatattatcttcaccaggattttctggtttctaaggagactttttgcatagaaacaactccaggacttgggtaatccagtatgaagtgcccacctaaggtatgagcacatttgggaagttataggtttcagagtaggtgttgattataattttaattgcctttagatataacatccaagtaggcagggttctgattggaggtcagaatgaaatatatagagaaagatcctcttgatggaaaactaagagtgggaaaagatacaaatagaaagactattttaattcaatgtgataagtcattgaaaagtaggcacataaaaaggttatccaactaattattttgtgaatcaagacaggatcaggagaatcagctataggttgtgatcagagatgagtgaggttcacatatgccaaaaggaacagttgggaaatacgtttctagacagtttaaagagaaaacattttctaaaagactgtggctacttagactgcaaagcttactttctgtttatggaggcattgttatcataggagatgacaagttcatgcatgttattgcccctgaaaacctcccaatgggacaagatgyggaggctcaagacagtgatagtga

SEQ ID NO: 689991 - DNA, 1847 bp, Homo sapiens
atagaaaaggaagtaattgattctttggtctgaattttcctctgagttaatagatttcccctttagcaacaacaaggcaaaataataaggaaggatacaagataacttaagttcagctagctttggcactgccagtcactaagagcttatctagcatttccagcactcttcatgaatggtccttctgctctatgtttagaataataaaaccttgtagctcctcaaatgttaactttgtcttggagaaaaaaaccataaatataaatttgctgtaatgcagagttctctcgtttgctttttgacatttaagaaaactgttacaaggaaatctattctgagatagatgttctactacttctaaatgtaacagtacttaacaatcgtaaatataatttagtgttcatatcatacacaatttaagacatttttcaccataatatgtttttaaaacatgcctcaaggaatcctggtgatttcatcaaccttgaaattaattccaaggtgtttagaaaaataaaaaatgctctaacatgacatcacaatcttcttatgcaaaagcttgatgttttaaaggtttttaaggcttttttactgcatgaaagctatagacaaaatgagtatgtgtataaacacattgaaagcctaataaaactgcaaatataaattcaaatgaaggtatgaggatacaacttcacataaaatttatttcattcagtagatgttgaatatcctgtattgatgtcaatttatccaaaatcatatatcaactacatcacaagttaatgaagttgaatagaaacctagttcattgtactactagcatgagaagtagacactaaaagattaatttccaaattattttcattctcttgaatatctgttacaattgttctctagtcttccacctcttaatcaaaattataaatcattatttaacttactaaatatgtggtatctgtattccaattcatttccacatcaactatatttttaacatagatgaatgacaacacaaataagaggagataggctattttccacaatatctatacgaatggagtatactgtacaatatagatacacagtggggtccaaaattagtgtaaatatacacacatacatacctgataaatatatgcacatatatgcatatgtgtatattaggcataagagagttagcatttctcagargtccatagaatctgtcaagccagagtagagagagtttgctgaaccccttgagcattgagaccctagaaagaccacacttcagcagtaactgattagtctaatcctggaggaaagaatactcttgattgctttttatgcaagtctaacaacatattgaggtaaaattgatccagaattaaaataactacctgccaaaataaaactcaataatttctaaaggaaacaaagggagtctttaaccaaaaaacattataatgtccagtgctccttaaaaaattactagacatgttctacacgtagcctcagtgatggcccccagtgatctctaccttctgatactcataccactgtgtaatcacctcccattgagtgtgggctcagctgggcttggtgacttgttttcaataaatagaataaggcagaagtaatgggatgtcacatttgaaattaggttataaaatattgtgacttccggccgggcgcggtggctcacgcctgtaatcccagcactttgggaggccgaggcgggtggatcatgaggtcaagagatcgagaccatcctggctaacaaggtgaaaccccgtctctactaaaaatacaaaaaattagccgggcggggtggcgggcgcctgtagtcccagctactcgggaggctg

SEQ ID NO: 689992 - DNA, 650 bp, Homo sapiens
tgtcggatacctgttgaatggtaagtgggggctgtggggctaagggaggatgcccggcctatgtctgagtaggagggtccatttataccaggccgggtgcagccaggctgaggcgggcaggtgggaaccccctgcaggctgcagggtccaggcactcactgcttccaatggtggaatcaatgtcggaagtccacagagaagtcatagcatgtgactggaatgaaaaattggggttaaaaattcagagccgtgtctttagttcattctttgatcctagcagttaacattaatttctcttctaagtaggtgatttgaatgcagcttatcagatttttttttttttggagtctctgtggttctttttgtgcagcttgcttgctttctttctttctttccttccttccttycttctttccttccttccttccttccttcctttctttctttctttccttcttcctttttttttttttaacttttttccccacttagtgcttaaaaaaggcatgactttgagaaaatagtcatctctctgggattcatctccgctgaagtcatcagaagctgcacccacaatggagcaggaattggggagcgggcagcggagggggctctgcttgcctcagagacagagttcctgctcatgctcc

SEQ ID NO: 689993 - DNA, 1467 bp, Homo sapiens
aggaggaaagatcaaaagtggatgatctgagggggaccccgatgtcagtaggaaccttggaagagatcattgatgacaatcatgccatcgtgtctacatctgtgggctcagaacactacgtcagcattctttcatttgtagacaaggatctgctggaacctggctgctcggtcctgctcaaccacaaggtgcaygccgtgataggggtgctgatggatgacacggatcccctggtcacagtgatgaaggtagaaaaggccccccaggagacctatgcagatattggggggttggacaaccaaattcaggaaattaaggaatctgtggagcttcctctcacccatcctgaatattatgaagagatgggtataaagcctcctaagggggtcattctctatggtccacctggcacaggtaaaaccttgttagccaaagcagtagcaaaccaaacctcagccactttcttgagagtggttggctctgaacttattcagaagtacctaggtgatgggcccaaactcgtacgggaattgttccgagttgctgaagaacatgcaccgtccatcgtgtttattgatgaaattgacgccattgggacaaaaagataagactccaattctggtggtgagagagaaattcagcgaacaatgttggaactgctgaaccagttggatggatttgattctaggggagatgtgaaagttatcatggccacaaaccgaatagaaactttggatccagcacttatcagaccaggccgcattgacaggaagattgagttccccctgcctgatgaaaagacgaagaagcgcatctttcagattcacacaagcaggatgacgctggctgatgatgtaaccctggacgacctgatcatggctaaagatgacctctctggtgctgacatcaaggcaatctgtacagaagctggtctgatggccttaagagaacgtagaatgaaagtaacaaatgaagacttcaaaaaatctaaagaaaatgttctttataagaaacaggaaggcacccctgaggggctgtatctctaatgaaccatggctgtcatcaggaaaatggttgggagatttctcagtccctgaaagggatgaggctgggggagttgcccagaggaatccctgttcccactgatttttattagcaaaacatcctgtgtcttttggagtacgatgtgtaagtgcccattgggtggcctgttggtcactgtgcagcagtctgcttcccaataaagcgtgctctttcacaaacaaacaaaaaaaaaaaaaaaaaaaaaaagagcttgaggaagtagtgcatacaatggattgaagctgaatgaatcaaaataccaatggactgttaggtagatttgtgcctgctacactactagaggactgcactctctggcaagctgagctgaagtgtcctcccataggttggtctttgggtgtgggccatagactagcaacatct

SEQ ID NO: 689994 - DNA, 1424 bp, Homo sapiens
cggcaggtgctacacatttttaaacaaccagatcttgtgataattcactcactcactatcatgagattagcactgagatggtgctaaaccattcatgagaatttttcccccatgatccaatcacctcccaccaggacccacctccaacactggggattactgttccccagtgggaaaaactgttccatgttctgcatgatttaccaaacgttccaccattccttcaggtgttaaactctttctaaaattatctcagcttacacattagcagcctttgtacattctaagatatattacatttcatgtatacataccctgtatgtatgctataaaagtcaaacccatcagaattggtagtaagacacataaagataggaaccatgttttatattttcttcacctagcacagtgcctcatacaatgtaggcatttaataagcatttgtaaaatgacacaattattaaataaagagtgataatatatcattgttaggtcaccttgtcttgttcattcattatctcatgaactttaacagtcttatcctaaaaataaagttggtaataaacacattgttacaaaatgggacctcagtttctttaggaaataattggttcacatcctgcactgccatcatcagaaagaagtccctttcaccatcaaaatatgtaaatttgagctaggtttccagaaatgattcttgattgtattaaacaattgratgttctgcactgatgttctctgttaagtgaacaggaagtgacctggatgaggttacatagctgcaaaatcccatcttcatgcaagttcctttgtggttgctagggctccatcattccacaggctgcttcacaaacatccaccataaaaataaagcctggtatcactgctactcagtcagtaattaaattccatgcacatccagaattttgcttgtatgtacattttaataatgaggttgtcttcaaggctgttgaaaggtggtagaagacttcattgcttaaccaaaatctgccaattatcccttaactttgcagttttactaagatcaatcatccaacatattgtggtgctttaactggttacaaattaaacagaaaaagtaataagaaaagaaaaccaattttcctagactaccttaagcctgccaagcataaaaatgcacttaactcagaaaactgctgagagattaatatagaatttgtgtgctactaaagaaatcattaaagcagctaaattctgggaatacagcctctgcaaaagtaagggaaatatcttattcaaaaatagtggtacaattaaatttagttatttatcctgtaccaatgtaaaaaggattttattagtataacttcatttaaagccacatatgcaaatcttcagagtgaagaaaagatttcaactgttaggcaatttaaattttagta

SEQ ID NO: 689995 - DNA, 619 bp, Homo sapiens
catctgggaaaatcatagcattgatataaggtcaattacggcatctgagttgccaatacaacacacctgtaaccgacagcatttgaggctgccccattcatgatgattctacacacatgtgcacacatctgactatttcattaggtcttccaaagaagtcatgctttaagcatttatatattgatattgacatatgtatatttttatatatcttttgtatttcagtcagggtgttaaactattgatttttgaaaatccatgtatgttgatattgttggtaaaatgtattttaagtcactaaaaggcagtgttattaaatttttgtcaggaaagggtgtaactgttctcatacaataaagaaattctggaataggtaatatctaacatctcatacaattttaagattctatttcaccttattaaacacagccataatcagtgatctttctccacaaaagtgattgcagccaaaaatcaaaagttaattacacattacctcttacttagcattattgctcacagaacacacacttatatttctggaaattctctaatttgcacattttttataatgggaaatgtctttccaagtctgtgaggcagaaaatagcwttccaca

SEQ ID NO: 689996 - DNA, 1216 bp, Homo sapiens
ttttccaaatgccaattaaatagagatgtcaactctaatgattttgaaacatttacttgttacattattaatgggaaatctgggccaattcccatgtatttctcctaatgccaaaagatataaaatgattccatttataattcagagcctggagtcactgcaagtaaaacagttttactgttaaatattgcaaatcattagtgctatcagcatatatgcctttggagaatagactcacattctaacacagaccagcttccatttattgcaagcataagagtaagtaaaacatgccaagctagcagaacacatcttaaccctctcaggcaattattctccttgtttaagtttccctcaataagcatgaaaagtaacagacaaccaagatgttatgagcttggagtgcatgtctcataaaccaaacgtgaggagctttttcttccgactgtaattctcaagcagaagaggtttctttatatgaacaccaggaaacggagattttaaatccctaagttgcatggagcttgtgaactttcaggatgctccaatagttccttaaatactcccaaatctttctcatgtggggcaagctttttttttcctaagcctttatcatctgtcagcagccagtgatgcattagatatacggcttcatttctataacaaatgtaaaagacatacccaaaatgaattatagagaaactagcagggcaaactgtttgactgaacttcatttttgaaaatttatctttttttctccttacataatcaaaagctcaagtatctgagggagccattttaacaactctgctcttaagtaataattaaatctgctgccgcacaggagttctgcatctttataaatgtcaaccccattctgaagaatccaagctgctccccagcagtttgaacaccacgtttataaagatataagattttgaaatgtctttttctcacttatacatttataaatcatgagccaaagttaaatcccaaatcaagtgtgtaccaacaattactggcatgtattctaataagagaacccttagcaaattaatacgagtaaacactatattgaggctgcagaaagatataaatatctgaagttcagttacacttaattttataaggatataatttgacaattcttgaatatgatyggttcctatcaatgaatttttcaaacctatacacaattatctttttaaagaataga

SEQ ID NO: 689997 - DNA, 1223 bp, Homo sapiens
tttactcaaaggcaactgaaacaggaactagtcgcatccacaaaataatttcacagtaacacctagataggtgttttatggaataaccaggaaccatagcctagaaacgttgacccatcaaaggattgtcatgctgggtaaatttggggaagcctctggttccttatctagaaaggtgggagtgagaatacctaccttgcagtgttaccaaggattaattgagataacttgcttctttttccactccttctgtcccttcttgccttacttcaagctttgctatgaagacaaacctgcccatctctactgaattgtaacatcttagtgatactgaacttttcatgataaagaaagtggaattcacatttgtgctgaaaatgtccattttgctatttactaacatccaaataattccaaattcttagtctgtgtgggtacaaaggttgctcgaaatctatgtaagtaatgaatttcaccaaagttctgtaagtttactgacatagactgtcacatgcatatgcatatgtcattatcagtgattcaggttatttcagggaatatgggaaagtgtttctrattatcagaatcccacacagacagtggacctaggaagaaacccaggccggggtgaaagctgacagcagaggaaggtatggattccataattttttcaggattataaaaatgatgaagggagccaggtgtggggatcagatgtgacctgtcacttctcccctatggactgtaatttccccttctgcaaagatgaacatgttggctgaggtgaccatatagtttgctgtcttatctggtgtacttatgatggtgaaagagggcattgttaatgatcattccaggacattcgctctaatttggctctgtccaggttgtactggttcctgtggtcaccctcacattgaataagttccatgagcccatgaatctctagggaagatgaacatttactaagccccttccatatgccaggtcccttacttatcatataatttacatacccaccaaatattaaaatgatctatttgaggtttgcctttcccactggtctcggcacccctcaacatcagggccacatcatgctctgtacagtgcttggcatgggagaattttccatcaatgtgtgctgagaccccttacttctcacataactctgtgttgtaggtagtcatatttcctccccggggttggggcaagggaggcgtgca

SEQ ID NO: 689998 - DNA, 1325 bp, Homo sapiens
agatcattttggagctttaagatttgactgccccgctgtatttcagacttgcgtggggcctgtaacccctttgttttggccaatttctcccatttggaatgactgcatttacccactgtctgtacctcttgtatctaggaagtaactaacttgcttttgattttataggctcataggtggaaggcacttgccttgtcttggatgagcctttgaactgtggacttttgagttaatgctgaaatgagttgagactttaggggactgttaggaaggcatgattggttttagaatgtgaagatctaagattcgggaggcaccaggggctgaaggatatggtttggctctgtgtaagatgtgacttgctccccccttgccttctggcatgattgtgaagcctctccagccacgtggaactgtgagtccaactaaagctctgtcttttgtaaactacccggtctcagttatgtctttatcagcagcatgaaaatggactaatacatgcccaaaacaccccccatggatgccagtcttgatcacagtacaagtcaaatcctcgctgtgatctgcacccagcactgaccttctgatgtcatctgttggcctctatcttactcattttgctccagctccacagacctccctgctgcttcttcaatgcaccaagcagcctcctgcctcagggactttgtactcactaccatttctacctggcaggctatttctctagatatctccttggctgctctttgatttcttttaagtctctgctcaaatgtcaccatatccaggagtccttccctgataacactacatagaaactgatgccctactctctccctatcccttatcacctaaccttcttttatttctcctctagcacttatcaccwtccagcaagtgattatttttttcatttatatattttcttgtcttcccattataacaaacttcatgaggccagggtcttggtctggtttgttccttaatgcatctccagacccacataataatcacccaataaatggtgagtaaatgaataatggatgacaaaaaagaacctagctccatcttgctctgtgtgtgtactcattaattcggcagatatttatcaagcaactactgtgtagttgatacttgctaactaatgtctttgaggagctatgcaagaagtaagccacagaaacaatctgagtgtttcactgacaaccaaagcagaccaagatgatgcaggtgtctttggttcaaaatccttggcttggtgtcctcattccagatcccaaaccctggggctggttaaagctaaattacttacaagcggcagattg

SEQ ID NO: 689999 - DNA, 1325 bp, Homo sapiens
agatcattttggagctttaagatttgactgccccgctgtatttcagacttgcgtggggcctgtaacccctttgttttggccaatttctcccatttggaatgactgcatttacccactgtctgtacctcttgtatctaggaagtaactaacttgcttttgattttataggctcataggtggaaggcacttgccttgtcttggatgagcctttgaactgtggacttttgagttaatgctgaaatgagttgagactttaggggactgttaggaaggcatgattggttttagaatgtgaagatctaagattcgggaggcaccaggggctgaaggatatggtttggctctgtgtaagatgtgacttgctccccccttgccttctggcatgattgtgaagcctctccagccacgtggaactgtgagtccaactaaagctctgtcttttgtaaactacccggtctcagttatgtctttatcagcagcatgaaaatggactaatacatgcccaaaacaccccccatggatgccagtcttgatcacagtacaagtcaaatcctcgctgtgatctgcacccagcactgaccttctgatgtcatctgttggcctctatcttactcattttgctccagctccacagacctccctgctgcttcttcaatgcaccaagcagcctcctgcctcagggactttgtactcactaccatttctacctggcaggctatttctctagatatctccttggctgctctttgatttcttttaagtctctgctcaaatgtcaccatatccaggagtccttccctgataacactacatagaaactgatgccctactctctccctatcccttatcacctaaccttcttttatttctcctctagcacttatcaccttccagcaagtgattatttttttcatttatatattttcttgtcttcccattataacaaacttcatgaggccagggtcttggtctggtttgttycttaatgcatctccagacccacataataatcacccaataaatggtgagtaaatgaataatggatgacaaaaaagaacctagctccatcttgctctgtgtgtgtactcattaattcggcagatatttatcaagcaactactgtgtagttgatacttgctaactaatgtctttgaggagctatgcaagaagtaagccacagaaacaatctgagtgtttcactgacaaccaaagcagaccaagatgatgcaggtgtctttggttcaaaatccttggcttggtgtcctcattccagatcccaaaccctggggctggttaaagctaaattacttacaagcggcagattg

SEQ ID NO: 690000 - DNA, 649 bp, Homo sapiens
tgtcctcgactctattgcaatgtcctgcaggaaggggacatgcattatttatctttatttcctctagaacagaatctggtactgagtaagcattttaggcatgtgtctgagccaaaattattattttaaaaataatactagttagatgtcagccatttccagtttagaaatttggacctgctggtaatcaagtcttagaagatagtttcataactaagagcatagctatattttgagaacttcagaaaacactaagcaatagaatagtaggtttcccctactcttaacaytgatgaatatttttgcccataatattaagagattgtgtctagagtgtaatagataagtagcaaaccaaaatcactgaactagtagtaagttattgaagaagaaacagaagaaccaatttgaattaaagtagaaagttgataaaagtataacaatttaagtcactgtcaataatgatgaatacattaaaaatgttttccatataatgttttacatctactttgaaaaataaatgaggaatacatttccaaggtacatggcaccactgaatgcatattaaattcaaaatcaccattttgtaaagaatatggggaaaggtaaaacaggtatcaatctctcaaacagcactgggagcttatga

SEQ ID NO: 690001 - DNA, 649 bp, Homo sapiens
tgtcctcgactctattgcaatgtcctgcaggaaggggacatgcattatttatctttatttcctctagaacagaatctggtactgagtaagcattttaggcatgtgtctgagccaaaattattattttaaaaataatactagttagatgtcagccatttccagtttagaaatttggacctgctggtaatcaagtcttagaagatagtttcataactaagagcatagctatattttgagaacttcagaaaacactaagcaatagaatagtaggtttcccctactcttaacattgatgaatatttttgcccataatattaagagattgtgtctagagtgtaatagataagtagcaaaccaaaatcactgaactagtagtaagttattgaagaagaaacagaagaaccaatttgaattaaagtagaaagttgataaaagtataacaayttaagtcactgtcaataatgatgaatacattaaaaatgttttccatataatgttttacatctactttgaaaaataaatgaggaatacatttccaaggtacatggcaccactgaatgcatattaaattcaaaatcaccattttgtaaagaatatggggaaaggtaaaacaggtatcaatctctcaaacagcactgggagcttatga

SEQ ID NO: 690002 - DNA, 649 bp, Homo sapiens
tgtcctcgactctattgcaatgtcctgcaggaaggggacatgcattatttatctttatttcctctagaacagaatctggtactgagtaagcattttaggcatgtgtctgagccaaaattattattttaaaaataatactagttagatgtcagccatttccagtttagaaatttggacctgctggtaatcaagtcttagaagatagtttcataactaagagcatagctatattttgagaacttcagaaaacactaagcaatagaatagtaggtttcccctactcttaacattgatgaatatttttgcccataatattaagagattgtgtctagagtgtaatagataagtagcaaaccaaaatcactgaactagtagtaagttattgaagaagaaacagaagaaccaatttgaattaaagtagaaagttgataaaagtataacaatttaagtcactgtcaataatkatgaatacattaaaaatgttttccatataatgttttacatctactttgaaaaataaatgaggaatacatttccaaggtacatggcaccactgaatgcatattaaattcaaaatcaccattttgtaaagaatatggggaaaggtaaaacaggtatcaatctctcaaacagcactgggagcttatga

SEQ ID NO: 690003 - DNA, 602 bp, Homo sapiens
aaggcattcactaacagagaatgatcattttacacttaaaatyctgtgcagcatgagttgtcttattttttaaaggaggctgtgctgtgctttttcagaatcattttactaccactatgtagagtcccaggaagactttgggagacaagagcctatgtctttcttgatggatgtactaggaataactaagatcactccctgatcagaattcctttgaacacttgatgggagaatccttcctgcccactgactcatgggccttttgagggtggagcagtgtttgctgaatcattgatgaactggctggatcattcattgcttattggacctgattaaaccctcttttgttttctcagaatatgttgcagacattttctgaaagtgttttgttatcttattgtgacaaaatatttatttgccagtatatttagtggatgaggagagagaataatgagtgtgttggtattatgtatgcaccatgaatttcagttgctgacagacatcgtctatgacaatattgtgccacaggtttctttattctttgcagtcgaggttcagaaacatgaattaaacttgattgcacaatatctcctcatagaaat

SEQ ID NO: 690004 - DNA, 602 bp, Homo sapiens
aaggcattcactaacagagaatgatcattttacacttaaaattctgtgcagcatgagttgtcttattttttaaaggaggctgtgctgtgctttttcagaatcattttactaccactatgtagagtcccaggaagactttgggagacaagagcctatgtctttcttgatggatgtactaggaataactaagatcactccctgatcagaattcctttgaacacttgatgggagaatccttcctgcccactgactcatgggccttttgagggtggagcagtgtttgctgaatcattgatgaactggctggatcattcattgcttattggacctgattaaaccctcttttgttttctcagaatatgttgcagacattttctgaaagtgttttgttatcttattgtgacaaaatatttatttgccagtatatttagtggatgaggagagagaataatgagtgtgttggtattatgtatgcrccatgaatttcagttgctgacagacatcgtctatgacaatattgtgccacaggtttctttattctttgcagtcgaggttcagaaacatgaattaaacttgattgcacaatatctcctcatagaaat

SEQ ID NO: 690005 - DNA, 640 bp, Homo sapiens
ttagatacagttgctaattttgatagagactgcgattgctagacacatcagaagtaaaatcaaagttgtgttttttgttgctttttaaaatatttcttctaaagaaaatatcaaacaaatacagaattggaaatattagaataattaattcaaaagtcttctatcagtttacatmatcatcaactcacagtcaattttgtataatctttacccttacccattttcctttgggttaattttgaagcgaaccccagacaattttatttataaatatttgaacatatatctctaaaagataaagattctttaaaaaaaaaaaagacagtatcaacatctcacctaaaacaatataattccttaatattaaatatgtggtcagggctgggcgtggtggcgcatgcctgtagttctggctactcaggaggtgggaggattgcctgagcccaggagttcaaggttgcagtaagccatgatcatgccactgcactccagtctaggcaacagagcaaaactctgtctctaataacaataaatagtgtttaaattttcttgattataattttttaatacaatttattgtaatcaggagtgaaatactgtccatggattgcacttggtggttgtttcttgagactttctt

SEQ ID NO: 690006 - DNA, 650 bp, Homo sapiens
cattatgtctcactaggaatataaagtcaagttattgtgttttaaagtcattcgaactggttaatttgtgtggttttaccaccaaccatgtatgtagattgatttatctaattttattttgatttatgggaattgcttttcaaaaatctcatttctaaaaatcgtaatttccaatgttaaatctacaaaaattatatacaaagaaacctagcttctatcccttttcctaaactctgcttccttccttcccctgtagcagtgttgtttagtaagctaactaccagcacatgtggcttcttaaattaaaattaattaaaattaaataaaattaaaaattagttcttcagttacaccagcaacatctcaagtgcttgatagccacatgtggccagccaccatcttgaacagcacagactatagaacatttccatcctggctgaaagttctgttggacagccctaccctagcgaacccattttatttttcttaattatttgatttctccttctacttaaatatataaaaattatgtatgttacccttcttccttgataaatggtagcatactgcaggcttttttccatctttcttttytctgtatatcctagagattatgccagactatgagcaatacacagagatagtcttca

SEQ ID NO: 690007 - DNA, 647 bp, Homo sapiens
atatacttaaatgcaatagataattgttctgctgttgcaaaaaagactcaaagaagcaaggttcagaatagtgtgactactatactatcatttgtggaaaggaaatatgtacttatgtgtacttaaatatacacagaaggttttttgtttgtccttttttttttttttttttttttgagacaggtcttgctctgttgtccaggcttgagtgcaatggcacagctaactgcaagctctgcctcctgggctgaagtgatcctctcacctcagcctcctaagtagctgaaaccacaggcatgcaccaccgcaccyggctaatttttgtattttttgtagagatggggttttgccatgttgcccaggctgttctcaaactcctgggcccaagccacccacctgcctaggcctcccacagtgctgggattacaggcatgagccactgcacccggctgatgtttttgaagtgatccataaaactgttcatagtgactgtggggtgctgagagttttttaagttttgtggttatgtttggatacaggcaggaaatgtgaaataatcatatcatggagaatggggtatccatcccctcaaacatttatcctttgaattacaaacaatccagttgtactgttttagttattttaaa

SEQ ID NO: 690008 - DNA, 623 bp, Homo sapiens
taaggaataaaagtcctgagaagcagcttccctgctccttgctccttctggaatctccacctggttcagcccacctgcctccaccatgtccatcaggttgacccagaagtcctacaaggcgtccacctctatccccgggaccttcagtaggtgctcttatgccagggggcctggggctcacattggctccttgagcttctcccgagtaggcagcagcagattccagggtaccctaggmagaggccatggtggggccagcagtataaccagggccatggtcaaccagagcctgctgaacccccttaacctggaggtggacccaaacatccaggccgtgtgcacccaggagaagaagcagattaagactctcagcaagtttgcctccttcatcgacaaggtacagttcctgaaggagcggaacaagatgctgaagaccaagtggagcctcctgcagcagcaggagatggcttggagcaacatggacaacatgttggagagctacatcaataaccttcgatggcagctggagactctgggctaggagaagctgaagctggaggtggagcttggcaacatgcaggggctggtggagaacttcaagaataagtacgaggatgagatca

SEQ ID NO: 690009 - DNA, 650 bp, Homo sapiens
aagtgctattattatcccccagtgaacagaygaggaaatggaagctcagagaactgaagaaggctgcccaaggctgtgcagctatcaaatcatggagatgtgagccctggcagcatgacccctgaacctgagctcttcactgtcactctaagctgcctccccagtgaaaaaggggaaaataaaacaatgctgccacatttcaaaagaagctaaacattgccatgggtaagaaacaggaaaactaatatgaagaaagactgccaacaaaagcagtcagcagggaacaaactccctccagatggaaagaaagtagtagagcaagatgaaaatggttgtaaactaagctggtttagaatcctcaaaagataaaagaagagaggccaggcgcctgtaatcccaggaatttgggaggccaaggtggacggatcacctgacaggagtttgagaccagcctggccaacatggtgaaacttcatctctactaaaaatacaaaaattagccaggcatggtggcatgcgcctgtaatcccagctacttggtaggctgaggtaggagaatcgtttgaatccagaaggtggagtttgcagtgagtggagattgtgccactgcactccagcctgggcaacagagtgagactctgtctcaaaaa

SEQ ID NO: 690010 - DNA, 650 bp, Homo sapiens
aagtgctattattatcccccagtgaacagatgaggaaatggaagctcagagaactgaagaaggctgcccaaggctgtgcagctatcaaatcatggagatgtgagccctggcagcatgacccctgaacctgagctcttcactgtcactctaagctgcctccccagtgaaaaaggggaaaataaaacaatgctgccacatttcaaaagaagctaaacattgccatgggtaagaaacaggaaaactaatatgaagaaagactgccaacaaaagcagtcagcagggaacaaactccctccagatggaaagaaagtagtagagcaagatgaaaatggttgtaaactaagctggtttagaatcctcaaaagataaaagaagagaggccaggcgcctgtaatcccaggaatttgggaggccaaggtggacggatcacctgacaggagtttgagaccagcctggccaacatggtgaaacttcatctctactaaaaatacaaaaattagccaggcatggtggcatgcgcctgtaatcccagctacttggtaggctgaggtaggagaatcgtttgaayccagaaggtggagtttgcagtgagtggagattgtgccactgcactccagcctgggcaacagagtgagactctgtctcaaaaa

SEQ ID NO: 690011 - DNA, 638 bp, Homo sapiens
gcattgaaatgaatgtactttataatagaattgtaaataaaattgtctctttaacaaaatggggattggggtactgatcctcaacacttgaaaatctacatagaacttttgactccccacaaacttaactactaatagaccatgttgcccaaaagccttaccaattaatcaattaacaaatattttgcaatttatatgtattatatagtatatttttaccataaagaaagctagagaaaagaaaatgttatgaagaaaatcataagaggaaatatattktagtactgtattgtatttattgataccacaagtttagtcatttgtttacaagatgaatctctgaaatggcaggtaactgcagctgcaaatctcagtctatggtacatatcaagcaattcagcttttttttgcaacgccatgacttctctgcttctcggaagcacttccagcatcactagtggcacttcgtatgtgttccatgttgttaggcaaggttgaaagtattgcactaaacaaaatgaaaaatacatgagaaacacaagagatccctttttactgcaatttattagaggaatgaactcctcatgcagaaatgattagtgtcacgaagtattttaaatggatacttgcaacacttg

SEQ ID NO: 690012 - DNA, 594 bp, Homo sapiens
caaatacaaaattattgattttccctacttaaaaatctatatttatactcatgcaactattaaataattgacaatatggcaagtactcagaggcataagaaagaaagaaactaaaagaagagaaaggacagaaaagaatatctcctatatatatatatttggtaacttattaaaaatgagtagtgaaaatgatactgatagaaaatatttatcaagtgcttattgtattatagtcattgtgttgtgctttaaatatagtctcatttaatccctacaacacctcaatgaaataagtgcttttattttctccatttacatatgaagaaaaaaatttgcaattacaaagagataagsatttcaaaagaaactaatagaacttataaataaactgtgtattgctttcaaaattgtaacttcagaaggaatgtactgaattttatatttcttttaataatatcagtcttgtgaacatttttggattgcattcagggtcattttttcagttcaatatttgctctgtgcacctgaatacatatctaaccaaactattaggcatgtgactcatcgatagagaatttcattctttggttacta

SEQ ID NO: 690013 - DNA, 594 bp, Homo sapiens
caaatacaaaattattgattttccctacttaaaaatctatatttatactcatgcaactattaaataattgacaatatggcaagtactcagaggcataagaaagaaagaaactaaaagaagagaaaggacagaaaagaatatctcctatatatatatatttggtaacttattaaaaatgagtagtgaaaatgatactgatagaaaatatttatcaagtgcttattgtattatagtcattgtgttgtgctttaaatatagtctcatttaatccctacaacacctcaatgaaataagtgcttttattttctccatttacatatgaagaaaaaaatttgcaattacaaagagataagcatttcaaaagaaactaatagaacttataaataaactgtgtattgctttcaaaattgtaacttcagaaggaatgtactgaattttatatttcttttaataatatcagtcttgtgaacatttttggattgcattcagggtcattttttcagttcartatttgctctgtgcacctgaatacatatctaaccaaactattaggcatgtgactcatcgatagagaatttcattctttggttacta

SEQ ID NO: 690014 - DNA, 644 bp, Homo sapiens
aatcccagctatttgggaggctgaggcaggagaatcacttgaacccgggtggtggaggttgcagtgagctgagattgtgccattgcactccagcctgggcaacaagagcaaaactccatctcaaaaaaaaaaaaaaaagaaaaagaaaaacaaattccaggccacagtatcaaagagacctagctgaaggaacttgtttatgcccagtttagaaagcaatcytgaacagaaatcactagaaacctcctatctttatgtatgttcctctttgtaaagtagggaccactgaaccttttattatacctgtaacagaaattaaaatccaaatgtctcttgttaaagaaaaaaattactcaatgtcacttgttaaattatggttgggaagactttattcaggatcatcacaaaggtacagggaccactgcaatgagctcttgcggcacagaaaagagactggactcaactctgaatccagcatggacaagtgggaatttatggccaaggagcagtgtggctgtcagtagacagaaaattactcggaggaaacatcaggggtaaagtggattctggctaaaccagcctaacagaattgtagctgaagacaggccagggtgatcagatgttgcctgggggatggtggagga

SEQ ID NO: 690015 - DNA, 651 bp, Homo sapiens
taacttattttatttatttatttttcctgattagcagtatgaggtttaaggaaatcttttctcacyttggccaaaaatcattgaatcccaatactggtattagtctaaaaattgtatacttgtgaatttaatcttatttgaaagtattaccattagatttgaaagtattattaaaatgccaaggcaatgacatattttatataataaaatatttgataagctatgtggtaataatttcactaaagtggatgtgatatcttttcctcatgttgttgttgtcctttccaggaaaaaaataatagactccatagattttataaaattgcttatataatttaggaaaaagaagattctctctacaaaatcaatatattcagaccaagaattcactcttaaattcatacacactatcaatctttaaatcttgttcatgtcacctccaaattatagctctgggggaatcgctacctttcagttttaaccattttagaaaagtcacaatcattcttgtttaggtgaatacattgggctagcttctccgctttcttctccaccctctccactgagcagatagagaaatcttatttaaaaatgaaattatgcgatttttcagcttaaattaacggtttttcattacacttagaaagaaat

SEQ ID NO: 690016 - DNA, 619 bp, Homo sapiens
tagctagaactcaaaatcaaatgcwtatattctatttttaaaaactgttttccagggccaggtgcagtggctcacgcctgtaatcccagcactctgggaggccaaggcaggcggatcttgaggtcaggagatcgagaccatcctggctaacacggtgaaagcctgtctctactaaaaatacaaaaaaattagccgggcatggtggcgggcacctgtagtgagctactcaggagtagtcagctactcgggaggctgaggcaggagaatgccttgagcccaggaggcagagcttgcagtgagccgagatcgcgccactgcattccagcctgggcgacagagcgagactccgtctcaaaaaaaattgttttccatggggatactggttaataattctgaaaccattatacatatatactagaattaaacaattaaataaatgattggcagatagtagaagccaggtttgttacttttggagtaagaggtaacagatgagcaaagggtagcagcttggacaatcatggattaattgattaaagtggagacatcactatgaatttaatgtttagcttaatacagacacaaatggttatgcataggaatatttctagatatgtat

SEQ ID NO: 690017 - DNA, 659 bp, Homo sapiens
caattaaaatttcataaatcattttaacaaatatgtattatttctaatgtgataggcaacatgattgtaactacaattagaatgagcatggtacagcttctgtcttcaaggaggttattggttaaaggatactccttagtttcctttaagttcgcctaattctcaattgcctcattcatataattgccattttgccatattgaccacttattgtcatatttaacaatgataaattttcatttacttttttgataacttataggcctaggaacatagattacacataagagtcttttaattgttgcaatgttgtaatgagattcttaaacttaattattacataatatgtttaaaggaatcaatattaaatcagggataaatgtaatttaattataattgcatgaaataaatgtttatattatttgtttttattattaggaagatgtgtgagggatatttataatatgtgttcatgcaattttaagttatttttattaagaaagcaataactctstgttaaatatatcaatgttcaattatattttaaaaacaggctgggcgcggtgttgcatttctgcaatcccagcacttttgggggctgaggcagggagatcacctgagttaaagagtttgagactagcctggcaaacatggtgaaa

SEQ ID NO: 690018 - DNA, 678 bp, Homo sapiens
aatgtttaataaatggttattactagatgtactgcatccttttcttctgcatggtattattagataccttctgtcttataaacttcatattttagccattcttccttcttacactaacaccctagctttttgcttttctcaataatcgaacctcttgaaatggtactctatattattttcagctctgaatattccttataaacaattcaaggtcatttctgcatatataaatttccttaaaattcacctatggcttgctaaatttgaagtcaaattttacaaaatktttgaagtatgtgatgacttttttttaaacctaacacatatagaaacactataatctctcatataacctttaacccaaataaaggcataaagagaagggaagtcaggaggctgactatttctcagaggctggagatgatggtttagttctccagcctatgttctgcccaactagaaatatgcttatataaaaatgaaactttctctccttccccaaaacacataaacaacaacaacaacaacaacaacaacacaacaacaacaaagaatgctgcagggagcaaagaaaatctgctgggttgatgattagatctgtgctgttctccatgtttccataggacaggagctgtgagttataaatacagtaattgttttcagtattacaaaccatgg

SEQ ID NO: 690019 - DNA, 2094 bp, Homo sapiens
gattatttatctattatatttgttagaaacaagtaacaagttcagcccacatagaaggctaggaaactgcactagaatttgaataccaggaggyagggatcattgggaactaatttagaagctgactatggcaactggacaattaaaaataataataatctttaaaaagcaccaaaaaatggcactgacatcattgcaaattaattagaaatatgatctaaaataagtcaaaattatgaaacaaaatgcagtttccagtctggtaagtgcaacaaactgtttgctaggatttttagattgttattgaaagattacttaaaatttatttctctatctagtgacaattttgccatttttaaatctttttattgtgaaatgtttttatatttttctacatagagtcttctaataaagacaattaatttatactatccataagacaacatcgtgctttgtaaacacaagtggcattttgtgaagattatagatagtcagattttctttaccatctttagattttaatcttgcatgagagttttcggagaggagtgaaaagtttgtattagtatggaaaaacagtttagctgggggttaatttacagaaatttcgtccgaatatacttaaaattttacaatataatctgacatgcttagaccaaagggcaattttgaaatttcttctaactaaaaataatttagaatgagtgtgtttttgtgcattttagccctatgtagccactttccatgttgattttctaaatattagataatatgtagcatattatgtatgacctaatgatgtgctaaagtagcatttctaacaaagaaaattatataaaaagaattcactaaaactgggcagcaatagcttacaaggttataaatcactaagcaaattctcacaacatagccattccacttaaatgaataaatttcaatgcataaaactaagaaagtagatcaagacgataatacaattttcagttgtatatttttgttttaggttttaagtttactaactttagaagcaaactgaaagaagtcaaaattaaattttcaaaatgaaactctgaaatgtctcttttgcccgactcttaatatttatgaagaagaacatggtccagaagatttaaatgcctgtaatcattttatgtttaaaataaggatctattaattaagatctataacaagagtctatccagtcaggatatagactcaaacatatatagaacagaacacttggagctcaaaggcaataaacggataattggtataacatattcatgattattatgttacaggagaaaaccaaactatagaatcacagatatgtatttttcaacaaatgtcaatatgctaggtagtattctgtgtattagaagtatagcattataggcatatttatttcatgaagattaacttttagtatattgttatggtaaaaataatatacatgcagataaatatgtgtaataaacactttaatcagagtgctatcaaagtcattacacttaatgagaactattctgtgagataaagttataaaacagcattactcttcttacaatgctgtgtttcaacagtactattctgaatttctcttttctgccccaaacaataatataggcagatggcatagatttccaattccgtttcaggtattggattcattctcaattattaaaatgtctgtcccattctaaattaaaatgctcacctctcatttatttaagagcatctctccctcacgtcaaaatcaggcttaaaaaattactgtaaataaagagtatgtggtcgatctaaccattttctaccttattatttcataatttctcttaaccattctggtacctctgactcctttcagattgaagatagaggggaagaaaatgagtaagagacaggtagacaggatcttgtttcagagcactattataatctggaataggtactttctctatgacagatgtgattgcttatcagagtgatcaaatctcaaaaaactctgttaggaggtagcatcgaaaaacagccctaaaactcagagtaattaccaatatctttatgtactactcattaaaaagtcattttcaa

SEQ ID NO: 690020 - DNA, 2769 bp, Homo sapiens
taatcagttaagaaaataaaattttgagtaccaagtgtgagtccaaactgataacttgagtccaaactcatagctctgacactgatttaatggcaaacctcctctccaccatctcattcctggtattgagagaagccttcattggcatgacacctaaagctggattttcctctttttctccttattgtgctatttctcttctctgtccctctgtaatcttattactcagtccagagaatgtrgagagggaatgaagagaataggtaaggagaaataatgtatcattgggaactagcttctctctccctgggattgatggttgcttaaagctgactctgttatggattcttttgggggcacgttcaaaagttcccggctagtcccctctcttgtacagtttctttgacctgggcaaatctgatttttcacagctcttaggaattctgcatcaccctactttctctatactggtatttctccacccttctagtcagcgttgatggacaatacacactgcttctttctcacttgtgtggctgacacctggtttatagggaatactgataattcctgatgaatgtcaaaagtaccctaatgcagccacctctcaggctgtctatactctttgacttactctgcagagaattagaaggaaatcacttcaactaccttcctaagtttgaaatgaaggaggcagcctatcctatctcttgatggttttcacagattgcaagagctctcatcaaagagttatcaatacacttttatttccctacaatcttcctattttctgcctgttttggacttaggggtctattagttataaaaataattatcaaataacttatttgaaaatttctaagagattatttttcccctcacattcaaatttaacatttatcatactattattctttatattgttttggaaatgttacatttataataaatatataactataatcacttacacataattaaaacacctgaaaatagagagtaagcaacagattgaagatgtggtgtttggagtttcttctcgcatatacactgaaaattgctaaaaatacttaggaatattttgctgggttactaggttttagaaatagaagtacagggtgacaggtaaatatctgactcaaaaatagttttttagatgtgttaattgaattaatacagtcccatcacaatgaatattttacctatgccaggtaatcaaaattaaaattacatttaataattttgaagtttcacaagcagagtattttggaactatttgggtcccattaaggactgggtattaatttttaaaaaagacaaaatgaggaaaaaataaaattaagttgaattaaaaggagaaaaattaaatacaattatgagaatagttgcagattattaatcataaaacatggaaatttccaaattttaaagaatacttttgcttttgaataaaatccctcaaaaatgtaaagatttttactgcacttccttaataatatggtgatatttaagacttttaaatctagtgccatataggtatatattggcctgaggaattctgaagtacaaaaccctcacaattaatctaagtaattgttttatattagataaatatttgaagagttacacagaatttcccaagttacttttatgtgtaaaagttgtggcatgacagtgcataaaaaccttcaaattattgctttaaaattctatgtaatttttggagtacatttttagaagcactatatgcagaatgtggatacatgtgccacagtgaattcataataagattgttctttggaaatttttcatattttttttgttgctgttgcacttgggagaatggacaaatacctccccagtatgcagctacattgtactactcaacctgtttgtttcatctactgaaattaaaatcagtttctgatagctcttatattccaactaaagcatgttatcgacttgacttagtaatctttactatgcatctacctggcttatgtctaaaatacacatcttttacattaatgagttgtacaaattcttactgaacactttttatgttcttgctctggggaaaaaaggtcaatgtaacaactcttcttaatagagtctttgtctaataatataagaaattgtctaatacgtcactaattataataaagtgggataaacattacaagaggggtaggccccagcccttggggcacacaagaggagcatggaatcccttctattgctatatatgaatcacatatatgagaatgtgtttatggtaatatgttcttactcttatgatgacaatttcccttcagatacagacaatttcccctcaaatactcttctgatgacaatttcccctcagatatatcacctataaagtgagatggaacagttacattttgttccacagataaagatgtcgatttgtgagtttacttggcaattagtgttcttaaataaacttagaaaaattcgttgatctataagatactttcagtacagtgaaaataacgttacggttcaatagtaccaattaataaaaataaaattaaattaaaatgttgatttaaatataagcaaatatatttattttgaatgctagtaacacacacacacacacacacacacacacacacatatatatatatagcttagagagagaaggaaggtgagaggcatgtaattaaaaaaccaccacttaaaaatgcagtataaaatcgtgcttatgtgttgattctctgaatatgtattctatggcttcaagtt

SEQ ID NO: 690021 - DNA, 2769 bp, Homo sapiens
taatcagttaagaaaataaaattttgagtaccaagtgtgagtccaaactgataacttgagtccaaactcatagctctgacactgatttaatggcaaacctcctctccaccatctcattcctggtattgagagaagccttcattggcatgacacctaaagctggattttcctctttttctccttattgtgctatttctcttctctgtccctctgtaatcttattactcagtccagagaatgtggagagggaatgaagagaataggtaaggagaaataatgtatcattgggaactagcttctctctccctgggattgatggttgcttaaagctgactctgttatggattcttttgggggcacgttcaaaagttccyggctagtcccctctcttgtacagtttctttgacctgggcaaatctgatttttcacagctcttaggaattctgcatcaccctactttctctatactggtatttctccacccttctagtcagcgttgatggacaatacacactgcttctttctcacttgtgtggctgacacctggtttatagggaatactgataattcctgatgaatgtcaaaagtaccctaatgcagccacctctcaggctgtctatactctttgacttactctgcagagaattagaaggaaatcacttcaactaccttcctaagtttgaaatgaaggaggcagcctatcctatctcttgatggttttcacagattgcaagagctctcatcaaagagttatcaatacacttttatttccctacaatcttcctattttctgcctgttttggacttaggggtctattagttataaaaataattatcaaataacttatttgaaaatttctaagagattatttttcccctcacattcaaatttaacatttatcatactattattctttatattgttttggaaatgttacatttataataaatatataactataatcacttacacataattaaaacacctgaaaatagagagtaagcaacagattgaagatgtggtgtttggagtttcttctcgcatatacactgaaaattgctaaaaatacttaggaatattttgctgggttactaggttttagaaatagaagtacagggtgacaggtaaatatctgactcaaaaatagttttttagatgtgttaattgaattaatacagtcccatcacaatgaatattttacctatgccaggtaatcaaaattaaaattacatttaataattttgaagtttcacaagcagagtattttggaactatttgggtcccattaaggactgggtattaatttttaaaaaagacaaaatgaggaaaaaataaaattaagttgaattaaaaggagaaaaattaaatacaattatgagaatagttgcagattattaatcataaaacatggaaatttccaaattttaaagaatacttttgcttttgaataaaatccctcaaaaatgtaaagatttttactgcacttccttaataatatggtgatatttaagacttttaaatctagtgccatataggtatatattggcctgaggaattctgaagtacaaaaccctcacaattaatctaagtaattgttttatattagataaatatttgaagagttacacagaatttcccaagttacttttatgtgtaaaagttgtggcatgacagtgcataaaaaccttcaaattattgctttaaaattctatgtaatttttggagtacatttttagaagcactatatgcagaatgtggatacatgtgccacagtgaattcataataagattgttctttggaaatttttcatattttttttgttgctgttgcacttgggagaatggacaaatacctccccagtatgcagctacattgtactactcaacctgtttgtttcatctactgaaattaaaatcagtttctgatagctcttatattccaactaaagcatgttatcgacttgacttagtaatctttactatgcatctacctggcttatgtctaaaatacacatcttttacattaatgagttgtacaaattcttactgaacactttttatgttcttgctctggggaaaaaaggtcaatgtaacaactcttcttaatagagtctttgtctaataatataagaaattgtctaatacgtcactaattataataaagtgggataaacattacaagaggggtaggccccagcccttggggcacacaagaggagcatggaatcccttctattgctatatatgaatcacatatatgagaatgtgtttatggtaatatgttcttactcttatgatgacaatttcccttcagatacagacaatttcccctcaaatactcttctgatgacaatttcccctcagatatatcacctataaagtgagatggaacagttacattttgttccacagataaagatgtcgatttgtgagtttacttggcaattagtgttcttaaataaacttagaaaaattcgttgatctataagatactttcagtacagtgaaaataacgttacggttcaatagtaccaattaataaaaataaaattaaattaaaatgttgatttaaatataagcaaatatatttattttgaatgctagtaacacacacacacacacacacacacacacacacatatatatatatagcttagagagagaaggaaggtgagaggcatgtaattaaaaaaccaccacttaaaaatgcagtataaaatcgtgcttatgtgttgattctctgaatatgtattctatggcttcaagtt

SEQ ID NO: 690022 - DNA, 2769 bp, Homo sapiens
taatcagttaagaaaataaaattttgagtaccaagtgtgagtccaaactgataacttgagtccaaactcatagctctgacactgatttaatggcaaacctcctctccaccatctcattcctggtattgagagaagccttcattggcatgacacctaaagctggattttcctctttttctccttattgtgctatttctcttctctgtccctctgtaatcttattactcagtccagagaatgtggagagggaatgaagagaataggtaaggagaaataatgtatcattgggaactagcttctctctccctgggattgatggttgcttaaagctgactctgttatggattcttttgggggcacgttcaaaagttcccggctagtcccctctcttgtacagtttctttgacctgggcaaatctgatttttcacagctcttaggaattctgcatcaccctactttctctatactggtatttctccacccttctagtcagcgttgatggacaatacacactgcttctttctcacttgtgtggctgacacctggtttatagggaatactgataattcctgatgaatgtcaaaagtaccctaatgcagccacctctcaggctgtctatactctttgacttactctgcagagaattagaaggaaatcacttcaactaccttyctaagtttgaaatgaaggaggcagcctatcctatctcttgatggttttcacagattgcaagagctctcatcaaagagttatcaatacacttttatttccctacaatcttcctattttctgcctgttttggacttaggggtctattagttataaaaataattatcaaataacttatttgaaaatttctaagagattatttttcccctcacattcaaatttaacatttatcatactattattctttatattgttttggaaatgttacatttataataaatatataactataatcacttacacataattaaaacacctgaaaatagagagtaagcaacagattgaagatgtggtgtttggagtttcttctcgcatatacactgaaaattgctaaaaatacttaggaatattttgctgggttactaggttttagaaatagaagtacagggtgacaggtaaatatctgactcaaaaatagttttttagatgtgttaattgaattaatacagtcccatcacaatgaatattttacctatgccaggtaatcaaaattaaaattacatttaataattttgaagtttcacaagcagagtattttggaactatttgggtcccattaaggactgggtattaatttttaaaaaagacaaaatgaggaaaaaataaaattaagttgaattaaaaggagaaaaattaaatacaattatgagaatagttgcagattattaatcataaaacatggaaatttccaaattttaaagaatacttttgcttttgaataaaatccctcaaaaatgtaaagatttttactgcacttccttaataatatggtgatatttaagacttttaaatctagtgccatataggtatatattggcctgaggaattctgaagtacaaaaccctcacaattaatctaagtaattgttttatattagataaatatttgaagagttacacagaatttcccaagttacttttatgtgtaaaagttgtggcatgacagtgcataaaaaccttcaaattattgctttaaaattctatgtaatttttggagtacatttttagaagcactatatgcagaatgtggatacatgtgccacagtgaattcataataagattgttctttggaaatttttcatattttttttgttgctgttgcacttgggagaatggacaaatacctccccagtatgcagctacattgtactactcaacctgtttgtttcatctactgaaattaaaatcagtttctgatagctcttatattccaactaaagcatgttatcgacttgacttagtaatctttactatgcatctacctggcttatgtctaaaatacacatcttttacattaatgagttgtacaaattcttactgaacactttttatgttcttgctctggggaaaaaaggtcaatgtaacaactcttcttaatagagtctttgtctaataatataagaaattgtctaatacgtcactaattataataaagtgggataaacattacaagaggggtaggccccagcccttggggcacacaagaggagcatggaatcccttctattgctatatatgaatcacatatatgagaatgtgtttatggtaatatgttcttactcttatgatgacaatttcccttcagatacagacaatttcccctcaaatactcttctgatgacaatttcccctcagatatatcacctataaagtgagatggaacagttacattttgttccacagataaagatgtcgatttgtgagtttacttggcaattagtgttcttaaataaacttagaaaaattcgttgatctataagatactttcagtacagtgaaaataacgttacggttcaatagtaccaattaataaaaataaaattaaattaaaatgttgatttaaatataagcaaatatatttattttgaatgctagtaacacacacacacacacacacacacacacacacatatatatatatagcttagagagagaaggaaggtgagaggcatgtaattaaaaaaccaccacttaaaaatgcagtataaaatcgtgcttatgtgttgattctctgaatatgtattctatggcttcaagtt

SEQ ID NO: 690023 - DNA, 2769 bp, Homo sapiens
taatcagttaagaaaataaaattttgagtaccaagtgtgagtccaaactgataacttgagtccaaactcatagctctgacactgatttaatggcaaacctcctctccaccatctcattcctggtattgagagaagccttcattggcatgacacctaaagctggattttcctctttttctccttattgtgctatttctcttctctgtccctctgtaatcttattactcagtccagagaatgtggagagggaatgaagagaataggtaaggagaaataatgtatcattgggaactagcttctctctccctgggattgatggttgcttaaagctgactctgttatggattcttttgggggcacgttcaaaagttcccggctagtcccctctcttgtacagtttctttgacctgggcaaatctgatttttcacagctcttaggaattctgcatcaccctactttctctatactggtatttctccacccttctagtcagcgttgatggacaatacacactgcttctttctcacttgtgtggctgacacctggtttatagggaatactgataattcctgatgaatgtcaaaagtaccctaatgcagccacctctcaggctgtctatactctttgacttactctgcagagaattagaaggaaatcacttcaactaccttcctaagtttgaaatgaaggaggcagcctatcctatctcttgatggttttcacagattgcaagagctctcatcaaagagttatcaatacacttttatttccctacaatcttcctattttctgcctgttttggacttaggggkctattagttataaaaataattatcaaataacttatttgaaaatttctaagagattatttttcccctcacattcaaatttaacatttatcatactattattctttatattgttttggaaatgttacatttataataaatatataactataatcacttacacataattaaaacacctgaaaatagagagtaagcaacagattgaagatgtggtgtttggagtttcttctcgcatatacactgaaaattgctaaaaatacttaggaatattttgctgggttactaggttttagaaatagaagtacagggtgacaggtaaatatctgactcaaaaatagttttttagatgtgttaattgaattaatacagtcccatcacaatgaatattttacctatgccaggtaatcaaaattaaaattacatttaataattttgaagtttcacaagcagagtattttggaactatttgggtcccattaaggactgggtattaatttttaaaaaagacaaaatgaggaaaaaataaaattaagttgaattaaaaggagaaaaattaaatacaattatgagaatagttgcagattattaatcataaaacatggaaatttccaaattttaaagaatacttttgcttttgaataaaatccctcaaaaatgtaaagatttttactgcacttccttaataatatggtgatatttaagacttttaaatctagtgccatataggtatatattggcctgaggaattctgaagtacaaaaccctcacaattaatctaagtaattgttttatattagataaatatttgaagagttacacagaatttcccaagttacttttatgtgtaaaagttgtggcatgacagtgcataaaaaccttcaaattattgctttaaaattctatgtaatttttggagtacatttttagaagcactatatgcagaatgtggatacatgtgccacagtgaattcataataagattgttctttggaaatttttcatattttttttgttgctgttgcacttgggagaatggacaaatacctccccagtatgcagctacattgtactactcaacctgtttgtttcatctactgaaattaaaatcagtttctgatagctcttatattccaactaaagcatgttatcgacttgacttagtaatctttactatgcatctacctggcttatgtctaaaatacacatcttttacattaatgagttgtacaaattcttactgaacactttttatgttcttgctctggggaaaaaaggtcaatgtaacaactcttcttaatagagtctttgtctaataatataagaaattgtctaatacgtcactaattataataaagtgggataaacattacaagaggggtaggccccagcccttggggcacacaagaggagcatggaatcccttctattgctatatatgaatcacatatatgagaatgtgtttatggtaatatgttcttactcttatgatgacaatttcccttcagatacagacaatttcccctcaaatactcttctgatgacaatttcccctcagatatatcacctataaagtgagatggaacagttacattttgttccacagataaagatgtcgatttgtgagtttacttggcaattagtgttcttaaataaacttagaaaaattcgttgatctataagatactttcagtacagtgaaaataacgttacggttcaatagtaccaattaataaaaataaaattaaattaaaatgttgatttaaatataagcaaatatatttattttgaatgctagtaacacacacacacacacacacacacacacacacatatatatatatagcttagagagagaaggaaggtgagaggcatgtaattaaaaaaccaccacttaaaaatgcagtataaaatcgtgcttatgtgttgattctctgaatatgtattctatggcttcaagtt

SEQ ID NO: 690024 - DNA, 2769 bp, Homo sapiens
taatcagttaagaaaataaaattttgagtaccaagtgtgagtccaaactgataacttgagtccaaactcatagctctgacactgatttaatggcaaacctcctctccaccatctcattcctggtattgagagaagccttcattggcatgacacctaaagctggattttcctctttttctccttattgtgctatttctcttctctgtccctctgtaatcttattactcagtccagagaatgtggagagggaatgaagagaataggtaaggagaaataatgtatcattgggaactagcttctctctccctgggattgatggttgcttaaagctgactctgttatggattcttttgggggcacgttcaaaagttcccggctagtcccctctcttgtacagtttctttgacctgggcaaatctgatttttcacagctcttaggaattctgcatcaccctactttctctatactggtatttctccacccttctagtcagcgttgatggacaatacacactgcttctttctcacttgtgtggctgacacctggtttatagggaatactgataattcctgatgaatgtcaaaagtaccctaatgcagccacctctcaggctgtctatactctttgacttactctgcagagaattagaaggaaatcacttcaactaccttcctaagtttgaaatgaaggaggcagcctatcctatctcttgatggttttcacagattgcaagagctctcatcaaagagttatcaatacacttttatttccctacaatcttcctattttctgcctgttttggacttaggggtctattagttataaaaataattatcaaataacttatttgaaaatttctaagagattatttttcccctcacattcaaatttaacatttatcatactattattctttatattgttttggaaatgttacatttataataaatatataactataatcacttacacataattaaaacacctgaaaatagagagtaagcaacagattgaagatgtggtgtttggagtttcttctcgcatatacactgaaaattgctaaaaatacttaggaatattttgctgggttactaggttttagaaatagaagtacagggtgacaggtaaatatctgactcaaaaatagttttttagatgtgttaattgaattaatacagtcccatcacaatgaatattttacctatgccaggtaatcaaaattaaaattacatttaataattttgaagtttcacaagcagagtattttggaactatttgggtcccattaaggactgggtattaatttttaaaaaagacaaaatgaggaaaaaataaaattaagttgaattaaaaggagaaaaattaaatacaattatgagaatagttgcagattattaatcataaaacatggaaatttccaaattttaaagaatacttttgcttttgaataaaatccctcaaaaatgtaaagatttttactgcacttccttaataatatggtgatatttaagacttttaaatctagtgccatataggtatatattggcctgaggaattctgaagtacaaaaccctcacaattaatctaagtaattgttttatattagataaatatttgaagagttacacagaatttcccaagttacttttatgtgtaaaagttgtggcatgacagtgcataaaaaccttcaaattattgctttaaaattctatgtaatttttggagtacatttttagaagcactatatgcagaatgtggatacatgtgccacagtgaattcataataagattgttctttggaaatttttcatattttttttgttgctgttgcacttgggagaatggacaaatacctccccagtatgcagctacattgtactactcaacctgtttgtttcatctactgaaattaaaatcagtttctgatagctcttatattccaactaaagcatgttatcgacttgacttagtaatctttactatgcatctacctggcttatgtctaaaatacacatcttttacattaatgagttgtacaaattcttactgaacactttttatgttcttgctctggggaaaaaaggtcaatgtaacaactcttcttaatagagtctttgtctaataatataagaaattgtctaatacgtcactaattataataaagtgggataaacattacaagaggggtaggccccagcccttggggcacacaagaggagcatggaatcccttctattgctatatatgaatcacatatatgagaatgtgtttatggtaatatgttcttactcttatgatgacaatttcccttcagatacagacaatttcccctcaaatactcttctgatgacaatttcccctcagatatatcacctataaagtgagatggaacagttacattttgttccacagataaagatgtcgatttgtgagtttacttggcaattagtgttcttaaataaacttagaaaaattcgttgatctataagatactttcagtacagtgaaaataaygttacggttcaatagtaccaattaataaaaataaaattaaattaaaatgttgatttaaatataagcaaatatatttattttgaatgctagtaacacacacacacacacacacacacacacacacatatatatatatagcttagagagagaaggaaggtgagaggcatgtaattaaaaaaccaccacttaaaaatgcagtataaaatcgtgcttatgtgttgattctctgaatatgtattctatggcttcaagtt

SEQ ID NO: 690025 - DNA, 2769 bp, Homo sapiens
taatcagttaagaaaataaaattttgagtaccaagtgtgagtccaaactgataacttgagtccaaactcatagctctgacactgatttaatggcaaacctcctctccaccatctcattcctggtattgagagaagccttcattggcatgacacctaaagctggattttcctctttttctccttattgtgctatttctcttctctgtccctctgtaatcttattactcagtccagagaatgtggagagggaatgaagagaataggtaaggagaaataatgtatcattgggaactagcttctctctccctgggattgatggttgcttaaagctgactctgttatggattcttttgggggcacgttcaaaagttcccggctagtcccctctcttgtacagtttctttgacctgggcaaatctgatttttcacagctcttaggaattctgcatcaccctactttctctatactggtatttctccacccttctagtcagcgttgatggacaatacacactgcttctttctcacttgtgtggctgacacctggtttatagggaatactgataattcctgatgaatgtcaaaagtaccctaatgcagccacctctcaggctgtctatactctttgacttactctgcagagaattagaaggaaatcacttcaactaccttcctaagtttgaaatgaaggaggcagcctatcctatctcttgatggttttcacagattgcaagagctctcatcaaagagttatcaatacacttttatttccctacaatcttcctattttctgcctgttttggacttaggggtctattagttataaaaataattatcaaataacttatttgaaaatttctaagagattatttttcccctcacattcaaatttaacatttatcatactattattctttatattgttttggaaatgttacatttataataaatatataactataatcacttacacataattaaaacacctgaaaatagagagtaagcaacagattgaagatgtggtgtttggagtttcttctcgcatatacactgaaaattgctaaaaatacttaggaatattttgctgggttactaggttttagaaatagaagtacagggtgacaggtaaatatctgactcaaaaatagttttttagatgtgttaattgaattaatacagtcccatcacaatgaatattttacctatgccaggtaatcaaaattaaaattacatttaataattttgaagtttcacaagcagagtattttggaactatttgggtcccattaaggactgggtattaatttttaaaaaagacaaaatgaggaaaaaataaaattaagttgaattaaaaggagaaaaattaaatacaattatgagaatagttgcagattattaatcataaaacatggaaatttccaaattttaaagaatacttttgcttttgaataaaatccctcaaaaatgtaaagatttttactgcacttccttaataatatggtgatatttaagacttttaaatctagtgccatataggtatatattggcctgaggaattctgaagtacaaaaccctcacaattaatctaagtaattgttttatattagataaatatttgaagagttacacagaatttcccaagttacttttatgtgtaaaagttgtggcatgacagtgcataaaaaccttcaaattattgctttaaaattctatgtaatttttggagtacatttttagaagcactatatgcagaatgtggatacatgtgccacagtgaattcataataagattgttctttggaaatttttcatattttttttgttgctgttgcacttgggagaatggacaaatacctccccagtatgcagctacattgtactactcaacctgtttgtttcatctactgaaattaaaatcagtttctgatagctcttatattccaactaaagcatgttatcgacttgacttagtaatctttactatgcatctacctggcttatgtctaaaatacacatcttttacattaatgagttgtacaaattcttactgaacactttttatgttcttgctctggggaaaaaaggtcaatgtaacaactcttcttaatagagtctttgtctaataatataagaaattgtctaatacgtcactaattataataaagtgggataaacattacaagaggggtaggccccagcccttggggcacacaagaggagcatggaatcccttctattgctatatatgaatcacatatatgagaatgtgtttatggtaatatgttcttactcttatgatgacaatttcccttcagatacagacaatttcccctcaaatactcttctgatgacaatttcccctcagatatatcacctataaagtgagatggaacagttacattttgttccacagataaagatgtcgatttgtgagtttacttggcaattagtgttcttaaataaacttagaaaaattcgttgatctataagatactttcagtacagtgaaaataacgttacggttcaatagtaccaattaataaaaataaaattaaattaaaatgttgatttaaatataagcaaatatatttattttgaatgctagtaacacacacacacacacacacacacacacacacayatatatatatagcttagagagagaaggaaggtgagaggcatgtaattaaaaaaccaccacttaaaaatgcagtataaaatcgtgcttatgtgttgattctctgaatatgtattctatggcttcaagtt

SEQ ID NO: 690026 - DNA, 611 bp, Homo sapiens
caaccaggtcttccttttctaggcctttcctggatcagaagagattaattgagagtctaataactttaaaggtctgaaaagagacatttactatctattctctcggaggactgctacctatgaatcttcatctatataacgaggccaactttgctagccaggcctcctcttctctccttcccatracccgtctggccactaaacctgatctaccaacataatctggctttggccatgctctgagcctatatctttctgtatcctcaagatggtatataagcttctgtaccttgttagggaattgggtctttcttctgaaggtgcttggatatgcacattaaaccagtttgtatgtcttttctcctattaatcaatctgccttatgttagtgacatttcagcaaacatttaggggccaaacctattgcactatttgaatttattagactctggcattgagctccaccaaaagcataatctttgctgcccacattgccttctatctctgggaaatcctattcagtggtcaaatcccaacttgaaagtaacttcttttgtgaagccctctcatgtccctttaagtaagttgctttcttatgcacggccaaaaaa

SEQ ID NO: 690027 - DNA, 1934 bp, Homo sapiens
  misc_feature 791, 792, 793, 794, 795, 796, 797, 798, 799, 800, 801, 802,803, 804, 805, 806, 807, 808, 809, 810, 811, 812, 813, 814,815, 816, 817, 818, 819, 820, 821, 822, 823, 824, 825, 826,827, 828, 829, 830, 831, 832, 833, 834, 835, 836, 837: n = A,T,C or G
  misc_feature 838, 839, 840, 841, 842, 843, 844, 845, 846, 847, 848, 849,850, 851, 852, 853, 854, 855, 856, 857, 858, 859, 860, 861,862, 863, 864, 865, 866, 867, 868, 869, 870, 871, 872, 873,874, 875, 876, 877, 878, 879, 880, 881, 882, 883, 884: n = A,T,C or G
  misc_feature 885, 886, 887, 888, 889, 890: n = A,T,C or G
actgggcctgcaaatgcagtgagccctattttgagctccagccttggtccacatcagagtcaagagaggacacttggccattgcccagacaggcagtgaccgcagttataatgtgtactctgatgagttcaggccaggcagcagacgtgacgtcatggtcctcattcatcatggggctgtggccaaaaccttggctcccatggctcaggtgggaagcctgaggccagcagagactacccatgatctggcatcttgggacagagaactcagctagctccatcctgcatctcagcccctctggcggaagagaggccacacactgtggaggaacaagccctgggctggggcaggacagaacagcatttgagaccagcctccttatctggtggagagaccttggccacatcaatgaacttctgtattttcccgtctgtgaaatgcggaggataacacctgcttcgtagagtcagggtgagggcaaaatggagcaaaatgcccagagccactgcacgcatggagagggcacttgggaatttgccgcgattctgatcagaccatcaaagttgttctccaggctgccaagtggagctgtttcagtcctgcaaacttctagctttccttaggtggggaaattgtcctcgcctggcctccgctctgagatacaggaaaatagtggtggtttttggcaggagcaggaaacagttcaaatgtttcctggcaaggatgggaagtgcaggagggaagcagcgcagctctgcttggttttctcagagatttttccacttggaggnnnnnnnnnnnnnnnnnnnnnnnnnnnnnnnnnnnnnnnnnnnnnnnnnnnnnnnnnnnnnnnnnnnnnnnnnnnnnnnnnnnnnnnnnnnnnnnnnnnnaatgtgctctctccctcctctgagcactcccataaacctctgccagaatgggaactcctcgaagagagagtggtctcatctgttttctagccccacratgtgcaaagtgcagtcctgggtccagcatgggaataagagatgtggagtaagcatgtgagcgctaaatctgcatcattcaggcaatattcattgagcacctactgtgtgcctagcccctgctatgcatcaaggatatgacagtgaccaaggcaagtgtggtgcctgccccatggagtgtaggcagcccatgttctagaatgtgctgaggattcaccacagctccattcacccagctcctgcagcaaagctgttcgcctgttggtgtgtgttcagggaacatacaccaccatgacactcggctaggctgagggttctgcaacagctctttgcagttgtatccttcctcagtccaggccttgtgtctttaggatgaatcagaggccttgctcattcgtctgctcagggcccactgcctgaaaggctcaacaccctcccaactgtccccagggctgggaagcctgagacctccagatgttgcagggcctgagagggcagggggcctgactgatccctaggagaagctggctctgtctgtggaggagcagcagagggactctcttcactcttttcctcacctgtcttctgatatggggaggagagggagaggaggagaaagaatggaaggagaaggaggaaaagggaagttcctaggtaagatattccatctctggtccctgtgggtccatggaccccagcactgaagcctctggttaccaacccagcactgaagcctctggttaccaaccagaggtgacacctatttagcaccacacagcccagccctgacaaatcacaatggactctgactgagggctgcagcagggctggggggccccatgcatgtgccaggcatgatcactttagttgctggattgtggagtgaatccagggtccccagggaggagcaggggcagaaggggtaggatactcagagaatctgagcca

SEQ ID NO: 690028 - DNA, 1934 bp, Homo sapiens
  misc_feature 791, 792, 793, 794, 795, 796, 797, 798, 799, 800, 801, 802,803, 804, 805, 806, 807, 808, 809, 810, 811, 812, 813, 814,815, 816, 817, 818, 819, 820, 821, 822, 823, 824, 825, 826,827, 828, 829, 830, 831, 832, 833, 834, 835, 836, 837: n = A,T,C or G
  misc_feature 838, 839, 840, 841, 842, 843, 844, 845, 846, 847, 848, 849,850, 851, 852, 853, 854, 855, 856, 857, 858, 859, 860, 861,862, 863, 864, 865, 866, 867, 868, 869, 870, 871, 872, 873,874, 875, 876, 877, 878, 879, 880, 881, 882, 883, 884: n = A,T,C or G
  misc_feature 885, 886, 887, 888, 889, 890: n = A,T,C or G
actgggcctgcaaatgcagtgagccctattttgagctccagccttggtccacatcagagtcaagagaggacacttggccattgcccagacaggcagtgaccgcagttataatgtgtactctgatgagttcaggccaggcagcagacgtgacgtcatggtcctcattcatcatggggctgtggccaaaaccttggctcccatggctcaggtgggaagcctgaggccagcagagactacccatgatctggcatcttgggacagagaactcagctagctccatcctgcatctcagcccctctggcggaagagaggccacacactgtggaggaacaagccctgggctggggcaggacagaacagcatttgagaccagcctccttatctggtggagagaccttggccacatcaatgaacttctgtattttcccgtctgtgaaatgcggaggataacacctgcttcgtagagtcagggtgagggcaaaatggagcaaaatgcccagagccactgcacgcatggagagggcacttgggaatttgccgcgattctgatcagaccatcaaagttgttctccaggctgccaagtggagctgtttcagtcctgcaaacttctagctttccttaggtggggaaattgtcctcgcctggcctccgctctgagatacaggaaaatagtggtggtttttggcaggagcaggaaacagttcaaatgtttcctggcaaggatgggaagtgcaggagggaagcagcgcagctctgcttggttttctcagagatttttccacttggaggnnnnnnnnnnnnnnnnnnnnnnnnnnnnnnnnnnnnnnnnnnnnnnnnnnnnnnnnnnnnnnnnnnnnnnnnnnnnnnnnnnnnnnnnnnnnnnnnnnnnaatgtgctctctccctcctctgagcactcccataaacctctgccagaatgggaactcctcgaagagagagtggtctcatctgttttctagccccacgatgtgcaaagtgcagtcctgggtccagcatgggaataagagatgtggagtaagcatgtgagcgctaaatctgcatcattcaggcaatattcattgagcacctactgtgtgcctagcccctgctaygcatcaaggatatgacagtgaccaaggcaagtgtggtgcctgccccatggagtgtaggcagcccatgttctagaatgtgctgaggattcaccacagctccattcacccagctcctgcagcaaagctgttcgcctgttggtgtgtgttcagggaacatacaccaccatgacactcggctaggctgagggttctgcaacagctctttgcagttgtatccttcctcagtccaggccttgtgtctttaggatgaatcagaggccttgctcattcgtctgctcagggcccactgcctgaaaggctcaacaccctcccaactgtccccagggctgggaagcctgagacctccagatgttgcagggcctgagagggcagggggcctgactgatccctaggagaagctggctctgtctgtggaggagcagcagagggactctcttcactcttttcctcacctgtcttctgatatggggaggagagggagaggaggagaaagaatggaaggagaaggaggaaaagggaagttcctaggtaagatattccatctctggtccctgtgggtccatggaccccagcactgaagcctctggttaccaacccagcactgaagcctctggttaccaaccagaggtgacacctatttagcaccacacagcccagccctgacaaatcacaatggactctgactgagggctgcagcagggctggggggccccatgcatgtgccaggcatgatcactttagttgctggattgtggagtgaatccagggtccccagggaggagcaggggcagaaggggtaggatactcagagaatctgagcca

SEQ ID NO: 690029 - DNA, 665 bp, Homo sapiens
gggtatgagggtagctgtgttacatggmtatatttcacagtggtgatatggggtttttagtgtatccatcacccaaatagtgtacattgcacccaagagtgaatgcatgcctttttatccacctatattaatgttttaacggcaaggactaatttaatatcttccgcagtgcctaatatgcagaaagtactcagtaaatatttgttatatttgataaataagtgtaacaaaatgctatgttacatcagttactcctttcagtatagattaggtttttaagtcctccaagttccacctctgagagcttccataaactgattagtagtgccttctttagataagaaagtcacagcagacacacctcttagaagagtagttgagaaaactcaaaattttttactctcaaaattaaaaacgatgtcaaaatagttcattttactttctattactgtggataaaagtctttccactatcgatgagaacagtggggtttagaaatttgctgaaagttgccctgatgacaaatagaagtgggatgtgaactaggtgttgtctaactcccgaaggctccactttaactcctggcctctattaatacctcacaatcaagaagtgatggctaaatgtcatccgagcgacacatgattaatggcataataattcct

SEQ ID NO: 690030 - DNA, 665 bp, Homo sapiens
gggtatgagggtagctgtgttacatggatatatttcacagtggtgatatggggtttttagtgtatccatcacccaaatagtgtacattgcacccaagagtgaatgcatgcctttttatccacctatattaatgttttaacggcaaggactaatttaatatcttccgcagtgcctaatatgcagaaagtactcagtaaatatttgttatatttgataaataagtgtaacaaaatgctatgttacatcagttactcctttcartatagattaggtttttaagtcctccaagttccacctctgagagcttccataaactgattagtagtgccttctttagataagaaagtcacagcagacacacctcttagaagagtagttgagaaaactcaaaattttttactctcaaaattaaaaacgatgtcaaaatagttcattttactttctattactgtggataaaagtctttccactatcgatgagaacagtggggtttagaaatttgctgaaagttgccctgatgacaaatagaagtgggatgtgaactaggtgttgtctaactcccgaaggctccactttaactcctggcctctattaatacctcacaatcaagaagtgatggctaaatgtcatccgagcgacacatgattaatggcataataattcct

SEQ ID NO: 690031 - DNA, 665 bp, Homo sapiens
gggtatgagggtagctgtgttacatggatatatttcacagtggtgatatggggtttttagtgtatccatcacccaaatagtgtacattgcacccaagagtgaatgcatgcctttttatccacctatattaatgttttaacggcaaggactaatttaatatcttccgcagtgcctaatatgcagaaagtactcagtaaatatttgttatatttgataaataagtgtaacaaaatgctatgttacatcagttactcctttcagtatagattaggtttttaagtcctccaagttccacctctgagagcttccataaactgattagtagtgccttctttagataagaaagtcacagcagacacacctcttagaagagtagttgagaaaactcaaaattttttactctcaaaattaaaaacgatgtcaaaatagttcattttactttctrttactgtggataaaagtctttccactatcgatgagaacagtggggtttagaaatttgctgaaagttgccctgatgacaaatagaagtgggatgtgaactaggtgttgtctaactcccgaaggctccactttaactcctggcctctattaatacctcacaatcaagaagtgatggctaaatgtcatccgagcgacacatgattaatggcataataattcct

SEQ ID NO: 690032 - DNA, 665 bp, Homo sapiens
gggtatgagggtagctgtgttacatggatatatttcacagtggtgatatggggtttttagtgtatccatcacccaaatagtgtacattgcacccaagagtgaatgcatgcctttttatccacctatattaatgttttaacggcaaggactaatttaatatcttccgcagtgcctaatatgcagaaagtactcagtaaatatttgttatatttgataaataagtgtaacaaaatgctatgttacatcagttactcctttcagtatagattaggtttttaagtcctccaagttccacctctgagagcttccataaactgattagtagtgccttctttagataagaaagtcacagcagacacacctcttagaagagtagttgagaaaactcaaaattttttactctcaaaattaaaaacgatgtcaaaatagttcattttactttctatkactgtggataaaagtctttccactatcgatgagaacagtggggtttagaaatttgctgaaagttgccctgatgacaaatagaagtgggatgtgaactaggtgttgtctaactcccgaaggctccactttaactcctggcctctattaatacctcacaatcaagaagtgatggctaaatgtcatccgagcgacacatgattaatggcataataattcct

SEQ ID NO: 690033 - DNA, 599 bp, Homo sapiens
tttaatcttgattataaaatataactcccataagtttttaataacctttatcacctttattaaaaagttggctaatccttgaagaaaaccttgttaatctgacacagagatccatatgctgttcttgcatgagtgtgcctttgacgttaatgactgatttatagagaacctcaacctatttggtctctgaaaatcagcccttaaaatctcacatgcccacctcttccatgaaagtccccgggccttgaggagttgaatgagtttaatttttggccctgtgtcttagcaatgcagtttattttgattggtatcttctatgaggtctgaaggtgaggctttaatttttgtcgctgtttaagatttagcatgtcttggtgttctttttagactcaggagtcaaatccctgtaactcaatgtaaaaaggactttagaaacttatacaggaagatacatggatgtaataaccttaatttaaaaaaaatttcagctttgtttataagcaaaccaaaacttaatcattatatgactacttgatctrctaattttttaaaaataaatcctcttattgtgatttacactgactgttcatgacatactt

SEQ ID NO: 690034 - DNA, 921 bp, Homo sapiens
atgggtggatggatggatggatggatggtggttggttggttggatggttggatggttggaaggttggaaggttggatagatggatggatggatagaccatcaggcaaacagacagacttgcatttaaattgagacctgaaggatgaataagaattaggtatgcaaaaatacattggcgattgaggggaaggaatagtgagtaaggtaaatgtggtttttaaagtcaagacaatgatgctgtttggggactgaaaaaggccatcaagaatgaaacacagagttggcatatgatgaagtttgtaagataagyaggttccaaatctgacaagacaaagttaagaattttaaacattgtctaaggatgtctaagtcaataacttactttgttttaagcaagtcctcaaaggttgatttaaaaaaatagtgaattaattagaattgcattttgtagagattactctggctgaagcatgcacacacaaaaaagtattctaagtaggcaaacccaggcaatgactttaagacaaccctagaggtaatataggagtttaaaaaaagtaacttgaggcttagagatattatttaacttgtcttaggttatataattgaaaagttgtggagctagaaaaagtcacatttcacagagttcatacccatcactaatagcttagaaaactttcattcatgtgtttattcaacttacatttcttattaaaggtctatatatgcaagatattaccttaggtactagagataaaacaataaataaagtctatacacccaaggagtataagttgtattcagatggaggtagatagtgataggtgctctgaagaagcatggtagaggggatagcaaggattagaaactactgctttatataaggaactgagaaaatctttctgtttagatgaaacatga

SEQ ID NO: 690035 - DNA, 1167 bp, Homo sapiens
gcttctggcaagtgattatgattttccttttttggtagtaatgtaagatttcctttataaatatatttattgaaatgaaaggtgagttaatttaccaaaatgtgttaaataaatatttaaatgggtggtacaaaatatgttaaattaaaaattgaacaggtagtttaagttttgaaaattaagagaatatcattctcttttattcaatattcagagaatactgaaggcattttatgaatggttaatacatggaagactcttagatcaaggctagtgggtataattgattccctttctactttcttaaatggttttaaaccattcaacgtctttgccaagctctgctgggaagcccagaatctgccgcaatgtgttccaaggcctgggaagttaccctcttccccatgcccatgctgatgccgccactctggtcgggatgtaagccccaggtcccaggtccctgagctggatggggaagtcggtggtgctatggatgggccacgctggagagagctagcacagtggcacttccagaaccctgctctgtcatctgcaaatgtatctgtgttgggagatactaagaatagctgagacccgcctgactgagcagaagctcccagctggggcacccctggccagctaagcctcttgacagatggccctggtttccagccctggtgccaaactccaacccctgtcctcaccccgcttctccacttcccaccctctagccctgtccgaagcctcactcagcccgaggcagcaggcttcatccctcagaattcctcccagctgccagggaaagtgagctgtgcatgaggaccactgtggggtggagagcgcagtagctccccagccaggcagggctgggccacctgccagtttcatcctccctccccctgtggtcctcaaagttggcctcagtttcctcatgagaagcccyttcgtgcactgttgccaagggccataaaggcagagggcttccgcctgtaatcccagcattttgggaggccgaggcgggcagatcacgaggttgggagatcgagaccatcctggctaacacagtgaaaccccgtctctactaaaaatacaaaaaagtagctgggtgtggtggcgggcacctgtagtcccagctacttgggaggctgaggcaggagaatggcgtga

SEQ ID NO: 690036 - DNA, 604 bp, Homo sapiens
aaagttgaataatgtgcagatgttgaaaatggcaggccggctctgtagactgaactcactgctgagaagaatttaaaatgctgcatagaaatcttttttaaaaaaatcaccaaacttctgaaatastgtaagaaattcttaagcaaacatctaagaaaagcaggacagtaggaagagatccagaacaacttcagatacaataaatattatatacagaagaagcatggcagagcaatgggaaaaggatttaattcctagtgcttgaccgatggattaatctcatagaaaaataaataagagacttatacccctatgccaactgaaaaattaattccagatgaattaaagacttaaaaataaaacttgataactttggaagagaaggtggatctttattatctccaggaaaaaaaggattcagtaaataagatacaaaaagcaaaactcaaaagaaaataaattctgctatgtacatattataaatatctgtttatgaaagaatctattattattacgaaagaacttgttatcattaaacctaaaaaggtcacaaattgggcaaagatattctcttttttttttgagacggagtctccctctgtcg

SEQ ID NO: 690037 - DNA, 1752 bp, Homo sapiens
tccctctggctccagcccttcttgtttctgttgaatatcaactgccccttccccactgccatggtgatcaagacatgaaaccaagtcttattctccagtgcatggtctaaggcttgccaggggcaccaatggctggggtgataaccattctaaaccccatcctcacttccatgggctcagccacctaccacgtggacccagccttcacctggaataaccccacctctgaaaaggtaaactctgatctccagctctcgaacccacaacctcctcttccatgatgcttcctgtgaccagcagcctcctagtggcactttcttacctgctcagtcctcacgccagagatatcccctaaatcaatcctctcagcagctcctgagtcaacatcttcactcccttagccttcccctttgatatggtttggctttgtgtcctcactcaaatctcaccttgaaatgtaatccccacatgccaagggtggggccaggtggaggtaattgaatcatggggtggttcccccatgttgttcttgtgataagtgggtcccacgagatctggtggttttataagcatagggcattttccctgcttgcactcactgtgtcctacaaccctgtgaagagggtgcatgtttctcctttgcccttcaccatgattgtaagtttcctgasgcctctctagccatgcggaactatgagtcaattaaaactctttcctttataaattatccagtctctggtacttcttcatcacagcgtgagaactgactaatacacccttgccttgaccctctgaaaccttgcccagaatatttccataacccacttgcccttctaacagggctgctgaggggctggagaccacaccaccgatgctttccagcttttgctgaaccccgaggcccgtcgctggtccttttacttgtccttatgttttctttccttttctgccttcccttcagtgactgctgtcccaagccctcactacttcccttggctccctctcaaaacatcagcttccatctcaccttaccaggatggttagggttatcaggaaatgatggccctaaatttctgtctacaaacccacttaccaatattgtaatgttctgcaaaagatataataggtgtctcttttcttcctcctcctccataattagccttttatatttgttcttagacccatttagtcccattttgtgaaggatcttgttataattatactgtcttttttatactttcaacctcttcctagctgctggtaatatccccacaccctacagttatctcctttctaacacaaaatcaaagctgaaatgcatctttgcatctcttcacgcaagaaatatttactgggagcctactaggtgccagctgctagaacaggcttgagaaaacatattggcatgatccctctcttcatggaactttgggtctagtgaaggaaagagacaatacataatgaatacaaaagaagtatgtcactggaaatatttgaaaactgcaaaagagaagaacacactgttatgtaagcttatgtcaggggttatctccttggtctggggttaggtaggtttttctgtaagagcatatacctgggtggacagggatcagtataggtaccagctcacctactcaatagttggtctcttcttaatcttgagctctgcctgatatggtttggttatatccccaaatctcatcttgaattcccacatgttgtgggagggacccagtgggaactaattgaatc

SEQ ID NO: 690038 - DNA, 660 bp, Homo sapiens
agaaaatgttctcgatttggtttttaattcatttatttttaattacataaatgacatcagagaacaatctctttgtacaaaaaagaacaaaagcacatagaatggggaagcgaaaatcactgacaagcactgttgattcaagaaatctggtttagctcaccatttacgtgttattttcttgtctttatttttttctttttttaaatttagagacagggtcttactctgtcacctgggcagaatgcagtggcaggatcatagctctgtgcaaccccagactcctgggctcaagcaatcctcctttctcatcctcctgagtagctagcactacaggtgcatgccaccatgcccaggtaatttttaaagtttttgcagagacaggatctcactatgttgtccaggctagtttcaaactcctgggctcaaatgatcctccctcctcggcctcccaaagtgatgggattacaggcatgagccattgtgtccagccttacatattattttcacgattcattaatctccatttwaaaaaaaatgctgtatacagtatgctgttgatatattttttccgtagctgtttttcttattccagaaataacatgaaagtctttgtgttggccggacgtggtggcttacgcctgtaatcccagaactttagga

SEQ ID NO: 690039 - DNA, 1236 bp, Homo sapiens
tatttgagggctaatcttattttagttgatcaacctaaaacattctcaaatgccccatcagtattgcattatatttaagaagagaaccaaaataaatcatgttatttattgtgtgagactcaacaatcccaatgtttcttgtttctgtttcaatttatgaaaagacctgaataccatactgtagagtgttagacaaaaaaaattagtgagtgatacttgttaaagcactgtaaggcgaactttatcaggatcattgtgataggtctgtaaggaggagaagattgagcttaactcctaatacagcatggacaaatgggaatttatagacaagaaagagtagagaagagggtgtcagtagacggaaaatcactaagagaaaaaaatcaagggtaaaggaatgtgtaagtctgttttgtgttgctatgaaggaatatctgagacttgatactttattttaaaaaataagtttatttggctcatgattctacaggctataccaccataataccagcatctccttggcttaagctgaagcctcagaaagcctttactcatggcagaaggcaaagggggagcaggcatctcgcatgatgagaaaaggagcaagagagaagagaggtgccaggcttttttaaataaccggctctcctgtgaactaatagagtgaaaactcacacatcaccaaggagatggcaccaagccaatcttgagggatccccccctatgaccaaaaacctcccaccagaccccacctccaacactggggatcacatttcaacatgagatttggaggggacaastatctaaaccatatcaggaagattctggctaaacagacctaacaggattctttctgaagatagaccagagtgatcacatatcacttggaggatggtggaggatgaaaaacccagttagatatctaagataatcagacgtcaagaatggagagttcttggtaaactgatttagcaaggttcctggccaaaactggattttacaagaaagtgcataggtaggcctaggagaaggttgagaagctcactcaacttttgctgagaggataaactttgtcaacaatcatcaaaaatttgaaactccttaatctattttttcactccaaagagggtttttcctataatttcacagttcactctatagatgttttaattttcttggtgtctaaattatttttgtgtattagtctgaagtgttcatcagaaatagtttcattta

SEQ ID NO: 690040 - DNA, 1236 bp, Homo sapiens
tatttgagggctaatcttattttagttgatcaacctaaaacattctcaaatgccccatcagtattgcattatatttaagaagagaaccaaaataaatcatgttatttattgtgtgagactcaacaatcccaatgtttcttgtttctgtttcaatttatgaaaagacctgaataccatactgtagagtgttagacaaaaaaaattagtgagtgatacttgttaaagcactgtaaggcgaactttatcaggatcattgtgataggtctgtaaggaggagaagattgagcttaactcctaatacagcatggacaaatgggaatttatagacaagaaagagtagagaagagggtgtcagtagacggaaaatcactaagagaaaaaaatcaagggtaaaggaatgtgtaagtctgttttgtgttgctatgaaggaatatctgagacttgatactttattttaaaaaataagtttatttggctcatgattctacaggctataccaccataataccagcatctccttggcttaagctgaagcctcagaaagcctttactcatggcagaaggcaaagggggagcaggcatctcgcatgatgagaaaaggagcaagagagaagagaggtgccaggcttttttaaataaccggctctcctgtgaactaatagagtgaaaactcacacatcaccaaggagatggcaccaagccaatcttgagggatccccccctatgaccaaaaacctcccaccagaccccacctccaacactggggatcacatttcaacatgagatttggaggggacaactatctaaaccatatcaggaagattctggctaaacagacctaacaggattmtttctgaagatagaccagagtgatcacatatcacttggaggatggtggaggatgaaaaacccagttagatatctaagataatcagacgtcaagaatggagagttcttggtaaactgatttagcaaggttcctggccaaaactggattttacaagaaagtgcataggtaggcctaggagaaggttgagaagctcactcaacttttgctgagaggataaactttgtcaacaatcatcaaaaatttgaaactccttaatctattttttcactccaaagagggtttttcctataatttcacagttcactctatagatgttttaattttcttggtgtctaaattatttttgtgtattagtctgaagtgttcatcagaaatagtttcattta

SEQ ID NO: 690041 - DNA, 1236 bp, Homo sapiens
tatttgagggctaatcttattttagttgatcaacctaaaacattctcaaatgccccatcagtattgcattatatttaagaagagaaccaaaataaatcatgttatttattgtgtgagactcaacaatcccaatgtttcttgtttctgtttcaatttatgaaaagacctgaataccatactgtagagtgttagacaaaaaaaattagtgagtgatacttgttaaagcactgtaaggcgaactttatcaggatcattgtgataggtctgtaaggaggagaagattgagcttaactcctaatacagcatggacaaatgggaatttatagacaagaaagagtagagaagagggtgtcagtagacggaaaatcactaagagaaaaaaatcaagggtaaaggaatgtgtaagtctgttttgtgttgctatgaaggaatatctgagacttgatactttattttaaaaaataagtttatttggctcatgattctacaggctataccaccataataccagcatctccttggcttaagctgaagcctcagaaagcctttactcatggcagaaggcaaagggggagcaggcatctcgcatgatgagaaaaggagcaagagagaagagaggtgccaggcttttttaaataaccggctctcctgtgaactaatagagtgaaaactcacacatcaccaaggagatggcaccaagccaatcttgagggatccccccctatgaccaaaaacctcccaccagaccccacctccaacactggggatcacatttcaacatgagatttggaggggacaactatctaaaccatatcaggaagattctggctaaacagacctaacaggattctttctgaagatagaccagagtgatcacatatcacttggaggatggtggaggatgaaaaacccagttagatatctaagataatcagacgtcaagaatggagagttcttggtaaactgatttagcaaggttcctggccaaaactggattttacaagaaagtgcataggtaggcctaggagaaggttgagaagctcactcaacttttgctgagaggataaactttgtcaacaatcatcaaaaatttgaaactccttaatctattttttcacyccaaagagggtttttcctataatttcacagttcactctatagatgttttaattttcttggtgtctaaattatttttgtgtattagtctgaagtgttcatcagaaatagtttcattta

SEQ ID NO: 690042 - DNA, 1236 bp, Homo sapiens
tatttgagggctaatcttattttagttgatcaacctaaaacattctcaaatgccccatcagtattgcattatatttaagaagagaaccaaaataaatcatgttatttattgtgtgagactcaacaatcccaatgtttcttgtttctgtttcaatttatgaaaagacctgaataccatactgtagagtgttagacaaaaaaaattagtgagtgatacttgttaaagcactgtaaggcgaactttatcaggatcattgtgataggtctgtaaggaggagaagattgagcttaactcctaatacagcatggacaaatgggaatttatagacaagaaagagtagagaagagggtgtcagtagacggaaaatcactaagagaaaaaaatcaagggtaaaggaatgtgtaagtctgttttgtgttgctatgaaggaatatctgagacttgatactttattttaaaaaataagtttatttggctcatgattctacaggctataccaccataataccagcatctccttggcttaagctgaagcctcagaaagcctttactcatggcagaaggcaaagggggagcaggcatctcgcatgatgagaaaaggagcaagagagaagagaggtgccaggcttttttaaataaccggctctcctgtgaactaatagagtgaaaactcacacatcaccaaggagatggcaccaagccaatcttgagggatccccccctatgaccaaaaacctcccaccagaccccacctccaacactggggatcacatttcaacatgagatttggaggggacaactatctaaaccatatcaggaagattctggctaaacagacctaacaggattctttctgaagatagaccagagtgatcacatatcacttggaggatggtggaggatgaaaaacccagttagatatctaagataatcagacgtcaagaatggagagttcttggtaaactgatttagcaaggttcctggccaaaactggattttacaagaaagtgcataggtaggcctaggagaaggttgagaagctcactcaacttttgctgagaggataaactttgtcaacaatcatcaaaaatttgaaactccttaatctattttttcactccaaagagggtttttcctataatttcacagttcactctatagatrttttaattttcttggtgtctaaattatttttgtgtattagtctgaagtgttcatcagaaatagtttcattta

SEQ ID NO: 690043 - DNA, 1236 bp, Homo sapiens
tatttgagggctaatcttattttagttgatcaacctaaaacattctcaaatgccccatcagtattgcattatatttaagaagagaaccaaaataaatcatgttatttattgtgtgagactcaacaatcccaatgtttcttgtttctgtttcaatttatgaaaagacctgaataccatactgtagagtgttagacaaaaaaaattagtgagtgatacttgttaaagcactgtaaggcgaactttatcaggatcattgtgataggtctgtaaggaggagaagattgagcttaactcctaatacagcatggacaaatgggaatttatagacaagaaagagtagagaagagggtgtcagtagacggaaaatcactaagagaaaaaaatcaagggtaaaggaatgtgtaagtctgttttgtgttgctatgaaggaatatctgagacttgatactttattttaaaaaataagtttatttggctcatgattctacaggctataccaccataataccagcatctccttggcttaagctgaagcctcagaaagcctttactcatggcagaaggcaaagggggagcaggcatctcgcatgatgagaaaaggagcaagagagaagagaggtgccaggcttttttaaataaccggctctcctgtgaactaatagagtgaaaactcacacatcaccaaggagatggcaccaagccaatcttgagggatccccccctatgaccaaaaacctcccaccagaccccacctccaacactggggatcacatttcaacatgagatttggaggggacaactatctaaaccatatcaggaagattctggctaaacagacctaacaggattctttctgaagatagaccagagtgatcacatatcacttggaggatggtggaggatgaaaaacccagttagatatctaagataatcagacgtcaagaatggagagttcttggtaaactgatttagcaaggttcctggccaaaactggattttacaagaaagtgcataggtaggcctaggagaaggttgagaagctcactcaacttttgctgagaggataaactttgtcaacaatcatcaaaaatttgaaactccttaatctattttttcactccaaagagggtttttcctataatttcacagttcactctatagatgttttaattttcttkgtgtctaaattatttttgtgtattagtctgaagtgttcatcagaaatagtttcattta

SEQ ID NO: 690044 - DNA, 1236 bp, Homo sapiens
tatttgagggctaatcttattttagttgatcaacctaaaacattctcaaatgccccatcagtattgcattatatttaagaagagaaccaaaataaatcatgttatttattgtgtgagactcaacaatcccaatgtttcttgtttctgtttcaatttatgaaaagacctgaataccatactgtagagtgttagacaaaaaaaattagtgagtgatacttgttaaagcactgtaaggcgaactttatcaggatcattgtgataggtctgtaaggaggagaagattgagcttaactcctaatacagcatggacaaatgggaatttatagacaagaaagagtagagaagagggtgtcagtagacggaaaatcactaagagaaaaaaatcaagggtaaaggaatgtgtaagtctgttttgtgttgctatgaaggaatatctgagacttgatactttattttaaaaaataagtttatttggctcatgattctacaggctataccaccataataccagcatctccttggcttaagctgaagcctcagaaagcctttactcatggcagaaggcaaagggggagcaggcatctcgcatgatgagaaaaggagcaagagagaagagaggtgccaggcttttttaaataaccggctctcctgtgaactaatagagtgaaaactcacacatcaccaaggagatggcaccaagccaatcttgagggatccccccctatgaccaaaaacctcccaccagaccccacctccaacactggggatcacatttcaacatgagatttggaggggacaactatctaaaccatatcaggaagattctggctaaacagacctaacaggattctttctgaagatagaccagagtgatcacatatcacttggaggatggtggaggatgaaaaacccagttagatatctaagataatcagacgtcaagaatggagagttcttggtaaactgatttagcaaggttcctggccaaaactggattttacaagaaagtgcataggtaggcctaggagaaggttgagaagctcactcaacttttgctgagaggataaactttgtcaacaatcatcaaaaatttgaaactccttaatctattttttcactccaaagagggtttttcctataatttcacagttcactctatagatgttttaattttcttggtgtctaaattattttkgtgtattagtctgaagtgttcatcagaaatagtttcattta

SEQ ID NO: 690045 - DNA, 653 bp, Homo sapiens
tgattcygtaggtctggggtgagggggggggcgctgtaggttttgcctaaagacgagtctaaatctggcacgcaggttaaggatgaccattcctaaggcaagcaggtgacactgtcggcaaattgaggtgagactttttctgacccaccccgataccggagggatggctgggctctggtttggatacagacagaatgccagggactacacctgcttctcacttggaacttgggtgaaacctctcaggaagctgtcattcttctcctataccccacctcaccctcttccacccaccactagcagagagattcgggaggggcttgggccagctgaaacccataggaagcacgtccccagagacccggctttcccagcctctcctctcctcccatcacagccccatggttaagaaatgtcctgccgagtgcttttggatttgagcattgctggatttttgcttgtgtcttgttgagacttttgagtgggcagcagttctgaataccagccttcatagtctattctctgatctcaagaatgcaaaaactcttctctcttttggaatttttttttcgtttttctttttttttttttttttttttttttttgggcttttaaaggaaacaatacgtttgctagaaaaacctcaaaaaata

SEQ ID NO: 690046 - DNA, 653 bp, Homo sapiens
tgattctgtaggtctggggtgagggggggggcgctgtaggttttgcctaaagacgagtctaaatctggcacgcaggttaaggatgaccattcctaaggcaagcaggtgacactgtcggcaaattgaggtgagactttttctgacccaccccrataccggagggatggctgggctctggtttggatacagacagaatgccagggactacacctgcttctcacttggaacttgggtgaaacctctcaggaagctgtcattcttctcctataccccacctcaccctcttccacccaccactagcagagagattcgggaggggcttgggccagctgaaacccataggaagcacgtccccagagacccggctttcccagcctctcctctcctcccatcacagccccatggttaagaaatgtcctgccgagtgcttttggatttgagcattgctggatttttgcttgtgtcttgttgagacttttgagtgggcagcagttctgaataccagccttcatagtctattctctgatctcaagaatgcaaaaactcttctctcttttggaatttttttttcgtttttctttttttttttttttttttttttttttgggcttttaaaggaaacaatacgtttgctagaaaaacctcaaaaaata

SEQ ID NO: 690047 - DNA, 1802 bp, Homo sapiens
gggcattgaaattaattattctccctgaaaatgggccagtctgttttcaaaaaaaaaagataagttcattaatttttcatattacagctactacgatttgttagaatggcatgcattatggcagataacattggtaactacataattgtccttggctatttttcccattttttttttttttttgagacggagtctcgctcaatcacccaggcctggagtacagtggtgtgatctcggctcactgcaacctccacctcctggattcaagcagttctcctgtctcagcctccagagtagctgagactatgttgcctgccaccatgcctggctaatttttgtatttttagtagagtcggggtttcaccatgttggtcaggctggtcttcaactcctgacctcgtgatctgcccacctcggcctcccagagtgttgggattacaggcgtgagccactgcacccggctggcttctttcagttttagcaccgtgctctaactagctgagctaaccaactgattgatattatttcaattttaacaataagaaagccaccccctaaaacaattatggaagtaatggtgattatcttacatatttayttctttcatatcaattcagtgttttttattttatggtgctcttttgcgtattaccttatgttcctataaaaatcctttgagtatcacttgttcaacatttattatattatctactcatttgtcaacaaggaaaatgaagctcaaaaataatgtgactgactaaagggtcaagtagcttattagtggtaatgtcaagtctcacacttgtgtaatttgttctatatctactacagaccaaccaaccattttcatcaggtgctggttttcagataagtagagttcctttatatggaatactaactaggagttatggatattaaaaaatataaatggcatatagtcttttaattgtttctataatgtatagtatggaattcaagtggaactataggaaactaaagttagcattatgagaataaatttaatttctaacatgtccagtatacttaaatattggatgtgttctgagtttaatattcaagttttgaaaaacttactggtatagttatataaacatacaaatataaataaactatatttaattggttacagtaaatctggaaaagagcaaggctttttaagtagaaagtaaaattgcttttaaatttgaaacgtagggtgttttggtttttattttaaaattctaggtcagacatttgattcagcaggagatctatagcataaattatgaactatttgataagaaactgaaagaattgaaccaacgcattgggaagacagagtgcagaaataagcatgaaggaatagctgataaacttttggtaagttttgatttcatttgagtcttttttaggggagtagggggtgttgttgctctgttgctcaggctgcagtacggtggctcactgcagcctctgccttctgagctcaagcaatcctaccacctcagtctccagagtagctgagactacaggtgcacaccaccataccctgctaatttttgggttttttttttttttttagagatgaggtttcaccatgttgcccatgcttccctcaaactcctgagctcaagtgattctctagcctcagcctcccaaagtgctgggactacaggcgtgcgtcaccacacctggcccatgtgagtccttttaaaaagaagaatttggtgatatttttcatattagcaaaggaaaacaataagggaagacatacctgattcctggccattagcctaatgtga

SEQ ID NO: 690048 - DNA, 596 bp, Homo sapiens
tgggtcataaccacctcctaaactgagctaattggcctagtttacggaatcaagcatcccacaaagtattcccaattgcaatcgccaacgtccctcaatccaaatccctggagagcctgtcaaaatggcagatcccagggccccagcccttgaggttctgactcagcaagtctggtgcgcagcccaggaatctgcaatctcaagatgttccccatggattctaaggcagagcatccataaaccattctttaagcaactattttcccagccagcaaattataaagacttttttcaagtacaacgagacagaaagccaagtgaaacttaaaattagttgacctgctggctaaatctgctaagtgggcacttgccccatatcaccctctggctctctgcttcctctgccagggaacgagctcagcagatgaggctggagcatagagggcggagtcgcctgtcctttagcaggtgctctggttactgggtcaactcacacatggggcagggaggcggagcctgcargtcccaccttgccattgagtggaggcaactgttttttgtgtgtgaatattcttgttttgttttgttttgttttg

SEQ ID NO: 690049 - DNA, 606 bp, Homo sapiens
ctcactgttgggctgatcaatcccattcccactccattatgtgtgtatttctaagtggcagatttgccttaggaaatggaagaagggsatgaaatagtgaccaacacaaattactgggttggcgggagttgagagctggcaaaatcgtcttggagaaggaaatggtgcagatttcagagctggcagacagcatctacatccacctctgcaggaagcaagggaaacatttttcttctggagaatcgggcagcctgcagctgatccggtggtgtctgaaaccatcctgtgtgctgtagtgtcaacaacttagcctggttactttgccaccaaaccccaccaaatgcctttgtatctttttcagaactgcatctctgcagcataattgatattacaggaatgaaaagtgttctgaggcatattattcccagggtaaagagtcaccgctgattaattacctcaaggacaaggggacggtgactttttctcttgtatccagcagcgccacgcggggcgggcgggagaggcaaggctaagaggtggatgaaaggctagggttaaggcatttcacaatgtcaggcatcttgttagactgcggctttccaggcc

SEQ ID NO: 690050 - DNA, 1312 bp, Homo sapiens
aatcatgttgcaagtggatgaatctagccccaaacaactgggaggcaactactcctgcctgccgaggcctttttttttttttttttttttttttttgagactcactctgtcacccaggctggagtgcagtggcatgatcatggctcactgcagcctcccgggctcaagctttccacccacctcagcctcctgagttgctgggaccacaagtatgcaccaacatgcctggttaatttttgtggttttttttttttttttttttttcctgctgagatggggatttcaccatgttctccaggctggtttcaaactcctgagtccaggtgatccacccatcttggcctcccagagtgctgggattacaggtgtgagccactatgcccaataccccctatgtagacttttaaagaaatacaggaaacagccaagactggtgtsattcagatttagcttgggagagtctagtgggtgttaggttcccacaggatgaaggatcaccatgaacggtcaggacctgacttaggaggactcagaagctggagactgcagaggatggcacagagttccaaatctttggggtgtgtaagagtaggagaggcaggatgggagaggatgggagtgatgccacataaatcaactctgttgcagcctccggggccacatcagtagctgcaggaggaggagggaacagggagacagggagcctttcttcctttcctcacccccagttctgtgtttatacttctcatttagcccataccccactatattaaaagaagatgtataagtgtatgtgtttaatctaccattccttgtggcacagtgcatggtctgcatggcacagtgtgtggtctgtatggcacagtgcatggtccgcatggcacagcgcgtggtccgcgtggcacagcgcgtggtccgtgtggcacagcgcgtggtccgcgtggcacagcgcgtggtctgcgtggcacagtgcgtggtctgcatggcacagcacatggacatgattcatacatgcaagtgaatgagtgaatgggcgatttccagactatccagaaactgtgccccatagtcctacccgtaggaatccaacagggaactgtcaccaccgacccgaggcaggaaccatgtgctctgagccctggccattttgtgtagatggagataaattgtcattgctaattgccagagaccaggtcctggtggtagccaaactgttccctagggagttctcaccaaccttgcaaaatgagatggcagtcttcatcgtggatgcaattatgtttcattgttaaccatcacaagcaacgggaca

SEQ ID NO: 690051 - DNA, 1312 bp, Homo sapiens
aatcatgttgcaagtggatgaatctagccccaaacaactgggaggcaactactcctgcctgccgaggcctttttttttttttttttttttttttttgagactcactctgtcacccaggctggagtgcagtggcatgatcatggctcactgcagcctcccgggctcaagctttccacccacctcagcctcctgagttgctgggaccacaagtatgcaccaacatgcctggttaatttttgtggttttttttttttttttttttttcctgctgagatggggatttcaccatgttctccaggctggtttcaaactcctgagtccaggtgatccacccatcttggcctcccagagtgctgggattacaggtgtgagccactatgcccaataccccctatgtagacttttaaagaaatacaggaaacagccaagactggtgtcattcagatttagcttgggagagtctagtgggtgttaggttcccacaggatgaaggatcaccatgaacggtcaggacctgacttaggaggactcagaagctggagactgcagaggatggcacagagttccaaatctttggggtgtgtaagagtaggagaggcaggatgggagaggatgggagtgatgccacataaatcaactctgttgcagcctccggggccacatcagtagctgcaggaggaggagggaacagggagacagggagcctttcttcctttcctcacccccagttctgtgtttatacttctcatttagcccataccccactatattaaaagaagatgtataagtgtatgtgtttaatctaccattccttgtggcacagtgcrtggtctgcatggcacagtgtgtggtctgtatggcacagtgcatggtccgcatggcacagcgcgtggtccgcgtggcacagcgcgtggtccgtgtggcacagcgcgtggtccgcgtggcacagcgcgtggtctgcgtggcacagtgcgtggtctgcatggcacagcacatggacatgattcatacatgcaagtgaatgagtgaatgggcgatttccagactatccagaaactgtgccccatagtcctacccgtaggaatccaacagggaactgtcaccaccgacccgaggcaggaaccatgtgctctgagccctggccattttgtgtagatggagataaattgtcattgctaattgccagagaccaggtcctggtggtagccaaactgttccctagggagttctcaccaaccttgcaaaatgagatggcagtcttcatcgtggatgcaattatgtttcattgttaaccatcacaagcaacgggaca

SEQ ID NO: 690052 - DNA, 1312 bp, Homo sapiens
aatcatgttgcaagtggatgaatctagccccaaacaactgggaggcaactactcctgcctgccgaggcctttttttttttttttttttttttttttgagactcactctgtcacccaggctggagtgcagtggcatgatcatggctcactgcagcctcccgggctcaagctttccacccacctcagcctcctgagttgctgggaccacaagtatgcaccaacatgcctggttaatttttgtggttttttttttttttttttttttcctgctgagatggggatttcaccatgttctccaggctggtttcaaactcctgagtccaggtgatccacccatcttggcctcccagagtgctgggattacaggtgtgagccactatgcccaataccccctatgtagacttttaaagaaatacaggaaacagccaagactggtgtcattcagatttagcttgggagagtctagtgggtgttaggttcccacaggatgaaggatcaccatgaacggtcaggacctgacttaggaggactcagaagctggagactgcagaggatggcacagagttccaaatctttggggtgtgtaagagtaggagaggcaggatgggagaggatgggagtgatgccacataaatcaactctgttgcagcctccggggccacatcagtagctgcaggaggaggagggaacagggagacagggagcctttcttcctttcctcacccccagttctgtgtttatacttctcatttagcccataccccactatattaaaagaagatgtataagtgtatgtgtttaatctaccattccttgtggcacagtgcatggtctgcatggcacagtgtgtggtctgtatggcacagtgcatggtccgcatggcacagcgcrtggtccgcgtggcacagcgcgtggtccgtgtggcacagcgcgtggtccgcgtggcacagcgcgtggtctgcgtggcacagtgcgtggtctgcatggcacagcacatggacatgattcatacatgcaagtgaatgagtgaatgggcgatttccagactatccagaaactgtgccccatagtcctacccgtaggaatccaacagggaactgtcaccaccgacccgaggcaggaaccatgtgctctgagccctggccattttgtgtagatggagataaattgtcattgctaattgccagagaccaggtcctggtggtagccaaactgttccctagggagttctcaccaaccttgcaaaatgagatggcagtcttcatcgtggatgcaattatgtttcattgttaaccatcacaagcaacgggaca

SEQ ID NO: 690053 - DNA, 636 bp, Homo sapiens
gagctggtacgacaaagagcagggtttcgccgtgtcatgcaccatttgccgttgcactagggctcttttcaggagctgtgaagccattattataatgtgaaaaaggtggaaagaaatactcccttctggacactggaagggcaaatgaggtgcaagccttttttttttctttcttttcttcttcttcttcttctttttttttttttttttttgtttttcctcccagcctctctcctttcccattatgcacaatgcgctgagaaaggattcccagtccccctggtaaaaagtctgraggatgccgaggagttcactgtgcccttagataataacagtttgtcttggctctgatcactcctttttgtgacttagctggctgggaagtagcaaaagtatcttccaagctcagcttctctctgcttgcattctttccaaatacgtgattccaaagcccatgcccaatccttgcactgaagcttttagcaggaaaggtgaacagaggcatctggatgcatcgcggccagtctgccccttgcccaattccctcccctctcctgcctacaggtcatccctgagaagtgtgcctgtggactgcgttctttggggtaggacatggaatgggaagatgaaaagaaa

SEQ ID NO: 690054 - DNA, 636 bp, Homo sapiens
gagctggtacgacaaagagcagggtttcgccgtgtcatgcaccatttgccgttgcactagggctcttttcaggagctgtgaagccattattataatgtgaaaaaggtggaaagaaatactcccttctggacactggaagggcaaatgaggtgcaagccttttttttttctttcttttcttcttcttcttcttctttttttttttttttttttgtttttcctcccagcctctctcctttcccattatgcacaatgcgctgagaaaggattcccagtccccctggtaaaaagtctggaggatgccgaggagttcactgtgcccttagataataacagtttgtcttggctctgatcacycctttttgtgacttagctggctgggaagtagcaaaagtatcttccaagctcagcttctctctgcttgcattctttccaaatacgtgattccaaagcccatgcccaatccttgcactgaagcttttagcaggaaaggtgaacagaggcatctggatgcatcgcggccagtctgccccttgcccaattccctcccctctcctgcctacaggtcatccctgagaagtgtgcctgtggactgcgttctttggggtaggacatggaatgggaagatgaaaagaaa

SEQ ID NO: 690055 - DNA, 1706 bp, Homo sapiens
caacccaaataaacaagaactgcagtcagttggctattcctcagtctctctgtgcacagtgtttctacattttaacatttgtttagcaactaaaattatacatttgcttagaaaatgtggaaaactcagaagagccaaaaatgatggaattcagctacaaaaagagttggagatagacaaagaaatagtgacagagaaattgtaccaaattttatcataccagcacaggagagctgcaacctctcagatttttaatttttaattgtttgaaactaagcttggggttatattgtacatactgatgtgtagcctgctttcccttttaatttatcatgaccatttcctgtgtcattgttagggacagctatcctttcgttggcccaacaccttcctcattgattgcccattgttctatagcatttcaggggtgcagtgggctgtgactgtatgaggtgatccccctctactacagggcaagacattccctttgtcacacaaggtagaaattgagcctgaggggttgcagctctctcatgaatggtggtcctgtgacttggggctgtgggccttccctggaaggaagggaagcagagaaggatgatctatagcgtgagagcagagcgagtagacaaagctcatcagagaggcactggtgagaagcagggcgtgtgcctttctgggttccctctgcacccactgatcctggcttagatcaccttccattgggccagatgggtaagggagcccacaaacatggtgtgtgacgacaaggggagcaccaaggccttctctgcctttgggaggtcctttgtacattgcagcccttgctgccctgccttgggctgctgggcagtcyctctgatggtgtgtctctcctcacactctcttcatgactgtgagctctcaaaggtaaggattcattgcattttctgatttttttttccccggcacttttttcactaatttttttttcccaccactttagctcagtgcttgcaacacagtgggtccttgtgatgggcttaatggtgtcctttcccaattcatatgtggaagtcctaacacccgagtatctcagaatgtgactgcatttggagataggacctttgaaaaggtaattaaggtaagatgaggtcacatgggtgggtcccaatccagtaggactggtgtccttatgaggagaggagattaggacacagacacacacagaaggaagaccaggtgaagacacagggagaagacagccaactgcaagatgggattcagaagaaagcaaccctgctgccactcagccttggacttctagccttcagatttgggagaaaagaaacttctgttggttaggccacccagtgtgtggtacttgcaatggcagccctagcaaactcaaggaacgtgactaggagacggggtgggtggcagctgtcttctctcatcttctccttttaagccaaactagtggtctctgattagcttctatttcctggacaatgagacaggtccaagggcaggaaaaataacttcattcaatccattaatgcattcactcacatagcacccatttattgggcactattgggtctactgctgttccatgcactagttttacacatggggaatatttgatcaatgcctttacggggacttcttggttagtggtggaggcattgtgaagaaaataattacgtgtatgactgttacacaga

SEQ ID NO: 690056 - DNA, 1706 bp, Homo sapiens
caacccaaataaacaagaactgcagtcagttggctattcctcagtctctctgtgcacagtgtttctacattttaacatttgtttagcaactaaaattatacatttgcttagaaaatgtggaaaactcagaagagccaaaaatgatggaattcagctacaaaaagagttggagatagacaaagaaatagtgacagagaaattgtaccaaattttatcataccagcacaggagagctgcaacctctcagatttttaatttttaattgtttgaaactaagcttggggttatattgtacatactgatgtgtagcctgctttcccttttaatttatcatgaccatttcctgtgtcattgttagggacagctatcctttcgttggcccaacaccttcctcattgattgcccattgttctatagcatttcaggggtgcagtgggctgtgactgtatgaggtgatccccctctactacagggcaagacattccctttgtcacacaaggtagaaattgagcctgaggggttgcagctctctcatgaatggtggtcctgtgacttggggctgtgggccttccctggaaggaagggaagcagagaaggatgatctatagcgtgagagcagagcgagtagacaaagctcatcagagaggcactggtgagaagcagggcgtgtgcctttctgggttccctctgcacccactgatcctggcttagatcaccttccattgggccagatgggtaagggagcccacaaacatggtgtgtgacgacaaggggagcaccaaggccttctctgcctttgggaggtcctttgtacattgcagcccttgctgccctgccttgggctgctgggcagtccctctgatggtgtgtctctcctcacactctcttcatgactgtgagctctcaaaggtaaggattcattgcattttctgatttttttttccccggcacttttttcactaatttttttttcccaccactttagctcagtgcttgcaacacagtgggtccttgtgatgggcttaatggtgtcctttcccaattcatatgtggaagtcctaacacccgagtatctcagaatgtgactgcatttggagataggacctttgaaaaggtaattaaggtaagatgaggtcacatgggtgggtcccaatccagtaggactggtgtccttatgaggagaggagattaggacacagacacacacagaaggaagaccaggtgaagacacagggagaagacagccaactgcaagatgggattcagaagaaagcaaccctgctgccactcagccttggacttctagccttcagatttgggagaaaagaaacttctgttggttaggccacccagtgtgtggtacttgcaatggcagccctagcaaactcaaggaacgtgactaggagacggggtgggtggcagctgtcttctctcatcttctccttttaagccaaactagtggtctctgattagcttctatttcctggacaatgagacaggtccaagggcaggaaaaataacttcattcaatccattaatgcattcactcacatagcacccatttattgggcactattgggtctactgctgttccatgcactagttttacacatggggaatatttgatcaatgcctttacggggacttcttggttagtggtggaggcattgtgaagaaaataattaygtgtatgactgttacacaga

SEQ ID NO: 690057 - DNA, 999 bp, Homo sapiens
aatggttagcatgaggtgttctccacattgagttctcaccattctcctgtgccagattctccagatatttcgccctcatctgctcctcttttgacttctttatctctttgaagtactcgtacagttctgggggcagcttctccccagggttgcggggaggcagcagcagggtgttgtaggaatcatagcccttcagcttccgcaagatctgctcgaggggagaaagagaatcctgttggtctcactagaaatctccctgcagctctaagtgggtctgctcactgattttataaaactcctgctcctgcctgaggctgagacttgtacaaayactttctggatttcaaagagtggggccctttggagaggtgtcagaagtagggctgagctctgagcctgtggggatacatgatctttattttgctccatttcagcctgggcatttcacctgtggaaatatgttttcttcttgttttaaaactaatatacactcttttcctttcttccccatgacaaaatttcagaactccattatctaccttgagtgacaattcattcttaccaacaatattgtggttagcaattttacattaagcaagggtgtggtctcataaacagaggatccaggggaaaaaaagaggtaaaatagtattaagtacgtgtatgtgtgcacatgtgtgtgaatgtgtattagggctgccagataaaatacaagatgcctagttaaatttgagtttcagataaacaatgaataactttttagtataaatatgtccagtgtaatatttgagacatactaaaaaatatttgttatttatctgaaattcaaatttaactagacagcctgtatttttttctcctaaatctggcaatcctagtgtgtatgtgtatttataagacacagcaaaattaagttttaaaaagcatttacttcttctacaacctgatttattggtatcaaaaatctgttttgttaggtaacccttcttcaggatcccc

SEQ ID NO: 690058 - DNA, 999 bp, Homo sapiens
aatggttagcatgaggtgttctccacattgagttctcaccattctcctgtgccagattctccagatatttcgccctcatctgctcctcttttgacttctttatctctttgaagtactcgtacagttctgggggcagcttctccccagggttgcggggaggcagcagcagggtgttgtaggaatcatagcccttcagcttccgcaagatctgctcgaggggagaaagagaatcctgttggtctcactagaaatctccctgcagctctaagtgggtctgctcactgattttataaaactcctgctcctgcctgaggctgagacttgtacaaatactttctggatttcaaagagtggggccctttggagaggtgtcagaagtagggctgagctctgagcctgtggggatacatgatctttattttgctccatttcagcctgggcatttcacctgtggaaatatgttttcttcttgttttaaaactaatatacactcttttcctttcytccccatgacaaaatttcagaactccattatctaccttgagtgacaattcattcttaccaacaatattgtggttagcaattttacattaagcaagggtgtggtctcataaacagaggatccaggggaaaaaaagaggtaaaatagtattaagtacgtgtatgtgtgcacatgtgtgtgaatgtgtattagggctgccagataaaatacaagatgcctagttaaatttgagtttcagataaacaatgaataactttttagtataaatatgtccagtgtaatatttgagacatactaaaaaatatttgttatttatctgaaattcaaatttaactagacagcctgtatttttttctcctaaatctggcaatcctagtgtgtatgtgtatttataagacacagcaaaattaagttttaaaaagcatttacttcttctacaacctgatttattggtatcaaaaatctgttttgttaggtaacccttcttcaggatcccc

SEQ ID NO: 690059 - DNA, 1935 bp, Homo sapiens
caaacttggttacttaacacaacatagaaatgtattgtcttacacttccggggtcagaagtcctaacatctttccctgccacttattaagggataatcacagataagaatgataactcctccctcatagggctgttgtggagattaaataagcaatcatgtaaagtgccttccccagtgcctggcatgttcatacatgttaacaaacatgagattttaatgtaatagtagtatgacagtatgctaccttaggacatttcaaatgcagatgatttaggggagaagagcccacaatttaaccaggagaaatttcattccaaagataatggggaaaatgagaagtggtaattattttcaagtggatcattatggagaaataaactttctggaaaacgaggcagctggaggcttgatgactgctgagggatgcctggtcattgctccggacttttctcagcagggccacgttccttttttggctgttaggtagcccctttttcttgtcttttctggcttctagaggccttctgcactccttggctcctggccccttccttgcagccctctgacccctgctcctactatcacatcatcaccatctctgactgactctcctgcatccctcgaaaggacccttataattagactgggccccccaaaataatctgcccacctcaagatccttaaatttaatcacatctgcagagtccctctgctatggaagacaacacagtcacaggttctgagtaatctgatatgggcatctttgggggccactgttcagccacctgcagacagagcccaaatgtggaagtgcatggatgaagggacccccccacccctgcaaycagggatgaggcagaccaggcgccgtaccagctgccccacactaagaccctactccgcctgcttaggctgctagcgagactgagaaggacttttcctcaccttcccgtctctgttcccctcacagaacgcaagcacaagggagctcttgagaaagagaaggagcgtctccaaaacatggatgaggaagaatatgatgccctgactgaggaggagaaactcacattcgatcgggggattcagcaggcgctccgcgagcggaagaagaggtcagggccaagggctggccagagcagaagccattcccccgggaccgtccccacagagtgaccaggaccggggtgtgagcccaagccatcttccaggcaggcagcaggagctgcagaaggccctggaaggtgacctgcaaggagcaaaaagatgcatcccgcccatcaagggtgctggctgctgcaccattcagggtttctcccactctccttatttctcactggcgggcatttgggaccaggctgtaatgtcatgggtggtcctggaagaaggggccactggcctctgtgctgccctggggcccctgctggccccccctgaccagcacccccgcgtgtggcttatcagcctctgtgctcactgcctcggtgcttcaatgtccacagctggtgatccagggtccactctattgacctgggcatagtgactgctccccaaatctcagcccttcctccccctgcctgggtccccttcttggccttgggcggtgctgcccatcccctgaggtctagctgccatgggatcctcagcctgggcagatcctcaatcctgggactgtgggcagactcacaagccagcaccctcagccactttctctgcccctccctgggaaccacacagaaactactcgatccccccatgcctcctagtgcccaggatacttaggactgccacctcgggctatctcagagggatgggaacagtgggacatgtgtcctttctgccctcagatcttcaaagattgcagggatggggtggggggcagtggttctatttcctacctcctccctgggatttcaggcgctggaggtacagagcc

SEQ ID NO: 690060 - DNA, 1343 bp, Homo sapiens
gtctcatggctcagagaatggttccagtaggaggtgaaatttgatctgtgctttgagacagatgcagctttgtactgtattcccattaactcagcaccaaatatggtctggatatttacatgaatttttctctaaagcttcacagtaacctactgtaggtaccatgtgtaagtaaagttgaagaagtttaacttaagaagattttttttaaaacttaggtgttttatttttgattttggtgtggaagagttgtgagagctggagaaagtcagcagatttccttggtatatcatttttgactgggattgaaaatgcaaatatttgttttctgagaaaagcattgcataataataccagcttttaagattctaatcatttggagtcatagagaatatcaaactcatatttgccaagacctctaaatgtctgccttgtatttatttttccttcattgggcagaaagtctggattattttgtggatgaaaataaaagaaaaaataatatacccatagtgacttgaatgaagttacccactaagatggcttgacttatgtgagtggagtttatctggaaacaaacaaaatcaaaccacttatagcctctttggagttaagatgtggctataatccttttatctcatattttacctcacatgtttctatctacaggaaacaatcccatattcagaattattcttgtgtgcaagtaaattcatctgttgtctgtataagtcaaaataaggaataactgaaatgggctcagtagaatcattaattcaatttaggtaagttcaaaacatgaaacttcatagcttttacctatagagtttgcagtagatacacacaacatagaaaatggcataaaataaattaaaataacataatatacaaaattatatatacaatatgatcacaatttcctacaaggcatactacgaattgaaatctttctacacccatacagcttatcgtctatattaacgtggctttacaattccagaaagctcttgcccagaagaaaaatgtcttgtgttgttgttgttatttttaagacagggttgacyggaggctcaacatcttgggctcagacaatcttcccacctcagcctctcaagtagctgggactacaggcacctgccatcccacccagctagtttttgtatttctttgtagagtcagggtatattagtccgttttcatgctgctgataaagatatacttgagactgggtaatttataaagaaaaagaggtttaatggactcacagttccacatggctggagaggcctcacaaccatggtggaaggcaaaggcacatcttacatggcggcaggaaagagaga

SEQ ID NO: 690061 - DNA, 622 bp, Homo sapiens
tcctaagtccaatggtttgtgtccttataagacgaggagaagacacagaggagaacgtcatgtgaagacagaggcaggggctggagtgatgcagctgcaaaccaaggagcaccaaggatggccagccacccgctgaagccgtgggacaggcaaggaaccgattctcycccagagcctttggaggcactgtggccctgccaacacccgatttcagactttcaagcccctagaactgtgggaaagtatgtttctgctggtttaagccatctagtttgcggtagattttttttacaaaagccctagataactcattcatttgctggacactgactgggggactgccacataaaagcctgcctgtggagtgcagccaccagattctgtgttaggaaactggtgctgatctcacctgccctgtaaagtagatgttattgacagttatcggtcgggcgcggtgactcacgcctgtaatcccagcatttgagaggccgaggcaggcagatcacgaggtcaggagatcgagaccatcctggctaacacggtgaaaccctgtctctaccaaaaatacaaaaaaaaaaaagaaattagccatgcatggtggcgggcgcctatagtcccagct

SEQ ID NO: 690062 - DNA, 613 bp, Homo sapiens
ggaattccatgtaaagaacattttaaaaatatttcaatgatgtcctgattagcctcatccaagtaaccaaaacaattctttatactcgcactcccttccacccaccctcctccctccactagccacgggctgggagaaaatatttgcaacacacatatcagatatagaatatgtatctagaatcaaaaacaaaacaaaacccaaaacactccttataattccaccatgaaaagataaacaatccaatttacaaatagacaacagataccttagtaaaaataatcacactcagaacctatttctatgtttcttttaacattctccaataaaagaactgtggctcctgagacaaatggctgstctcagggctggggcaagggctatactagatgagcctggcttatcttgtagtttcagaatgtgaggaagggctcgagaaaacacaatgatggggatatatcagatggatacaggaactaagtaaagaatctcccaatggccaaagctgaaacaatgtgagcaacaaaatcaataatgaaatattgatttataatccatccaaagtggaaaataaatactgaatgcatactctccataggatataaaaaatcat

SEQ ID NO: 690063 - DNA, 1785 bp, Homo sapiens
gttggttaggatgggctgagagaagtgcaggctcccttctccctctcagggtgacagtgtgtgagccatgcaattttgaaaactagagcttttgaggccatactcttccccttctctcaccacagtttctatatggccaagcactacctgataggagctctaagaggatcagttggcaakgtcaaaaggatatgcattgagcccttgtttgcaattaggagcttggttgtggtaactggatacctttttgggagtggaaattataggtaacatatatcattaccaccatcatcttaatagctactatgggttccacacaagcacggcctcattcaatttatatagtcatcctgtaaggtggtggtattatccaattttataaatgagaaaactgaagaagcagttgcttagccacataggtttccaataaagagttactgagtgaaagaatgaataaatgaagaaagtagcttgccaaagatcatacagcaagtaagacagagtgggaaaagttgcagcagatagactttttctttagtaacggatctcttccatatgtgccttccatgcatctgcagcatttcttgaatgtcagtgtttcccatttacatggtttggctctgtgtccccgcccaaatctcatgttgaattgtaatccttaatattgggtcagggacctggtgggagctgattggatcatggaggcagtttccctccttgctattctcgtgatagtgggtgtgttctcatgaaatctggttatttaaaagtgtgtagcacttcctgcttcgctctttctctcctgctccatcacagtaagatgtgtttacttccacttctgccatgattgcaagttgcctgaggcctcccagccatgcttcctgtacagcctgcagaactgtgagtcaattaaacctcttttcataaattactcagtctcagatcgttctttatagcagtgtgagaacagactaatacacctgtgaatccatctcctcaaccttagcacctccctaggccaatgccttcctaaaggaggtattgtagcttatatacaaaactgtcagtattgtttgttaattaatttattggtaacttagtcattaattcagcaatactaggtctgtgctaagcaaaggcgagggacccagagttaaataatatacagtgtctgtttttgaatgaaccccatcctctgggaagacagacgtatcaacaggcaagaaaacagtgataaattccatgacagctcagtgcacagtagagtgaccaaccatcctggttttcctgggacagtcccaatattagcactgaaactcccacatcccggaaaactcttgggcaaaccagcatgggtttacctacctgccacacagagtaaaatcagaatttgttcagaaaagattgactcgaatgtaagaaaataataaaaacacaactaacaggcgtactttgcagtttacgaagccttttcttttccatcaactcatttttaaagttcgccacaatcctagtgttagacttttgtagtgtcttgtgataactgaggatcaaaattgtgaataaatgccatgtttgctttacctaggaagaaaaagaaaatcattaaataaaaagatggcagcaggcgtgcgtgtttggggcagtgggatggcctcccaactccaggagcaggagggagacaaggggggcagcagtgtgtcctctcctggaccaactgatccatgaggtatgataagaaggcatgggctccacattcacacaccaacacgtcccaccaagacc

SEQ ID NO: 690064 - DNA, 1547 bp, Homo sapiens
caaagctcagtcagctactcaccagatctgtttcatcttttttttttttggacacacatctaggatacattttaaaaacgcttatgtggttagatgtggccatgtgactgaattctagccaatgggatrtgaacagtcacaatgtgctccactcccaggcctggcccataacagccacccatgtgcagaccctcatggtctttacttttatcagttcaatgtagacagccatgataaccttggaagccatgtgctgaggttgcaagaagcctggattcctaaacagatgcttgaaaggaaaactacccactgaccaggaaccctcattttggactttacgtaagagaaaaatatgcttctcttgcattaagccattgagatatttgggagtttatatgttacagcagccagcattaccctaatggaaacttagaatttctagaagatttggggaagcatgtttagatactacagagtcagacacgaatgcagccaaaaacagacccagtcataccatgggataattctaaaggaaatcttattgccctatctcatgctctttcggcacaatgagagctgaccaagaagctccaccatccttgctctggaagatccaaactcccctgccaacaagcttggcacgagctctaccctgcctgactgccgccaggtgttcgcttccacctgccaactcttgcatggtggacccaggttgcagacagaactttagctacgaggaagtctgggaaacacacttcatagcttccctgccttggtgatacaggaaggcatgtcagagaggactgaatgaaccagtctgcagaatctgccctaatggtaaggttagaccagaagaagtggaattaattgggtgattgaatagttttcagcttcaagttatgtattcatcccacaacaacctgacagggggtcagctgctttgggcccactactcctaactgttcaaggcatcctgattcctgtgttttccagggttgaaagctgacaagccttcttttgattttgtcaatatttttattcctctttcctggactttgaaacactctctatttttaagccactgtacaccctgatgtttatgtgatttatgtggttaaactcttaggaaaggagcaattgctttcattgaccttattccaggatcttactagacctcttgaatttttctcatgaacccctctagaaagaacatgcttggagaagtggtggccccacctattctcaccttcaaaggagcttcagagccaaagctttctcggtaagggaatgcagcaatcactttgctttacactgaggcagcatgattgagagcctgggttctgaggccagattgctcgggttcaaaatctgcctctgctattttccaaatacatgaagtagagtaattattcaatctttatgggtttcagctttctctgtaaaatgtggttagtggtaatgcccccttatggagtcatgatggagagtaaatgagttaattcacatggtggtcttagaacagagcctggcacaaaggaagtgacccg

SEQ ID NO: 690065 - DNA, 2667 bp, Homo sapiens
  misc_feature 702, 703, 704, 705, 706, 707, 708, 709, 710, 711, 712, 713,714, 715, 716, 717, 718, 719, 720, 721, 722, 723, 724, 725,726, 727, 728, 729, 730, 731, 732, 733, 734, 735, 736, 737,738, 739, 740, 741, 742, 743, 744, 745, 746, 747, 748: n = A,T,C or G
  misc_feature 749, 750, 751, 752, 753, 754, 755, 756, 757, 758, 759, 760,761, 762, 763, 764, 765, 766, 767, 768, 769, 770, 771, 772,773, 774, 775, 776, 777, 778, 779, 780, 781, 782, 783, 784,785, 786, 787, 788, 789, 790, 791, 792, 793, 794, 795: n = A,T,C or G
  misc_feature 796, 797, 798, 799, 800, 801: n = A,T,C or G
gactgtggcctgtaagctcgtacatcctctagtgaatactcttctgttcttcccatgacaccctcatgcaaggttctcaaaactccttcagagttagcattcaaaggcagatacagaacaaattggtggctgttctcttccttgaagagtctctgtttttcagtgggcccagcttttgcaaaggttagggtcacaggcctcacaagcagcagctgactgtctcaagccgttggccgtcagagcctctggctcaccctctgaggtgggggtgtgtggtctgaggatgactctcctcctctgctatgcagaacccacctgctaacgtcacccatctggggagggcaggcacaccaccagccactgaggatcatgacctagattaggacttcagaggtcaaagtcctctttatagtttgcaactgcattgtcataaagatgtatgtaatctttgaccctaagagtttgtgcttttttggctgttctcattttgaaagaaatttaaacatttttgcaggactctaagagggctgtaggaacccaaaacactgtgctcactgtgattactgataggagaattcaccttgcaagccctgacaaatcaacttctccgggaatctgatttcttaccacagagcagagaaacaattagagagtttaccatttagaaccaaaatccaattcattctttcttacttaccaaannnnnnnnnnnnnnnnnnnnnnnnnnnnnnnnnnnnnnnnnnnnnnnnnnnnnnnnnnnnnnnnnnnnnnnnnnnnnnnnnnnnnnnnnnnnnnnnnnnntaccatggatttatatggatacattctaagaaaacttaattcacttgtcttgtattcctagtcaagtcaaaagttaacaatccctaaaataaaaggatgttccaccttactactttcttcctcttttaaaatgaagcaaaacacatctttaagtagagtgagtggcagtttaaatttatcctcatccaatgcctttcctgaatatgcttgtatcaggactttgacacacacaggacctgcagacctaacacttgctgatgatcggcccacattgccacagtgagtgcctggtcacgtgcatggcatcctttaggcagacaccaactcctcattgtcccaaatagcagagtttccttccttttcatggctgcataatattcccttgcatgtgtgtgtgtatatgtgtgtgtataatatatttaccgtattttcagtatccattatctgtggatggacaccatttctttatctcatttactgtgaataccactttactgtttacttgaaatttggtaagacagmagattttatgtgtcctcatcatcacacacataggaagagtgcatacaaatcatcacattgtacaccctgaatatatacaattttcatcaattagatatcttacaataaaaagtttaataattaaataaaaaacatttcctgcattgtaatgtctctgggaccagcacagagcatggcttagggagaagctcatgtaaaacacttatggattgaaacagaattcatcaggtgcaacataaaactggtgaagagataaacaagtaatgctttccattttctgctctcacttggaaaacactagtgagagggccagacaatgacatgaaatataggaactgccctggtggaaaaggggcctcaaataatcattcatttatcatccattccatttaccattttatccattccattgccatttcataataggaaattctgtagaaacagaaagtaattactgggtgcttagggctgggggagaaaaatgttgagggagaatgaggtttccactcatgaggaaacccaggtttcagacctttcagctgtgtggtgggttcaacttccctattataaatttcatgttttggatcatctctaatgcatctgtgctttctgggagacagtatccgtccctgctggcagccaatgagctctgtggcctcacccttcctttggtctgacaatggaggagacagatgcctgctcaaaacagaatggccatgaagatacagctctgctgggaggttgggctgaccatttctcagtaggcagaacttggctcaattccttccctctcagatatcactaacaatgctccacaatatcttcaacagagaagtgtaggggaagaaagactctcatcattgaatttttttaaagtaattactgtggactaattatacaattgtttagtgccttagtttttccctcctcagcatgtgtggatttatattggtgctaattgcatccaggtgttctaaacaccacagttaagcacaggcaaagagaaactagaaacacttcaaaatctgaaggtatattggggcagaattcattgaacattttctattgttgttggcttaaatggctctgtcttcagacttgagtgttttttaatgttaataactgaaaaatgttttctttttccaatgtaatcttgaaatttctaaaaattgggttattatcttgcagttcttgataaagaatagagtcagaaaaacataaactaagtgatatggtttggctctgtgtccccacccaaatatcatcttgaactgtactctcataattcctacatgttgtaggaggggcctgatgggagataatttgaatcatgggaggtttccc

SEQ ID NO: 690066 - DNA, 1277 bp, Homo sapiens
ttttgcaggagaacagataaataaacaagatgaagctgatgagtcaacaagaggtagaaatcaggtgtacaagtggattaattctaaatatcctgtaatggttaccagatagtttaggctctgattctctacagccttttattttctcctccactacagagtatactctgtgtggcagtgaccaagaggcatgagatgagatgacaattacgacatggtcagctgatttcagggcaggtctcccaaggtacccagccttggagggaggccagagcccagggtcttatcctcagctctgtaggtgcagaaattgatttctgtgcatgtagttagtgttgaagggcatccattcacagcaacaactacacaacattcacaagggtctgacgtgtagacaataaagccaagttattaactgaaaatgggaactaaactggccaataaatgaccatgtttgttagcgggagttgcgggtagacacattttctccatgacgtaggtgctaaaggaaaatcaatagaaatggtaaaattatttcatgtgcataatatgagaaaattaggaaataaaatgttattcgaatgaccagtgtgatcaacctaaaaatttaatgcattaatgcattaatatttccctttctctctctgtctctctgtctctttctctctctcctcataatataaggtatatgtatatacataatttttgttcatcaggttgcttgctccattggaaataccagggatatgataagcttcaaatcctcactttttggaatcccacacaaataattcaattttagcatttattaatgacattttgttggttatatttgtctttcatatttagtccaaaatgtactaagaattctactttgacttgaaaaatattccctcatttaggagaactgtgctgagaactaacctctacatggatttcgctaattcagctctcaagggacaattttttttgtagtcttaacaagtattggcatcatgaaccaatgacttttttcttaagtaaatgtgtgtgtgtgtgtctatgcccttatatcttataatcacacatattcatataattttcagcacaaaatatgaatctgatttaccactgctcataatcaatttgttatcaggytttaaatttcaatttgattttgaaaaaagaaagggaaattccattccttggacataaaatatgattaataagtgctcagcttaagtttcacttaagtttaaaaatgtacaacttgaattaagaaaactcttattccccaa

SEQ ID NO: 690067 - DNA, 3850 bp, Homo sapiens
aagtccagctactaactcaagtttatagaaagaatttagtttaattatcaattcccaggaagaaataagagtagaaatggaagatgtatgagccactctaccaatgaatgtggatttgttaatgccttcatttttaataggattcttttgttgcccaaaagaacatgtctgtggattcttgggatttcttagaaacagattttgcccatgacattaaaatggtagaatgaagttttataatgtttattttgtttgccaataattaatgtgtcatgtggtgcttcttgcatgctttttattttctttttgttcttagaagttttctaggaatcccttttaggaaactctatagatttaatgtttagccttgagttattacttagtacaatgtcttttcaaatagtacagataaaatgacatgtttaaattatttttaaaaatctacctacccttattgagttaaaagatacacattgtgcttcctctttgttttacaaaggccatcaagtgccttagaaaatgccagtactgaaagttctatgcactccaaggttgcagagaaaggcagagaacctgcaatatgcctagaggatgtcctgcatcctctacagccagcgttccctgcttccgtaggaaagcagaatagcacgttgcttacatcttgcatgatatggcaattaccatgaggcagaagagcagaactgtcccaaaggtaacttaatcaatggatactttagatgagcttccaatcttcctattgtaaaaagcttattgaaaggacaatacgaaaattgcaagacttcctatgttggtgtctctatacttgtcagagtgtttcagtggtttcattttattcaatttatgttcattaactaaagcacacagcatttttgtcaccaatatggaaaatctttggagagaagtaaatgcattaaacccttgctacttcttttattatatattcttctaaaactgctgagctagtaggatctatacgcacaaagcagtgtgttaaaaatggcctcagttaaaagcaggtagaaggcaacagcaagaattatgtagcattctacagacaaattgtgtgatttgaagaggaagtgtgaaaatttgctctttttttttttttttttttagagaaaatacccaacagatgctttgagatttttaaaaccttttcagttgcacaggaagagagttgctgcagaaaggttgaatttatagagcaacatcctaatgtggacaactttgtggtcagacccagattagtggtgcagggtaccaaggtttgtactaaggatgtaaaatgctgattttataggcagatgcattgcaggatgtaataaaatgtgggtatatacttattctgatgaatggttccagaagcaatacttaaactgggtgtctgaagtattgtttaatcaaggaaatattgtaatagaacaacagttgtacccagggtctttaattcttcaaatatggtggctatcctacctccacctgtggtccattcccgcttgtactgatggcggctgatgtgtgaccttggccccccccgagtcatccagcagcagctaacaattctatcccatttcccattctttcctcagatacccgagtatgtcctgtcaaagagctgccttctctagggcaaagaatttaggtcctgagctctctctgggcttcagcatagatggcatgaaagtgggtaacttcttactcttgagtataattcctacataaagtaatgtgcttgtatttacagctgatatttcctcatagtgctggaaaatttggtaaactttacaaggataggctgtatgctatgctaacaacatttcagtgtacagtcatcccctggtatcacagggattggccccaggtcccctgcggatattaaaatctgtaaatgctcaagttccttatataaaatggcatagtattttcacataacctacacacatcctcctgtatactttaaataattcttaaattatgtgtaatacttaatacagtattaaagtattaatacttaataatttctcctcccttccttccatccttccttccttcttcatttcttctttctttctttctttccttctttctctttccttttttctttctttctctttatttttttctctttctttcttctttctctctctctgtcttcctttttttatctttctttcttctcttttccttttctttctccatttctcccttattttcttctctagttttccaggaagtaagatcaactatacatacctttaatcacaaattagaaactgtggagtgataattatatagttgacttcttttgatggagaacaaatatacttccccagagttctgactatccttctcacactgttcccgggcaattgaaattgagaaatgggtctttatcagtgactcttgactcatgctcaagagctttagaattttaaatctgttgtaaccccatctttatctgaaggtttggctggaaagtgcacacacagagtgtatatagagagtgtatagagtgtgtattacctactgcctttattctgctgcttttctactaaagaagtttcctgtttgcttttggttcaaaaccaaaagcccccatcttaacatccaagttatcattaaacacacctgacaacaatccaatgttctcttttactcctcatcccctcccctccacatttagttctaaataaacagcttttattctattaggcatctttcaaatccccaagctccagtcttgtcctatctcctacttctaaaatccattttggatggctctaaactcttctccccctgtcaaatcaaatcctgcaggtctttttaagtccaagatgaacattctggacatagaagtaaactattaaattaactctgttttggaagcctctttcccttgctctgaggtcttgcagcatggaagtatctcctctacaccacctttgcttttcttcattttcatattggccccttaattggtaattagcatttttgtttgtgtatgtcatctcttcagaaaaggatagtatcattgacttatttgtaatctcttatagcacattgaatgattctctggtacaccaagagttcataacagtcttactgaattgacgtttattgtacaatgaaaaaatattgtctggtgaatgacattttattaaactattatgattcccccaatgtaagatttttctactgaatttttagtgctaatctaaaaatgagcaaaataatgaagatgatttctaagaagtgcagttttgaggaaaccatctagtattaatacagatatattcctctcccctgtgctacttatactcagtggagagaatcaaagtccagaaggtgatgcgaaatccttatccaaatatgtttactcagtagcgttgataaaaaagaaattaatgcatttaatagaaatgtttatgactgagacaaatgacttttcattttaaatctctggtatcttaatcattatttttgtccaaacatctacatattgatggatagtttaagtcaaagagatttcactggatataaaattttaaaacatcaaaataacacttaatttatatttttagatgttagcacaagcaaattcccagctgcttgagaaaatcttcaagtaactaatttaaaaatagtatcatagaaccaygctttttttgcactatttgtgcacaaaggccaaaattttaatttcctatagatcacagactgatacttttgtaaaatacaaaactatgtttatggatgccatagcaatgttaaattactataaaaccttccatgtggttgctgtcactttctgcacttatgtaatggagca

SEQ ID NO: 690068 - DNA, 661 bp, Homo sapiens
tttttatccaaaaatgtctccctttctcaaccactaggaaattctgttgcctttttttcacttctgctggagttgcccagaagggcaccagaaagcaagactgaaagccgtcagtggcaagaacaaacacaatttttgagttttcacagtggtaagatatttattgtaaagatcagcaatgtctgccttcatatttccatactctgatcttttgcacagcttaatattttaaatgatgtccataggactaaatgttctgaggacatgttgataagtaatattttaccagatatgtaagcatccaratttacaaattagatgttagtgagcttcttgtccctttataaaaggatttcttggtttaaaagagatctgtattcactcctctaaatagaagtatatataaaaggtacatataaatcattaccaaacctaatttacttgttctatgttctatgagtctgggtaactgaaaactttattaattgttgcatttgcccactaaaagcaatacaaaggagagaaaaaagcagtccccaaattatactgcatttatgaaaatactatgattagaatcacagaaattcacacagacatgcagtactataacttcaggtaaaatgacaaattgttgattttaccaaatatttagctggaagaa

SEQ ID NO: 690069 - DNA, 939 bp, Homo sapiens
taaataattggagatactgggatttgatctgccctcttaaccctgaccctatatgatttgtttctccaattataaaatagggaaaatgaacccatttcctagggttcttgaagacaaagataaaataagtaaagagagatttacaaagataaaatgaataaagaaagatttcactgtagaacatggactcaggcgctttgaggtttctttaactctttatttctgggtggtgtcattaagcataacgctttgttctcttctccccctgcctcagtcttcatgagctgtactttgaccatgtcactgctctggctctggccaggtgttccccctcacaccctgaggttgtgaaattcccctggggagagggttgcatctctgatagttggagctcctcttggcagggagcggtgcagagaaacctgcagggtcttctggaaagaggaagagcaagcagtcaggtcagaaattcaattttggtggaactggctggctgacacaggattgtatcacctgggatgcttcgagctgcaagaygtgcaatccaagttcagaaaagctcaagcatgaggggctgtgagatctcctaggatgagaagtgtggaggagtgtggctgcagagaacttagctgagcagctcagtactgtcagcagagatcgagctgccttctgtctttatgctctgtcctgctcaactcattggctggtgccctcggatttgtctcctcatgatgaagaaatggctgctgtggtgccagacatcaccccccgacacatcagtgtccaaagaccaggagagagaagctccctgacacaggcctgtctttaggggaaagatacctctcctaaatgtccccatgttccctcccttgtatctcactgtgttgacaacggcatcccttgaacatcctgcaccaatctcaggccaacatacggagc

SEQ ID NO: 690070 - DNA, 939 bp, Homo sapiens
taaataattggagatactgggatttgatctgccctcttaaccctgaccctatatgatttgtttctccaattataaaatagggaaaatgaacccatttcctagggttcttgaagacaaagataaaataagtaaagagagatttacaaagataaaatgaataaagaaagatttcactgtagaacatggactcaggcgctttgaggtttctttaactctttatttctgggtggtgtcattaagcataacgctttgttctcttctccccctgcctcagtcttcatgagctgtactttgaccatgtcactgctctggctctggccaggtgttccccctcacaccctgaggttgtgaaattcccctggggagagggttgcatctctgatagttggagctcctcttggcagggagcggtgcagagaaacctgcagggtcttctggaaagaggaagagcaagcagtcaggtcagaaattcaattttggtggaactggctggctgacacaggattgtatcacctgggatgcttcgagctgcaagacgtgcaatccaagttcrgaaaagctcaagcatgaggggctgtgagatctcctaggatgagaagtgtggaggagtgtggctgcagagaacttagctgagcagctcagtactgtcagcagagatcgagctgccttctgtctttatgctctgtcctgctcaactcattggctggtgccctcggatttgtctcctcatgatgaagaaatggctgctgtggtgccagacatcaccccccgacacatcagtgtccaaagaccaggagagagaagctccctgacacaggcctgtctttaggggaaagatacctctcctaaatgtccccatgttccctcccttgtatctcactgtgttgacaacggcatcccttgaacatcctgcaccaatctcaggccaacatacggagc

SEQ ID NO: 690071 - DNA, 3417 bp, Homo sapiens
ttctgtagatgagcggggacccagccacactggcaaagagtaagtattctgggatcatctctttttttaggttcaaaatgttagtgttgcaaagatggcactgctttgcctgcttttgctcaagagccactctggcttgagctttctgccagaaatgagatttgtgaagtttggtttaaaaaaatactgagagtccagtaaacaactctaaccacggtactgtcatccctggaagcaacagtgtcacgtaaggtggggtggtacatcagggttgggagggacagaggagagagtctatatggaatgattgtggatgtctttgggagtgtgtgtgcatttccccagaaaacatactcccatgttcaaagcacaacacgaggatcaatgtgcaagaaaaattccatcacaacggcacagtttgcatggatcaacccattcatcctccaccacagctgtacctgaagataagtttaatatccccagtcctcagatggacatggtgcagagtcgaatttcccaagctcttggtcctttaaatggaagaggtacgtgtgacctcgggaatgagtggaaggttaatgtcatggactactacactgaatttgtcacaaagccctagtataatttcttgctaggccaagttattccagcacttctgtgtgcatgtggaagaatgaaaatctattcagatcccaaacactatcattattggatgatctcaacggtcagctaacccagggtttgtttgagttggtacattgcccagtgggatttagtgtgatcactaatgtaaaacacacaaagtcctcaggcttttggtctacagtggtgaagtcattcctcagctcttgttcaaaagcagacaataatcaatggcatattctgttgtatttagtgagataatcaccacaagtcttagaaattcagtggaaccctatccaaagacatagcatccaataaaatctccaggatcaacttgggtgttagcctgggacccattttccctgctggaatctcccacacagctcggctggagacggtcagtgtctgcaccccgtccccctcgctgctccctatgacagactgtctctgtgctggagtcactgtaagcatgaggagcagtgaactccatggtgcacacacattgtgttgaaaaggaagagtggaagaacaaatgtcatgtgctaagttggagtcatctttaaatggtaggataattgagtattttcaaatcttggtttaattgccttataacaaaaaattttttaatgaaatcttttggcaataactaaatctcctattttaagaaaagttgcttcttattcagtgcaaaatcttctagagtgatgacatacagagcagcagtacctgtggattgattgtgaggaggaaatgagtttggtagggatcaataagagggcaagttagctcaggtcagattaggatggaggagccctaagaggctgccagggacacacagccggcactgcaggaagggccctgtttgagattggctatttcatgtttacgagttggtctggagctagaaagccaagggccctgattccctttcttccctgcatctctcctgtgcctgctatcctcctcccacacccacctcaagcaatgttactgaattgttcatgagcaccaccagcaaggtgctgatggtcactctgtatcctcctagttctgatgaaggatctactacaggagctgtccagttacaacggagaggaggaggacccagaggatgtgaagrtcaggccacctggatttgtctgagaaaaactgttgctttcttagctttatcttatttggattaaattaagatatgagaatctggcaatatatatcttagattagttacgcaatgtccttggggagaattgtaagtgagagtctgtcccccctgaggcttgatttaagacagtgggagaaaatgaaagaatcagtcacacattgtgcggcagtgagccttaccaattttgttttctctttggagcaaaatcacttacttgccaaccaacacggacttgagaggaaacatcctccgagaaaaatttgtgtctttaatatgagtcgatttgctctgttcttcttttgggttcctttcaacactggtttccgtcttgttttctaatgtcactaagtgaacaaagttttgtgcacacaggacacagcatggtctgatgctcatagcaatttattttctgtcattacagaaatcctcaggagttatacaaaagggtatgtattggggaacccctctcatactgatgagtaatccagatgatgagcaatgtgccactgtctctctggccttcctgtagacaggcagcctgagtggagcttcccctcatgaatgagggcataggctgtgatgggagaaattgttgttccagataaagcatgatggtcacattctgcagtccctgggaacaactgtggtctctgaagttaggtgaggttgtgcgcattgagttgctgcgtgtctttttgaattaatgtggtgagtgtccaaaatacgtaatgtcaaggtcatgtacaggctcagcctctatcatgcagcctagttctggtttccgtcttctatgctcaggaaacacagcaacatgaaaagataaccaaaaggcttgccctagggtgttactggcagggcaagcacttgccttcctaggaggatagagggtgactcatgcattatgaggtggggaaagacaaatgaggctgttttgcagcagaggctccatgatgttcccattgagcccactgttgacagaagtttttgtttgcttctgaaggcctttgcaaaaaacaagtcaaggtggttggctgaaggttatatgaaaataaaattagccaaattctggattgagtttcttttgggagcttgcgtttggtggaaatatattgtatatgaattgaatttgattgctctgtaggtgtcaatacttatcctatattttaaaacaatgaggctggtgtgattttaaaatgcccctcgttaacctcataaactatctcctcatagcccatttcctccagtcatctttaatctctaaaatatagttttttttttgtggtatttggggccctctgctgtgtgtgattaaaggcacaaatcagcgttaccagcattgaggctctaagaattcacagagtgctgtccagtgggttctatgagagagacagtaggctacagccttggcctgggcctgaaaaggaacacgatttggaagagcagaaggaaggcatgagggcaacaaagccacagggggaagccaaggtgcaacatcagcagagacagttctgcatcatcacctgggcatggccgggatgttcatattacaactgacggagaatgggtcaagctccaacttcatagctggttttagcactgttggcctgtcttcc

SEQ ID NO: 690072 - DNA, 1225 bp, Homo sapiens
cgtgctgccctgaactcgaggcagctgcatcattgctgcttgtcattcttctgtcagctcaccacacgagcccagcgttggtgcatctcagtgttggcatcagctgaatctcttttttctttcaagttgtgattttcttggttcttggtgcaatggagcttttaygtggtgtattggctgcttttcatggtgtcagctgactctgggtcctggttaacttgtttggtgtagcaggagaccctctgccttggctgggtgcagctcctggcctgctctgtggaccgtgactctgtgtctggaagcctcacactgatgctttgctctccttcgttttcctcctgccaccggggcttccacacgtcaggcctgagagggcctctggagcctgcaggcccatgggacatgatcaaacataccatgttgtcacaagccccgagctattgtctaagaaaggggaaggccttggccatggacacaccctcagcccatctccacggagcagtcactcacacgtgtatctcaagcctggtcactgtcaaggcatcagaccctcctgtaaccagaagcagttcttactcttgccagagacagcagccttgccattgatgtgaactaattttcattaagtatttagttataagaaatcatatttatggaagttactatgaaaatcacacaatccattcacccaagccctgtcagcctcactatgtatctgtaacctatctgtatttctgctttgtacacaaatttaagagtaaggagcaaggcaaaagaactcatcctacaaaatcctgaaactttataatagtattttattgtaataatggaaagctcacatttatcactcaatttataatatactgtaagcatattatttcctgacacctccctaaaacttatggggtcattatcataatcacaattttatcaaaaagaaagtgaagattaagtggttaaataccagttatagggttctaggcaaattaagagttttaatcctggctctctgaatccaaactctgcatctgtaaccactatactacactgtggaaacaaattatttttcttttatttcttaaaataatgtttgttctctctacgactaaaaataatgtctacactttaaccaaagcatagtgttaccatgcttatttatataaatgatttcaccacaaaacggctaaaataaacaaaaggatgttaaaatgtgtgaatctaaaag

SEQ ID NO: 690073 - DNA, 780 bp, Homo sapiens
ggtctgcttccagagctcctgcctccggccacagttttcattcccaaagggagcctctctttcggccacagcctggtgcatgtggcagagcctttacaccctgaaaaatcctatcttcccatgacacgaggacacaaaatgaaagatgcagtgtgatggtgcttggccacacagcagcctttggtgatctaaaatagtcaacattsgttcctgaatgttttcacgtacaagacatatgctgtgtcctggggaaacacactcataaatgaggtgtcttctctgagcctagagcataatgggtgaggccggacagcttgcccacaacaaatcgtatttaaatttagtttctacatttaactcagaacgaacaaggaattagggggcaagcacttcaggctccacgtgaaaaggggtgacagagaagccacggaagtggtggcggggatggcccacgtggcgatgggtcaggtttggagacattggcgtggactcatggtttccaataataaatacagatgcagacaatacagacacctgtgcacacacacagacacgtgcacacactcagacacacatgcatgctcacactgagacacacgcatgcacacacagacacacatgcacacactcagacacacatacacacagacacacgtgcacgcactcagatacgcatgcatgcacacactcagacatgcatgcatatggctttggtgaacccacagctctccttgctctccttgctctggcggcagaggggcctcgaggcagggccagcca

SEQ ID NO: 690074 - DNA, 664 bp, Homo sapiens
aagccccagaacatgaaaatcctgttgatatatttcatacaggtcaattacactgagtaaagagcagggttgaaagtggggaaaaatagatctataggcacaaacaaatatattagcataccagcaacctatgcaaccattccagaatttgcacaaacatgcaaatacatacacacattttcttcttcactaaactattactcatacatcrcaaacactgttatgaacctgtacattgacacaatgaagtactcaagaacacatagattaaagtaagtgggtagtgggaacaattaagaagaaagattatgaagtagaatttttaagaaatggaaaataatgtgaaatttcagcttcatcacctcaatgaaacatgattactttctgcaaaagactatgtgaattgattttctctaaaacattcttgatttcattctcttttttcctttctctactagaaagcctggaaagcccaaaatactcacttatccagactctgttgcagctaggtatggtcatgtgacatgagtttggtcagtgagaaataagtagcagaaattaggtaagaattttgataaatttttaaatagaagaggcaactctcacatctattctttaacatttttttcttttctcctcttcttgcctggccagccgatgcaat

SEQ ID NO: 690075 - DNA, 638 bp, Homo sapiens
ctagtgatgctggaagggctcccaggaagcactcttaacattacagaaaaaagtagaacrcttgatatacacagtagattaaggtctgcagcctaccactaagatggatgattcctcttgtaaacagaatgtgtaaatttacagaatgggtagtatagtacagtcctgtaaatgaactttccttccttatgatttgcttaataattttttctttgctgtaacttactctttttgtaaaaatacagtatataatacacatacaaaatacatattaatcgactgtttatgttatcagtaatgtttctggtcaacagtaggctattaggagatgagtgttggaggagtcaaaaattacacatgagcttttgactgtgtggggagccaatgtcactaacccctgcgttgttcaagggtcaactatataaactttatttctgtgaccttgctaaagcatcctatgtaacttatggtagatttttgtttattcctttgaattttaatgttaataatcatgccaactctgcttgaagagttttatatttgttcttttcaatcttcaaacctttttgtattgttttgtttggttgtatcatatgagattattttccagcacaagattgaatagaaatggtgaaggg

SEQ ID NO: 690076 - DNA, 638 bp, Homo sapiens
ctagtgatgctggaagggctcccaggaagcactcttaacattacagaaaaaagtagaacacttgatatacacagtagattaaggtctgcagyctaccactaagatggatgattcctcttgtaaacagaatgtgtaaatttacagaatgggtagtatagtacagtcctgtaaatgaactttccttccttatgatttgcttaataattttttctttgctgtaacttactctttttgtaaaaatacagtatataatacacatacaaaatacatattaatcgactgtttatgttatcagtaatgtttctggtcaacagtaggctattaggagatgagtgttggaggagtcaaaaattacacatgagcttttgactgtgtggggagccaatgtcactaacccctgcgttgttcaagggtcaactatataaactttatttctgtgaccttgctaaagcatcctatgtaacttatggtagatttttgtttattcctttgaattttaatgttaataatcatgccaactctgcttgaagagttttatatttgttcttttcaatcttcaaacctttttgtattgttttgtttggttgtatcatatgagattattttccagcacaagattgaatagaaatggtgaaggg

SEQ ID NO: 690077 - DNA, 638 bp, Homo sapiens
ctagtgatgctggaagggctcccaggaagcactcttaacattacagaaaaaagtagaacacttgatatacacagtagattaaggtctgcagcctaccactaagatggatgattcctcttgtaaacagaatgtgtaaayttacagaatgggtagtatagtacagtcctgtaaatgaactttccttccttatgatttgcttaataattttttctttgctgtaacttactctttttgtaaaaatacagtatataatacacatacaaaatacatattaatcgactgtttatgttatcagtaatgtttctggtcaacagtaggctattaggagatgagtgttggaggagtcaaaaattacacatgagcttttgactgtgtggggagccaatgtcactaacccctgcgttgttcaagggtcaactatataaactttatttctgtgaccttgctaaagcatcctatgtaacttatggtagatttttgtttattcctttgaattttaatgttaataatcatgccaactctgcttgaagagttttatatttgttcttttcaatcttcaaacctttttgtattgttttgtttggttgtatcatatgagattattttccagcacaagattgaatagaaatggtgaaggg

SEQ ID NO: 690078 - DNA, 638 bp, Homo sapiens
ctagtgatgctggaagggctcccaggaagcactcttaacattacagaaaaaagtagaacacttgatatacacagtagattaaggtctgcagcctaccactaagatggatgattcctcttgtaaacagaatgtgtaaatttacagaatgggtagtatagtacagtcctgtaaatgaactttccttccttatgatttgcttaataattttttctttgctgtaacttactstttttgtaaaaatacagtatataatacacatacaaaatacatattaatcgactgtttatgttatcagtaatgtttctggtcaacagtaggctattaggagatgagtgttggaggagtcaaaaattacacatgagcttttgactgtgtggggagccaatgtcactaacccctgcgttgttcaagggtcaactatataaactttatttctgtgaccttgctaaagcatcctatgtaacttatggtagatttttgtttattcctttgaattttaatgttaataatcatgccaactctgcttgaagagttttatatttgttcttttcaatcttcaaacctttttgtattgttttgtttggttgtatcatatgagattattttccagcacaagattgaatagaaatggtgaaggg

SEQ ID NO: 690079 - DNA, 638 bp, Homo sapiens
ctagtgatgctggaagggctcccaggaagcactcttaacattacagaaaaaagtagaacacttgatatacacagtagattaaggtctgcagcctaccactaagatggatgattcctcttgtaaacagaatgtgtaaatttacagaatgggtagtatagtacagtcctgtaaatgaactttccttccttatgatttgcttaataattttttctttgctgtaacttactctttttgtaaaaatacagtatataatacacatacaaaatacatattaatcgactgtttatgttatcagtaatgtttctggtcaacagtaggctattaggagatgagtgttggaggagtcaaaaattacacatgagcttttgactgtgtggggagccaatgtcactaacccctgcgttgttcaagggtcaactatataaactttatttctgtgaccttgctaaagcatcctatgtaacttatggtagatttttgtttattcctttgaattttaatgttaataatcatgccaactctgcttgaagagttttatatttgttcttttcaatcttcawacctttttgtattgttttgtttggttgtatcatatgagattattttccagcacaagattgaatagaaatggtgaaggg

SEQ ID NO: 690080 - DNA, 627 bp, Homo sapiens
gtatttttggtagagacagggtttcaccatgttgcctaggctggtctccaacttcctgaactcaagccatctgcctgcctctgcatcccaaagtgctgggatttcagacgtgagccaccgcgcccagccaaatattttactaattaattagtcatctccaaaaaatgggcagtcgggtcttatactatgagtaagaagaagagaaaagaagagctgatggattacggagcaaaggaccccagggagctggggcaaggcagcccagcggcagtcagacagacaaagtcctccccaacagccagggacgacgaagctgaacagaggggcagctcttggtcagctttggcatttaagaccatgtgatctcaaggtgctcttgaacaagaatgggtacacaggagcagccaagtggcactctggaaccctctcctcctactcagggtacgtacacagcatcctgtttcctacgctggatggctggctaaggrgaaggaaggaaaactaagattgtcttatttcaaagggctgcaactatattccagctgttacaggcaagcctgttatgtttcttccaacggatgcccaattcacacacatagctgctctcctcgagaataaacaagtgga

SEQ ID NO: 690081 - DNA, 858 bp, Homo sapiens
tcacgtgtggactgataacttgttttgccaaaataggagaaagtgatctctttaagggcatcagaatttaaccacaaagctacttttttwaaaaaaaaataatagttctactaatctaggaacattttgcagtttaacatgtaggtaatgagctgtcaacagtatacaacttaccagactgtggaatgaaacattaaaaatattttcctcaaaaaaaaaaaaaaaaaaaaaccctctcacaaagattaatacctccttcactgtcacacacacacaccaaaacacattacaatccagaacacctcaattaacaacttaagactacaaaattcatgaaatacacaaaattaaaagaattggggagagggaactaagaagtatgtaagagaatcgcataggacctttcaggtctgcagagcaaagcagcacttctttggagggctatcttttagtgggattgacaactaatctcaaaggtggtggaatttcctgctagaattctctctagcactttctacagagagcactggaacaactcctttgtgtacacacacacattttaaaaactcacttgctaaggagctcagtgacttctgcttcccacttagcactggcaaagctaagcactgagatgaagggaccctgctgctcctggccttctcaagttcataggcccctccagtgcctcattctctgggtgtgtcacattccatctctttaggtacttccatgtggccaaaaaggaaaggaaaaaaaaggtaaacactcatgtgatgcatttggtcacatttatagctcagctgtaaaatcaaacttgagaataataaaaaggccccaatgctaaaggctgaatttctt

SEQ ID NO: 690082 - DNA, 601 bp, Homo sapiens
gttttactccaagatttttcatgaagcccaagatctctactttcttccattgattttaatttcatttagacaactttgtcatctattattttactttgtgacgttcagaaataatttaaaagcagagaatatattctatgccatacatcatgggtaatgattttccaaaaataattaaaaaaggaaccaatacacacagttttagtgtttccaccatatttaatagaaacactataaatgagttttgatgacattagaatgcaaataaagacattaaatataacttatttgtcccatttgatgaggtgcaaaaaagagggcttttggggataaacaggtttccagagcatatagacacatttctgacttttctctggtcagaagtgactacagcaaatgataggccagagaggaggtgagaaggagcaattaggratggtgtatatcagggaacttctatccacatcaacaaagctcacggtcctaccttcacaatccaggaataatcctactgtgtctgtaggtcttggaacatattgcattacaagtggggaggtggtaaagagactgcagtgagtgtcctccttaacacatccaagaa

SEQ ID NO: 690083 - DNA, 599 bp, Homo sapiens
tttctgctctctgcagttactctcctgtttgctcgaggcttcattcacacggacctgctgttaggtgctgaaacgtgccatgtgccctccatccacccccatgatatctactcctttttcaggtctcagggaagattttgacatcacagaccaggtgaggttgctcatttacatcttccttttccaggtaggtttttttttkttttttttttttaagacacagtctggctctgttgcccaggctggagtgcaggggcacgatctcggctgactgcaatctctgcctcctaggttcaagcgattctcccgcctcagcctcccaagtggctgggattacaggagtgtgccacacctggctaatttttgtatttttagcagagatggggtttcaccatattggtcagtctggtcttgaactcctgacctcaagtgatcttcccgccttgtcctcccaaagtgctaggattacaggtgtgagccaccacacccggccatgggcagcatttttttttttaaatcactgtaattatttgtctagtaacccatcttcatacctcaccattgtgttatgttaatctccatgacggtaggaacctggt

SEQ ID NO: 690084 - DNA, 691 bp, Homo sapiens
tatttttactatcctgtacgtttcttgatagaatcctaattgatagagttgataagagattaaggcttaatccaaagccatgaataatttccaaaataatattttggggttgctctcatgaagaaaaataataaacaattataataatccactttcaaatcacaggaagcaaatcagaagggtgagagcaggagaaaggcaggcttagcgtataagacagcatgttgcagagggagagttcccaaatgtgatcctytcaatatccctcctgttccaatgcgaaaggtgtttggggtgcaaaagacattggtatttgttgtacccataaatgattaatgtttcctgctgaaccagcctgggcaacttagtgagatcctgtctctacaagaaaaaattaaaaatcagctgggaatggtggcatgcacctgcagtctcagctattcaggaggctgatgtgggagaattgcttgagcctaggaattcgaggttatggagaactatgatggtgccactgcatttcagcccaggtgacagagtgagatcctgtctcaaaaaaaaaaaaaacaaaaaacttaaaaactgatgttataaaaataaactatttatcatgctacataggattccctaggtatttttgttttttctcataggtctggagatcaatcttggatactgccaagagataggaaaa

SEQ ID NO: 690085 - DNA, 691 bp, Homo sapiens
tatttttactatcctgtacgtttcttgatagaatcctaattgatagagttgataagagattaaggcttaatccaaagccatgaataatttccaaaataatattttggggttgctctcatgaagaaaaataataaacaattataataatccactttcaaatcacaggaagcaaatcagaagggtgagagcaggagaaaggcaggcttagcgtataagacagcatgttgcagagggagagttcccaaatgtgatcctctcaatatccctcctgttccaatgygaaaggtgtttggggtgcaaaagacattggtatttgttgtacccataaatgattaatgtttcctgctgaaccagcctgggcaacttagtgagatcctgtctctacaagaaaaaattaaaaatcagctgggaatggtggcatgcacctgcagtctcagctattcaggaggctgatgtgggagaattgcttgagcctaggaattcgaggttatggagaactatgatggtgccactgcatttcagcccaggtgacagagtgagatcctgtctcaaaaaaaaaaaaaacaaaaaacttaaaaactgatgttataaaaataaactatttatcatgctacataggattccctaggtatttttgttttttctcataggtctggagatcaatcttggatactgccaagagataggaaaa

SEQ ID NO: 690086 - DNA, 1377 bp, Homo sapiens
attgtggctttaatatgcctactcctttgcattttcacctaaaatgggtgagtcataaacgttgaatgtcatgtagaagtttttaaattcttggttcaggctactgcatgtgcaatggtttttgaggaattcctaacccttttaaggaatcctaactatttctctttctagagagaagtgatgtgtaattgtacaatcatctcagcctagtcagatgtgaaaattcctcacccacatccctagtgtggtatccccatggcatggccttgataaacaatgcacaggggaggacccaacattgctaccataggcatttggcaatgaatttgcctctccatacacagggaatcctgtctgttcaataatatccagtgagcatttattgggcacatactttgttccaggcactgtgctgggcattgagaaagcaacagggaaatagacacagtccccctcttttttgaaagactcactgtctagtgagggagtgagaaagtgaacatactaattgtcatgcaatgtgataaatgctttgcaaaatgtgtatgtattttcagggggcttggaggctcatagcaaaggtccttgaagagagcaagaaaaagtcttcccaggaaaagtggacacctgagtgagtgttacaacgagaaggggggcatcccaggcaaggcagctaccaagcacaggtgtgaaggtgagcttctgcgcaggtttctcgaaggttgttggcacagctggagcataaggcacatgcaggaggcacttgcaaaagatacagccaggatgtgtacagggctgatcatgaaggatgtacttaagtgaaatatattttgcagaatttcaacccagagactctcccttttgatttacctgcaaacaaaaagaatcatacttccctttgactgtctctgaactctgaattttcgcttctactcactttttgaagccaaattgcatgaaattaggccccttccttccttccttcctttcttttcattcgttcrttcttttttgagacaaggtagagtacagtggtgccatcatagctcactgcagacccgacttcctgagggtcaggtgatcctcccgactcagtctcccaggtagctgggactccagtcacacaccaccatacctggctaattttttgcatttttagtagagatgaggttttgccatgtttcccaggctattcttgaactcctgggcttaagcaatctgcccaccttggactctcaaaatgctgggattacaggcatgagccactgaacctggctgaagttagacttctttccatctctttttgtgaatatagacatattttctatttaacagtttagaaccaatgtgaattttcccatatatggtagtctaaga

SEQ ID NO: 690087 - DNA, 2744 bp, Homo sapiens
gcctttattctttcttctccaaaattcccaaagtggtcttgggcagagaagataatgatgggttttggttgtccttaaaaagtctgcatggatatcttcacaggaaagcagcatgcttttacctaattttgttttgtcctctcaggtacatggtgattcctagtctatcatgtgtgtgaatttcttggggttctgctacaaggcagattctgtttcagtggatctgggtggggcttcacattctatgtgtctaagtcctgggcaatgktgatactgctcatccatggaccatatattgtgtcttgaggttttacaacacaggtgtatataggtttatgtatataggtgatgccctgcataaactcactacagaaaacgacctgggctagaaatggtagcagagtgcaacctaggggtccctgggttggcttaaactcagtaggtaggcatggaacttgggatggccactttcttgacccttagcaggaattgcatgggtccaggcaatttatcacaagaaaaacaaagtaaatgccccagatggatcaactcaaatgcatcagtactagtagaaacaactaaaatgatggctacctggctggattcatgttctgtggtagcatcttcctctactgctgatgtgaggttggtccctgaagcagaaatggctcttgtcgcccagggacaaaggagtcttggctgggcacggtggctcatgcctgtaatcccaacactatgggaggctgagacaggaggattgcttgagcccaggagttaaagaccagcctggacaacatggcaaaaccctgtctcaaaaaaagaaagaaaggaagagagaaagagagaaagaaagagagagagaaagaaggaaggaaggaaaggaaggagagagagagagaaaaaaaaagaaaggaagaaagaaaagaaagaaagaaaagaaaagaaaaaaagaagaaaagaaaagaaaactttgctgagcccccaggcttggtggctgagatgaaagcatcgctggagcccagcaggttgagtccgcagtgagctgcgattgtgccactacactccagcctgggctacacagagggaccatttccaaaaccaagaaagaaacaaaaaagggagtcttgctaagttgatgcctttagaactcgttgttcgtagagacaaagttggtgtgtgggagctccccatgcacttctctggaggataagagagggtagctccattctttgttgagaaaagtgcatttgcccagagggcttgggggctcaggtttaaaaagaaaagtctgaaggtcagtgcttgctgatgataataagtgatgctgaaattatctagcatctagatgctaaaatgtcaccctttaccatcttttcaacatccttctgtctcagtggtatgaaatgattaatttcacccagggtaattggctatttaaacttactggcactggcaaaaaatgcattaaggtggacattctaaaatcaaagatattaatattaagatctattttatttctttaaaaaattacatgagatcttccagggaccatgtaatgagcaatagttagcatataaagtactccagacccatccaaacatttgtcaacactacagtataaacattattcctttattttccaaatttctggtgtagagtgtgttgcaattgttggaaactagactgagattaaacagtgagtaatactcagtattgcaacctgtcgtttccaatttcctgaaccatcaggagaatacagtgcctctttttagtgttatttatgaaccatagcttttgcatccattttgcaattacacatggccaacgtttaatatataaagtcatgaaaactctttggaatctaattgtttttttcccctctggctggaacgaatagttaagcagaggaaactgtaaagaggttcatgtagatttcacagaatgtgttttatgatctttttgcatcatgagtttggctctgtctccaggggaatgcaattctcccaatgaaatggggaactcaggcttcctccaaccaattgttctctttccttgaatttattccatggcaagaatggaatatccctgcaaagattctctaggatgatccagacaaagtcaattcattcattcatgggtgcttgcattcatttaatgaatattaatgacctagactgtgccagatattggagtaggcctgcatatatatgggtcccaacatttggtctcagaaagtaataggtagatagacaaatagatggatggatgggcggggtaagtggatgaatggataactggatagaaagttgggtgcatagatggatgaattattaggtggattaatggatggacagatagatgggtaaatggataagtgggtagctaggtagttggatagttgattggatgaatggatggatagatagtcagatagatgttatatagagagatggatggatgtatatatggatgatggatggacagatggatgggtggatggatgaatgggtagatacataattggttagttgattgaatgaatggatggatagatagttgaatagatggttatagggagagatgaatggatggatatatggatgatggatgggctgataaatgggtagatggatgatgggcagataaatagttggatagttgattggacgaatgggcggatagatagttggatagatggttatatggagagataaagggatgatagatggacagactgcatgggt

SEQ ID NO: 690088 - DNA, 565 bp, Homo sapiens
gggaggaacaggtgcatcctattatttcaagatggcctcaccagcrcagcatggtggctcatgcctgtaatcttagcatttggggaggccaagacaggaagttcgcttgagaccaacagtttcagaccaggctgtgcaacatagcgagatcttatctctctaaaaaaaattagccaggcctggtggcacgcacccctatagtcccagcttctcaggaggctaagaagagaggatcacttgagcccaggagttcaagccttcagtgagccatgattccaccactgcactccagtcccaggctcttagaatgagaccttgctttaaaaaaaaaaaaaaaaaaaaaaggctatggctacactagtgtccttggataaaagtaaaacgatctagatcgacacaactataattcttttttttcttttttttttttttttgagacaaagtcttgctctgttgtccaggctggagtgcagtggcgcgatctcagctcactgccacctctacctcccaggttcaagcgattctcttgcttcagcctcatgagtagctgggactacaggcgtgc

SEQ ID NO: 690089 - DNA, 565 bp, Homo sapiens
gggaggaacaggtgcatcctattatttcaagatggcctcaccagcgcagcatggtggctcatgcctgtaatcttagcatttggggaggccaagacaggaagttcgcttgagaccaacagtttcagaccaggctgtgcracatagcgagatcttatctctctaaaaaaaattagccaggcctggtggcacgcacccctatagtcccagcttctcaggaggctaagaagagaggatcacttgagcccaggagttcaagccttcagtgagccatgattccaccactgcactccagtcccaggctcttagaatgagaccttgctttaaaaaaaaaaaaaaaaaaaaaaggctatggctacactagtgtccttggataaaagtaaaacgatctagatcgacacaactataattcttttttttcttttttttttttttttgagacaaagtcttgctctgttgtccaggctggagtgcagtggcgcgatctcagctcactgccacctctacctcccaggttcaagcgattctcttgcttcagcctcatgagtagctgggactacaggcgtgc

SEQ ID NO: 690090 - DNA, 594 bp, Homo sapiens
tgtcaattttcaaatatctcatactttttacatataacaaaacmgtaaaacatgagttgtcacatcaaatctcattctatacacagaaaaagtccattagtgactccttcttctatactatagttaaaatatcagttagttttaaatttccaaatcagaattctctttgagatgcaatcccaatagctataaatagctacttattcaaccttaaaattcttttctggaacaataattagtatattcctctttctcttgattttattcatgacagctcttataaaaaacggttttctttttgaagattggtaggtaagtatttatccgactgaaaaatacaaataattattttggatgcaaatttcatactgtaagctgttaaaatcattttctgtctcattaatcactgccatcaagttactagacttagaccacaggttaccaaatgaaattatagactgtattttcctgtagcgataattatgatttttaaaaagtgtttctttcattaaattgcatattctttattgttgcaatagtatcttcttcattagtgagatttcattgtctataacaatgcctggagagttccgt

SEQ ID NO: 690091 - DNA, 594 bp, Homo sapiens
tgtcaattttcaaatatctcatactttttacatataacaaaaccgtaaaacatgagttgtcacatcaaatctcattctatacacagaaaaagtccattagtgactccttcttctatactatagttaaaatatcagttagttttaaatttccaaatcagaattctctttgagatgcaatcccaatagctataaatagctacttattcaaccttaaaattcttttctggaacaataattagtatattcctctttctcttgattttattcatgacagctcttataaaaaacggttttctttttgaagattggtaggtaagtatttatccgactgaaaaatacaaataattattttggatgcaaatttcatactgtaagctgttaaaatcattttctgtctcattaatcactgccatcaagttactagacttagaccacaggttaccaaatgaaattatagactgtattttcctgtagcgataattatgatttttaaaaagtgtttctttcrttaaattgcatattctttattgttgcaatagtatcttcttcattagtgagatttcattgtctataacaatgcctggagagttccgt

SEQ ID NO: 690092 - DNA, 1199 bp, Homo sapiens
gcattgctcagaatgtattctcaccattagcaatttgtgtttctaaaattaacatgaatccttctaggttattattatgacaaatgttgtccactgaattctaatagacaatttaaaacagcattttaagaagctattcattctttctagtttctaaaaaattatacttagaaattgttgaaaattttagaatttttatattattagataattatccttattgttatcaacaaaatattttcacataataaactaatttaagatatttaatcattaaacaagcttcacactttaaaagtaaccccaatgtataatgaaatgtgattttagtatagtcttacattaatttatgacagtgtgttatttttaatttttgtttctttattttaaatgaaattggctataattttattttcttttgttttttttttttttttaggtgagctcaggggactttattgatggtaaccgacaaggtggggctccytaggcccctccctcttcagggggtctgcatggaaattgtgaggaagggagattctcattgtggtgggggactgagtgcagcagggagctccccggcagctgaaggcctctctcttcctcttgcactctcgttggggttggtggtctggggggtcttacttcttggaggccatgtgggtcatgaggttcaccaccctgttgctgtagccaaattcattgtcatatcaggaaatgagcttgacaaagtggtcgttgagggcaatgccagccctagaatcgaaggtggaagagtgagtgtcgctgttaaagtcgggggagatgacttggtgctcagtgtagcccaggatgcccttgagggagccctctgatgcctgcttcatcacctacttgatgtcatcatatttggcaggtttctccagatggcaagtcaggtccacgaccgacacgttggcagtgggaacatggaaggccatgccagtgagcttcccattcagctcagggatgaccttgcctacacctttggtagctccagtagatgcagggatgatgttctgattagcccacagccatcataccacagtttcccagaggggccatctacagtcttctggatggcagtgacggcaaggactgtggtcatgagtccttccacgataccaaagttatcatggatgaccttggccagaggcattaagcagttggtggtacaggat

SEQ ID NO: 690093 - DNA, 1617 bp, Homo sapiens
atagacatttcattctgatgtacgcaattcatgtgtgtatctcttccagtcttcttcctttgaaatcacctctgttgggtacacaaaacagtagggacaaagatttagatttgacacatgcattaaaatcattactgtttgtttgtgtgcaagtataccttaaaagagtgcctgtaccctgacatgtcatgataatattatcttagagattacagttaaagaaaccatattaagtaccttctcattatggaatattttgaaaaagtcagttgtgaataccgctgaaatcactggatttgagtctgaaacaggacaggttaacatgacattctatgtgatactgaattctacttcatgacaagtaatagtgtgatttgattcaattccatataatgacaatttttgaagagctttttttgtgaaaggtctcagctaagcatatgagaataattagaacacagtataagagttttggcagtttgaagaccaatgttgaagaaagaaatgttagttgcccatgttgaatacacacacacacacacacacacacacacacacaatcttttatgaagagttatattttagtgtactatgtaagtgacagagaattagctttatacttatattggcccatactggaatgtgtattagaatatccatacacttacttaaaatttctgtaattcttaaacctctatcatagtgcttattatgttgattacttatttgaaaactggattaattgaatacagatgaaaggtaaaatgttcaggatggacactaactattaacttttaaggatacctaagaatgtttatgaaaaacatgttccatgctacaaatactagctcataataaaagagagggtggaaatcttgactttgttttctgggaaaawgtaattattagttctcattagtttaataagtcacatttttttaaaatagaaaaaatagctttttgtaggacaaagtggagaagttgactggaaatgttaagtggaatgtattttttcaccttttgaaaaatttggtattggctgggtgcagtggctcacacctgtaatcccagcactttgggagaccgaggtgcacgaatcacaaggtcaggagatcgataccatcctggctaacacaatgaaaccccgtctctactaaaaaatacaaaaaattagccgggcatggtggcgggtgcctgtagtcccagctacttgggaggctgaggcaggagaatggcgtgaacctaggaggcggagcttgcagtgagctgagattgcgccactgcactctagcctaggtgacacagcgagactccgtcaaaataaaaaaaaaaaaaaaagaaaaatttggtattaattagtatttttttctttccattgacttcctttccttacaaaataattgatcatattatttcctcctattaacttccaatgacacttttcaaatatattgaatacaatcatatgggttaggcttattacttatcagttccactctatatttgaacttcagctttacctaattaaattacatttcatccattggtaaaattaccagattttagaaaaactagtgaagcacatggagcctaaatatgctgaattttactttttct

SEQ ID NO: 690094 - DNA, 647 bp, Homo sapiens
aaaggatatcccaaccagctatttacattgtttttcttcaggttttccaaggaaaggaatcttacccttcttggaagrctggggttgggtaggaggggagatgagaaataagtctggctacttaaggaagggagctagaagtctctgtgattggtatatagacttttaatgaatcctctttaaaacatggcagctctgttctcatctggacacggtatccctaagtcaacagtgcttcatattcaactgctctggagaacagaccactagtcttctgtcagagtagagcaggtctaaaagcttaagtagattttttttttgagacagggtctcactctgcggcccaggctgcagtacagtggcgcaatcgcggctaactgcaacctccacctcctgggatcaagccatcctcccacctcagactccccaatacccgggactacaggcacactccaccatgcctggctaatttttgtattttttgtagagaaagggtttcaccatgttgcccaggcttaagaagatttttaaccaactttcccctatttagctcctatctgtacctggccttgagtgatgcttggtactttctgttttatgggagctctgaagtacaaataaacttacctcttgggcagggccacctt

SEQ ID NO: 690095 - DNA, 608 bp, Homo sapiens
gcttaagggttcaccttgtgcaaagcacattctgttgagacctcctctgatgctcagggtaatgctgtgaggtggaaacagcattgccacatggattgcatgcatgcatttaacttttataccatgcatgcatttaayttacataatgcatgcattaaacttacataaattcaactaactgcagttggccaaaaggaaaggagaaaaatcctcattgaaagggggtagacctgtcgtgtccccgtgcgaacttgccacacgggaagcatggaaatggaatatatggatctgttctcgttgtctccaatcctggcagcctttcctagaatgagcagctctctgtgctgagtgggattctagctgaggatttctcagccttggcgctactgacattctgggttggatcattattagttgtggggactgtctagtgtgttggaggatgtttcgaggcatctctggcctccatccactagatgccaggagcgtttattcctacccctagttatgacaaccaaaaatgtcttcaggtgctgccacacatcccctgaggggcaaaatcaccctggctgagaatcactcatctagagtttaaaatgcatatttat

SEQ ID NO: 690096 - DNA, 1300 bp, Homo sapiens
ggaggagatgcctgaggacccccagctattttagctccccactgtttaggtctcttcagcatcaatctctggacagcttctggacaggtgagtgagcaattgtcttagtctgtgttctgctactataacagaatatcatagactgggtaatttctagagaaaagaaatttataaagaaaagaaattggccgggcgcggtagttcacacctgtaatcccagtactttgggaggccgaggtgggyggatcatgaggtcaggagatcgagaccatcctggctaacaccgtgaaaccccatctctactaaaaaaaatacaaaaagttagccaggcgtggtggtgggtgcctgtaatcccaggtacgcaggaggctgaggcaggagaatggcgtgaacccaggaggcgaagcttgcagtgagtggagatgcgccactgcactccagcctgggagacagagattctgtctcaaaaaaaaaaaaaagaaagaaaagaaatttatttcttacagttctagaggctgggaagtccaatatcagggtgccagtgtctggcaagggccttcctgctgcatcataacatggtggagggcatcacatgatgaaagggcaagaatatgtgtgtcagctcaggcctctcctcctctgctcataaagccaccagtcccatcatgggggctgcaccctgatgactttatctaatcctaattacctcctaaaggccccacatccaaataccatcaacatatgaacttggagatctaagtttccagtacatgaaatttgggggacacattcaaaccatgcagtaatccttcaggtgattccagccccagcctgaagtggagccagagggcatcccccaagctctgcacaaattacagacttgtgaataaagtacatgttgttttaagctaaaaactgaaaagattttaaaaagtgctatgaggacccagtgaaggagcaaataagtctgcagggcagagagacaggaagaagagtgggaaaagctccagagattgttaggctgtggccacatgtgaggttcagggcattcgctcacttgaaaagatatgccaaattgtgtgtacgtgtctgtgcattcttttttttgagaaaagggcctgttactctcagcagattctcagagatgttcataatccacaaagggtcgcatctattgccttgaaaggatcagagacaattgccaggacgacaaagaatggaaaaagagctgcaaagctatcaaggcattggagtctggtttggcaaaaacataggttaggcctgactggagattcacatt

SEQ ID NO: 690097 - DNA, 1300 bp, Homo sapiens
ggaggagatgcctgaggacccccagctattttagctccccactgtttaggtctcttcagcatcaatctctggacagcttctggacaggtgagtgagcaattgtcttagtctgtgttctgctactataacagaatatcatagactgggtaatttctagagaaaagaaatttataaagaaaagaaattggccgggcgcggtagttcacacctgtaatcccagtactttgggaggccgaggtgggcggatcatgaggtcaggagatcgagaccatcctggctaacaccgtgaaaccccatctctactaaaaaaaatacaaaaagttagccaggcgwggtggtgggtgcctgtaatcccaggtacgcaggaggctgaggcaggagaatggcgtgaacccaggaggcgaagcttgcagtgagtggagatgcgccactgcactccagcctgggagacagagattctgtctcaaaaaaaaaaaaaagaaagaaaagaaatttatttcttacagttctagaggctgggaagtccaatatcagggtgccagtgtctggcaagggccttcctgctgcatcataacatggtggagggcatcacatgatgaaagggcaagaatatgtgtgtcagctcaggcctctcctcctctgctcataaagccaccagtcccatcatgggggctgcaccctgatgactttatctaatcctaattacctcctaaaggccccacatccaaataccatcaacatatgaacttggagatctaagtttccagtacatgaaatttgggggacacattcaaaccatgcagtaatccttcaggtgattccagccccagcctgaagtggagccagagggcatcccccaagctctgcacaaattacagacttgtgaataaagtacatgttgttttaagctaaaaactgaaaagattttaaaaagtgctatgaggacccagtgaaggagcaaataagtctgcagggcagagagacaggaagaagagtgggaaaagctccagagattgttaggctgtggccacatgtgaggttcagggcattcgctcacttgaaaagatatgccaaattgtgtgtacgtgtctgtgcattcttttttttgagaaaagggcctgttactctcagcagattctcagagatgttcataatccacaaagggtcgcatctattgccttgaaaggatcagagacaattgccaggacgacaaagaatggaaaaagagctgcaaagctatcaaggcattggagtctggtttggcaaaaacataggttaggcctgactggagattcacatt

SEQ ID NO: 690098 - DNA, 1300 bp, Homo sapiens
ggaggagatgcctgaggacccccagctattttagctccccactgtttaggtctcttcagcatcaatctctggacagcttctggacaggtgagtgagcaattgtcttagtctgtgttctgctactataacagaatatcatagactgggtaatttctagagaaaagaaatttataaagaaaagaaattggccgggcgcggtagttcacacctgtaatcccagtactttgggaggccgaggtgggcggatcatgaggtcaggagatcgagaccatcctggctaacaccgtgaaaccccatctctactaaaaaaaatacaaaaagttagccaggcgtggtggygggtgcctgtaatcccaggtacgcaggaggctgaggcaggagaatggcgtgaacccaggaggcgaagcttgcagtgagtggagatgcgccactgcactccagcctgggagacagagattctgtctcaaaaaaaaaaaaaagaaagaaaagaaatttatttcttacagttctagaggctgggaagtccaatatcagggtgccagtgtctggcaagggccttcctgctgcatcataacatggtggagggcatcacatgatgaaagggcaagaatatgtgtgtcagctcaggcctctcctcctctgctcataaagccaccagtcccatcatgggggctgcaccctgatgactttatctaatcctaattacctcctaaaggccccacatccaaataccatcaacatatgaacttggagatctaagtttccagtacatgaaatttgggggacacattcaaaccatgcagtaatccttcaggtgattccagccccagcctgaagtggagccagagggcatcccccaagctctgcacaaattacagacttgtgaataaagtacatgttgttttaagctaaaaactgaaaagattttaaaaagtgctatgaggacccagtgaaggagcaaataagtctgcagggcagagagacaggaagaagagtgggaaaagctccagagattgttaggctgtggccacatgtgaggttcagggcattcgctcacttgaaaagatatgccaaattgtgtgtacgtgtctgtgcattcttttttttgagaaaagggcctgttactctcagcagattctcagagatgttcataatccacaaagggtcgcatctattgccttgaaaggatcagagacaattgccaggacgacaaagaatggaaaaagagctgcaaagctatcaaggcattggagtctggtttggcaaaaacataggttaggcctgactggagattcacatt

SEQ ID NO: 690099 - DNA, 1948 bp, Homo sapiens
  misc_feature 39, 246, 247: n = A,T,C or G
actggcacctcatgggtagaggcgagggatgccactcancatcctacagtgcacaggacagcccccatcacaaagaatcatccagaaagtcaatagtgcagagatggagaaacccaatggaggcctcctttcaatcagtgttttagggtaggtaggttctctggagcagaagctgagacagactttgaggtccaagggatcaacattgtgaaagggaggaagagaaggaggaggaggaggagcagnnagaagaggaggaggcggtggcaggactgggcatcagtgagatgagggagatgaagttgagttgaaaaataaaataaaataaaagtgatttcttgcttgtggcatttttagcttgtgcaaatcgtccctgtaatatttcttcttccatttttaagaagttgaactgtgatgtgggcacaagaccttggccagccccatgggcatagatgacctgtcagagttgtccctgccatgggccaaattggccaggtctttatattcctgtaggggtcagtcactggatacaggctgaactgggaagggtacagcctgtgcgagctggctgcagacagcagaggcaattcctgaggggggctgacagctgtaggccatctgtgagccaccttcccagcagctgaactctaagtccttccttgaaggcggatccaggtggcttatcaccgtgttcatcacaatgaataaccattgacctgctagttcatgcatccactaattcaggaagttttggtgaaaagagcagtcccagttagaacctacacatagatgagtaggtctccataagccaatgcgattagcacaactgaagacaaaggagaagcctggaaaataaaatttatatttctaactttgttttccctaagtcaaatgagatgcatacaacgtatctcttggtcagcattaagatgaatgggtgaattgatgaatgaatgaatgaatgagaggttgcagtggctcatgcctgtaatcccagcactttgggaggccgagacaggtggattgcttgaacccaggggttcaagaccagcctgggcaacatagcaagaccccgtctctacaaaagattttaaaattagctgggtgtggtggcgtgcatctgtggtcccagctactcaggatgctgaggtgggtggatcacttgagcctgggaggttgaggctgcagtgagctatgtttgcaccactgcactccagcctgtgtgacagagcaagaccctatctcaaaaaataaagaaagaaaagaaaagaagggggcatagtaatagtggccattgattatttagtgtgccaggagctctgctaagtgatctatatatatgatctctcaacctcacaaaagccttttagggtttttcaccccattttatggataaggcttgacttaatcacctattgctgcagaacaaactacctaaaaatatagtggcttaaagcactcacatggctgttggctggaggcctcagttcctccacagggacattcccacagggctgtcraaggctccgcattccctggcagctggcttctcccagaatgagtgatccaaaagactccaaggaggaagccacaaggcactgggtgaccctgccttggaagtcacacagtgtcacctagccacattcctttacttagaagtgagtcattaagcctggcccatgctcaagagaagaggaattaggctccttcttttgaagaaaggagtagcaaagaatttgtgggtatttaaaaccaccccaaggctcaagctatataattggtatttggtgaaactggggtttatccattcattcattccataaatagcagcacttctgtctttgcagtccaatgtggtagccacttgccacataggctgttgaacagttgaaacacagttgatgtgcctgaggaattgtattttttattttattcaactttatttaat

SEQ ID NO: 690100 - DNA, 1948 bp, Homo sapiens
  misc_feature 39, 246, 247: n = A,T,C or G
actggcacctcatgggtagaggcgagggatgccactcancatcctacagtgcacaggacagcccccatcacaaagaatcatccagaaagtcaatagtgcagagatggagaaacccaatggaggcctcctttcaatcagtgttttagggtaggtaggttctctggagcagaagctgagacagactttgaggtccaagggatcaacattgtgaaagggaggaagagaaggaggaggaggaggagcagnnagaagaggaggaggcggtggcaggactgggcatcagtgagatgagggagatgaagttgagttgaaaaataaaataaaataaaagtgatttcttgcttgtggcatttttagcttgtgcaaatcgtccctgtaatatttcttcttccatttttaagaagttgaactgtgatgtgggcacaagaccttggccagccccatgggcatagatgacctgtcagagttgtccctgccatgggccaaattggccaggtctttatattcctgtaggggtcagtcactggatacaggctgaactgggaagggtacagcctgtgcgagctggctgcagacagcagaggcaattcctgaggggggctgacagctgtaggccatctgtgagccaccttcccagcagctgaactctaagtccttccttgaaggcggatccaggtggcttatcaccgtgttcatcacaatgaataaccattgacctgctagttcatgcatccactaattcaggaagttttggtgaaaagagcagtcccagttagaacctacacatagatgagtaggtctccataagccaatgcgattagcacaactgaagacaaaggagaagcctggaaaataaaatttatatttctaactttgttttccctaagtcaaatgagatgcatacaacgtatctcttggtcagcattaagatgaatgggtgaattgatgaatgaatgaatgaatgagaggttgcagtggctcatgcctgtaatcccagcactttgggaggccgagacaggtggattgcttgaacccaggggttcaagaccagcctgggcaacatagcaagaccccgtctctacaaaagattttaaaattagctgggtgtggtggcgtgcatctgtggtcccagctactcaggatgctgaggtgggtggatcacttgagcctgggaggttgaggctgcagtgagctatgtttgcaccactgcactccagcctgtgtgacagagcaagaccctatctcaaaaaataaagaaagaaaagaaaagaagggggcatagtaatagtggccattgattatttagtgtgccaggagctctgctaagtgatctatatatatgatctctcaacctcacaaaagccttttagggtttttcaccccattttatggataaggcttgacttaatcacctattgctgcagaacaaactacctaaaaatatagtggcttaaagcactcacatggctgttggctggaggcctcagttcctccacagggacattcccacagggctgtcaaaggctccgcattccctggcagctggcttctcccagaatgagtgatccaaaagactccaaggaggaagccacaaggcactgggtgaccctgccttggaagtcacacagtgtcacctagccacattcctttacttagaagtgagtcattaagcctggcccatgctcaagagaagaggarttaggctccttcttttgaagaaaggagtagcaaagaatttgtgggtatttaaaaccaccccaaggctcaagctatataattggtatttggtgaaactggggtttatccattcattcattccataaatagcagcacttctgtctttgcagtccaatgtggtagccacttgccacataggctgttgaacagttgaaacacagttgatgtgcctgaggaattgtattttttattttattcaactttatttaat

SEQ ID NO: 690101 - DNA, 1190 bp, Homo sapiens
atcaggccttagtttaaatctgtttcattgttaacagccataaaatgtcaaaacaaaacaaaacaaaacataaagcaaaaccttaatgcctgacaaggacagaatcaggtgcaatatttgtaaacacttggaaagacactcttatggtattagctgtgggttttaaataaaaattaaaaaataagaccctccacattaactgacagagggaaaattctggactacagcatagaccagatcygtagttcaatgcagaatttcttatactcccgtattgtaagttccagtatttatttttgtagtcagcaattacaattattcatgatcgcatttttatcaaccatcatgcttatacagctacctcacaaaagttatattccagtatttagtaaaaagtcagcatttttaaatgctttactataaaactcagtatctgacatgcatttttttcccattggttctgccctaaaacctctatctccccatgaagggattcagtatcccttgtaaagtgttagaagtacttgaagaattgtcatgtaactgtattatttttgccatggagcatacattcctagttcttatgataatttgctgaatcgtatttgaagatctgctaatgcccatcattagtccacataactgaatggaaattcccttccccttcaccctcattcaggagaggatacatgacccagacttggacaagtattgcatttccctagtcacaacgattaggttaagctacgtgataaaatcagattcaatagaattaattctgggatgcaggtggatcttccccaaggcttttattttattttactttgtttatacttgtccttggaatatgaaaacctgatactgctggtagtcagttaccactgcttagagagaaataaggccctgatgacatcactagagtcagaatcaagctaactctcagtctatctctggactttttagttacataaaccaatacttttgtactgctctttctgctttagccaatttaagtgttttctctctcttggaagacaactcttgtatctagctgatactatgtaatttaatgttaacaaaacacataaagaaacttgagaaagttaaccaaagttaaccatgtttctttgctgtaaacaaaaaataaaaaacacagtgtctaaatttgtaggtaggatatgaacatctgc

SEQ ID NO: 690102 - DNA, 1190 bp, Homo sapiens
atcaggccttagtttaaatctgtttcattgttaacagccataaaatgtcaaaacaaaacaaaacaaaacataaagcaaaaccttaatgcctgacaaggacagaatcaggtgcaatatttgtaaacacttggaaagacactcttatggtattagctgtgggttttaaataaaaattaaaaaataagaccctccacattaactgacagagggaaaattctggactacagcatagaccagatccgtagttcaatgcagaatttcttatactcccgtattgtaagttccagtatttatttttgtagtcagcaattacaattattcatgatcgcatttttatcaaccatcatgcttatacagctacctcacaaaagttatattccagtatttagtaaaaagtcagcatttttaaatgctttactataaaactcagtatctgacatgcatttttttyccattggttctgccctaaaacctctatctccccatgaagggattcagtatcccttgtaaagtgttagaagtacttgaagaattgtcatgtaactgtattatttttgccatggagcatacattcctagttcttatgataatttgctgaatcgtatttgaagatctgctaatgcccatcattagtccacataactgaatggaaattcccttccccttcaccctcattcaggagaggatacatgacccagacttggacaagtattgcatttccctagtcacaacgattaggttaagctacgtgataaaatcagattcaatagaattaattctgggatgcaggtggatcttccccaaggcttttattttattttactttgtttatacttgtccttggaatatgaaaacctgatactgctggtagtcagttaccactgcttagagagaaataaggccctgatgacatcactagagtcagaatcaagctaactctcagtctatctctggactttttagttacataaaccaatacttttgtactgctctttctgctttagccaatttaagtgttttctctctcttggaagacaactcttgtatctagctgatactatgtaatttaatgttaacaaaacacataaagaaacttgagaaagttaaccaaagttaaccatgtttctttgctgtaaacaaaaaataaaaaacacagtgtctaaatttgtaggtaggatatgaacatctgc

SEQ ID NO: 690103 - DNA, 1190 bp, Homo sapiens
atcaggccttagtttaaatctgtttcattgttaacagccataaaatgtcaaaacaaaacaaaacaaaacataaagcaaaaccttaatgcctgacaaggacagaatcaggtgcaatatttgtaaacacttggaaagacactcttatggtattagctgtgggttttaaataaaaattaaaaaataagaccctccacattaactgacagagggaaaattctggactacagcatagaccagatccgtagttcaatgcagaatttcttatactcccgtattgtaagttccagtatttatttttgtagtcagcaattacaattattcatgatcgcatttttatcaaccatcatgcttatacagctacctcacaaaagttatattccagtatttagtaaaaagtcagcatttttaaatgctttactataaaactcagtatctgacatgcatttttttcccattggttctgccckaaaacctctatctccccatgaagggattcagtatcccttgtaaagtgttagaagtacttgaagaattgtcatgtaactgtattatttttgccatggagcatacattcctagttcttatgataatttgctgaatcgtatttgaagatctgctaatgcccatcattagtccacataactgaatggaaattcccttccccttcaccctcattcaggagaggatacatgacccagacttggacaagtattgcatttccctagtcacaacgattaggttaagctacgtgataaaatcagattcaatagaattaattctgggatgcaggtggatcttccccaaggcttttattttattttactttgtttatacttgtccttggaatatgaaaacctgatactgctggtagtcagttaccactgcttagagagaaataaggccctgatgacatcactagagtcagaatcaagctaactctcagtctatctctggactttttagttacataaaccaatacttttgtactgctctttctgctttagccaatttaagtgttttctctctcttggaagacaactcttgtatctagctgatactatgtaatttaatgttaacaaaacacataaagaaacttgagaaagttaaccaaagttaaccatgtttctttgctgtaaacaaaaaataaaaaacacagtgtctaaatttgtaggtaggatatgaacatctgc

SEQ ID NO: 690104 - DNA, 1190 bp, Homo sapiens
atcaggccttagtttaaatctgtttcattgttaacagccataaaatgtcaaaacaaaacaaaacaaaacataaagcaaaaccttaatgcctgacaaggacagaatcaggtgcaatatttgtaaacacttggaaagacactcttatggtattagctgtgggttttaaataaaaattaaaaaataagaccctccacattaactgacagagggaaaattctggactacagcatagaccagatccgtagttcaatgcagaatttcttatactcccgtattgtaagttccagtatttatttttgtagtcagcaattacaattattcatgatcgcatttttatcaaccatcatgcttatacagctacctcacaaaagttatattccagtatttagtaaaaagtcagcatttttaaatgctttactataaaactcagtatctgacatgcatttttttcccattggttctgccctaaaacctctatctccccatgaagggattcagtatccctygtaaagtgttagaagtacttgaagaattgtcatgtaactgtattatttttgccatggagcatacattcctagttcttatgataatttgctgaatcgtatttgaagatctgctaatgcccatcattagtccacataactgaatggaaattcccttccccttcaccctcattcaggagaggatacatgacccagacttggacaagtattgcatttccctagtcacaacgattaggttaagctacgtgataaaatcagattcaatagaattaattctgggatgcaggtggatcttccccaaggcttttattttattttactttgtttatacttgtccttggaatatgaaaacctgatactgctggtagtcagttaccactgcttagagagaaataaggccctgatgacatcactagagtcagaatcaagctaactctcagtctatctctggactttttagttacataaaccaatacttttgtactgctctttctgctttagccaatttaagtgttttctctctcttggaagacaactcttgtatctagctgatactatgtaatttaatgttaacaaaacacataaagaaacttgagaaagttaaccaaagttaaccatgtttctttgctgtaaacaaaaaataaaaaacacagtgtctaaatttgtaggtaggatatgaacatctgc

SEQ ID NO: 690105 - DNA, 1190 bp, Homo sapiens
atcaggccttagtttaaatctgtttcattgttaacagccataaaatgtcaaaacaaaacaaaacaaaacataaagcaaaaccttaatgcctgacaaggacagaatcaggtgcaatatttgtaaacacttggaaagacactcttatggtattagctgtgggttttaaataaaaattaaaaaataagaccctccacattaactgacagagggaaaattctggactacagcatagaccagatccgtagttcaatgcagaatttcttatactcccgtattgtaagttccagtatttatttttgtagtcagcaattacaattattcatgatcgcatttttatcaaccatcatgcttatacagctacctcacaaaagttatattccagtatttagtaaaaagtcagcatttttaaatgctttactataaaactcagtatctgacatgcatttttttcccattggttctgccctaaaacctctatctccccatgaagggattcagtatcccttgtaaagtgttagaagtacttgaagaattgtcatgtaactgtattatttttgccatggagcatacattcctagttcttatgataatttgctgaatcgtatttgaagatctgctaatgcccatcattagtccacataactgaatggaaattcccttccccttcaccctcattcaggagaggatacatgacccagacttggacaagtattgcatttccctagtcacaacgattaggttaagctacgtgataaaatcagattcaatagaattaattctgggatgcaggtggatctkccccaaggcttttattttattttactttgtttatacttgtccttggaatatgaaaacctgatactgctggtagtcagttaccactgcttagagagaaataaggccctgatgacatcactagagtcagaatcaagctaactctcagtctatctctggactttttagttacataaaccaatacttttgtactgctctttctgctttagccaatttaagtgttttctctctcttggaagacaactcttgtatctagctgatactatgtaatttaatgttaacaaaacacataaagaaacttgagaaagttaaccaaagttaaccatgtttctttgctgtaaacaaaaaataaaaaacacagtgtctaaatttgtaggtaggatatgaacatctgc

SEQ ID NO: 690106 - DNA, 2528 bp, Homo sapiens
  misc_feature 1037, 1038, 1039, 1040, 1041, 1042, 1043, 1044, 1045, 1046,1047, 1048, 1049, 1050, 1051, 1052, 1053, 1054, 1055, 1056,1057, 1058, 1059, 1060, 1061, 1062, 1063, 1064, 1065, 1066,1067, 1068, 1069, 1070, 1071, 1072, 1073, 1074, 1075: n = A,T,C or G
  misc_feature 1076, 1077, 1078, 1079, 1080, 1081, 1082, 1083, 1084, 1085,1086, 1087, 1088, 1089, 1090, 1091, 1092, 1093, 1094, 1095,1096, 1097, 1098, 1099, 1100, 1101, 1102, 1103, 1104, 1105,1106, 1107, 1108, 1109, 1110, 1111, 1112, 1113, 1114: n = A,T,C or G
  misc_feature 1115, 1116, 1117, 1118, 1119, 1120, 1121, 1122, 1123, 1124,1125, 1126, 1127, 1128, 1129, 1130, 1131, 1132, 1133, 1134,1135, 1136: n = A,T,C or G
cacagtttaaggaaccagggtttggaaaggaggacctgtgtaggttttgcacattcattcactcatttaaatcatgtttatgcaggagctgcattatgctagacaatgtaaatattatggtgaacatgactcatgtattcctgccttcctgtagtctatgtctggtgaggaagacagaatgcacataatcttgaaaagaaaagcaaaacgaactgtggactgtggtagagatattaaaacatgtgtaaggaatcaaggaaattctccttagtgtcttctaaactaagatctgaatgttcagaaaagctaaagtatggggacagtggtagcagcagatgaggcagaacagaaaggtagatgtttattctatagataagtgtttcataaggaaatgataagatcattcatatctttaaagatccattaagagcttcttgcaatgaaacaggtgaggtgtgcatcaggtgacagctacagagatgaagaaaggtggaacactgmgcgagctgtttgtaggctagagttgtcagttctgtacactagggcttgatgtttgatcaatcaggatggggagaaagaacaacatgtcaaatgtgatgcccagacccagcactggggagctgagtggatggtgtgtttattaacctagaaagcacagaagaacagaaagtttgaaactaaggatataagtaagatgctttcaaagcacccaaaaggagatgttcagtaggcagtttgatatccaggtttgtgtctctgttcgggagtctgggctgcaagaaaattcttaaaaagggcttagccgaattcctagcacataatgaacattcaggaagtgtcagctacatatattaataatattattgtgtctcatattattattggtacataagaatgtaaccattatcaaccaaaaaaagacagaaaactaaagccctacagtcatggagaaaaagtctttcattcatttcaactgtgtggtaaaatgtacacccaatgaaaatacaaacataatccatttctttttttaaaaaaannnnnnnnnnnnnnnnnnnnnnnnnnnnnnnnnnnnnnnnnnnnnnnnnnnnnnnnnnnnnnnnnnnnnnnnnnnnnnnnnnnnnnnnnnnnnnnnnnnntaatgttatttttgagtgacttgtatgttgcaggtaacatattccagataacatattccagaaatcactgactatttgggacacaatgattggaagtcggagaatgcctggaatagattcttgtgcctgccttcaattcagtgtcctgaggcacatcaggagataaatggaagcttggtgagagtgataaattaggtactgacattgaggctcattggggctgactgtggtgagcaatgatctgattctcatgaagtatatcacatgctttttggaccctgccggatgtcctgtcaatctcacatctgtttctggctctggctcgggcaatcattgtaggcagcctttgactcagttgtgctatttcccatctcaagcttgcgctgagtatctttcactttcttttctgtgactttactagcatgtcttatctttccccctgcttctgaccgtggtccatgcagcctggaagtgaggaggagctaacaccaccatggagcctcgcagtcagtgggaatgggtggatagttccgagacgcactctgcagctcctcataaggtccaagtgagaaggagcctcaaccggccatggaagtgacccaactgcatgcacctgtattagcctttactctctccctggttcactttacccggtgcctcactcctactctccgggatcaccttgtattatttgcacataattttttagttcagactctgcttttgaagagagcctggcctaagatttatgactttccttctctagagaaaaatgaataagagaaagaaaagcaggactaaatcataagctacatccattacaatgagagaaaaaaagaaagaagataaaacatgtattttcagagatactttctttacaaatctgtcatctttcagatcaccaagtgagaccatttaaataatttttctagtaactgtgaggtcatctgttgacataatgattaatttgcatctcttccttcttttttactatactttaatatgtagttattggcagtctactctatgctcaacactcagctaggtcctggtaatgtaatgatgagtgaaagatgtggcatgattcctgcctctttggagctttttatttctgtgaaattaattaaataatcacacaagccagtgcacatacgcaaaagtgagtataatgaaggccagatgcacagtaatggggaagcctattagaggggagtttgactcagccagggaggtctggggaagcctccttgaggaggtgacattttacctgacatctgaaggaagggttaatgaggtggagaaaaaagataaaaattttctaacagagggagaaatgaagtgtgctcaaggtcctactgttgggggaagtttgaaagactcacagtcagaggg

SEQ ID NO: 690107 - DNA, 1249 bp, Homo sapiens
gccaaacagttttaaattctttgtaaatatcttaattaagctcaggataatcctatgaaatattttatacgtgaagcagcttaggcttagagagcttgaatgacacacccaaggtcacactgtaaatgacagaattaggatttaacccaagtcctgtgtaactccaaagaccctyctttttcccaaaacttacaccttctccaaaggtgacagcagggtggcaggtgaatataaaaacaaaaagaaaaacctattcagaaatgaagaaatgagaattttattatcttgttcttaaactagaaatgacccttaagaatcacagtgagactagagtataggttagcatccaactcagggtcctgcctaggtttctctggtctcctctaaagcagacattcatttcttcatttaacaccaatttactgggcacctagtaagagcttagcactgtgggagtcaacaatacagcacagtgaactagagtcttcattcagaaaagccaaacaattaacaagtaaataaacaacaaaaaaaagcaaaataattgggaggcctgggttttcctgacatattgacatttgaattgagacctgaagaatgggaagaaaacagctgtaggaagaattttctaggcagagagaatatcaaatgcaaggatctggggcaagaaagagtttcacttggaagaacctgacaaaacaggctaatgtagcctcatgagcacttgcttgggtgacaggaaatggtgttgagaggtagatgcagccttgaggccaagatgagcccctcctttttctccctgtattcaactttctatccctgtcgccaaacacatgccctttcagtttggatgatggcccagccagaaaaatacaccatgttttcattctcagtatacctcctgcaagacctatgtctcagtaaccactatgagtgctactcagtgataatgcctcacatttatatgggcatttacaaattacaacaggctttcagacatctcttttactcctcacaaccaaagtgttagggtaatctagtggcgcccggaccatggaatcagtcacacctagacacacatcaaagctctgctaccccaccagctatgtgacctcagattagtcactcacctaatctctatagatcccaggtttcttgttttaaaataggagtatctctctcactgcatttattttgtgaggattaaacaagataaagtatccagattgcatagcatatggcctggcag

SEQ ID NO: 690108 - DNA, 1249 bp, Homo sapiens
gccaaacagttttaaattctttgtaaatatcttaattaagctcaggataatcctatgaaatattttatacgtgaagcagcttaggcttagagagcttgaatgacacacccaaggtcacactgtaaatgacagaattaggatttaacccaagtcctgtgtaactccaaagaccctcctttttcccaaaacttacaccttctccaaaggtgacagcagggtggcaggtgaatataaaaacaaaaagaaaaacctattcagaaatgaagaaatgagaattttattatcttgttcttaaactagaaatgacccttaagaatcacagtgagactagagtataggttagcatccaactcagggtcctgcctaggtttctctggtctcctctaaagcagacattcatttcttcatttaacaccaatttactgggcacctagtaagagcttagcactgtgggagtcaacaatacagcacagtgaactagagtcttcattcagaaaagccaaacaattaacaagtaaataaacaacaaaaaaaagcaaaataattgggaggcctgggttttcctgacatattgacatttgaattgagacctgaagaatgggaagaaaacagctgtaggaagaattttctaggcagagagaatatcaaatgcaaggatctggggcaagaaagagtttcacttggaagaacctgacaaaacaggctaatgtagcctcatgagcacttgcttgggtgacaggaaatggtgttgagaggtagatgcagccttgaggccaagatgagcccctcctttttctccctgtattcaactttctatccctgtcgccaaacacatgccctttcagtttggatgatggcccagccagaaaaatacaccatgttttcattctcagtatacctcctgcaagacctatgtctcagtaaccactatgagtgctactcagtgataatgcctcacatttatatgggcatttacaaattacaacaggctttcagacatctcttttaytcctcacaaccaaagtgttagggtaatctagtggcgcccggaccatggaatcagtcacacctagacacacatcaaagctctgctaccccaccagctatgtgacctcagattagtcactcacctaatctctatagatcccaggtttcttgttttaaaataggagtatctctctcactgcatttattttgtgaggattaaacaagataaagtatccagattgcatagcatatggcctggcag

SEQ ID NO: 690109 - DNA, 399 bp, Homo sapiens
tcatcctgaaattcctatcacagctaatggacatgttatttaaagtgtcacaaagttattgtagaataaagttagccacacaaggggactgggagacacattttgaatagatctttctcagtccttttcaaaatagttctgccataaggtctaaaccttgaataaagtcctgggaaatatacactaagctgagcatatagatgcttgttagaaagtgtttcctttttggatctttgagttctttggcatgagtcatcatcaactgtaaaagagcttttgatggcgtcaagagcgtgtccctgtctatatggacagactctgactccttctcggaggataattgataccagaaaaggtgctctgaaagcaagtctacttcayggtatttcatggtaaata

SEQ ID NO: 690110 - DNA, 606 bp, Homo sapiens
tttctgttacaaattacatgccttaagttgacatccgaaagacttgccccaagtactttaaatagaactgacaacctgtattccagatctaacrttggttattccaaataaggctttggaattctcaccccaccataaaatacctttaaaaatacattttttttcaatttgccctgaaagttaaaaatttctagagtaaaaatgtgatttataatgaggattcagtgtttctattgaaagatggtttttttgtttgttttgtttttgtttttgtttttttgaaacggagtcttgctctgtcaccaggctggagtgcagtggcgcaatcttggctcacttgaacctctgcctcccggtttcaagcaattctcctgcctcagcctcccaagtagctgaaactacaggcactggccaccatgcccagctaatttttggatttttactagagacggggtttcaccgtgttggccaggatggtctcgatctcttgacctcatgatctgcctgcctcggcctcccaaagtgctgagattataggcgtgagccactgtgcctggccaaaagatgttatttttttttagcatccattcgttgtgaatttcaata

SEQ ID NO: 690111 - DNA, 611 bp, Homo sapiens
gactgacataaccagtgctcggcaccagagtagcttctgaaattgaatacgactctttctactccacttaatactgtcagtacagcagttcaggtctggctgtcccttgcacagttgctggcccgattagtgcagcacagtgtaaagattacaagtccctgttctgctccaagtgtcagtgatttaatcagccccttcaggtgaaatgcaaagccacaaattcagtggcagaaggtggtggtggtgtgaatatacccattgatttccacttacaaaaacagttttctttggagagtgactctttaattaccctttgctggcgtctggtaggccagtttcctcatgacagattaaatttaccacattctgttttgataccaagtgaaaatttccgagtcattctgattatctttctccttctttctgctgtgacccttcattaccycctgtggcctttccttctgttctgttcgcaggtgctttaactttcttttcctacaattttcaattatacacccactctgttttgtccttctttttctttttttactgatagagagatacagatgttgccctgtaatttctcctaacagcttgaaaggacaaaaata

SEQ ID NO: 690112 - DNA, 1104 bp, Homo sapiens
caaacagcacagtgagggcrtgagctcagcggccaggcaggcctttgagctgtgctctgctgattactagttgagaggctttgggagttactcgtcctttgcgtgcctcagtttttccagctgtaaagtgggaatcacagtagcctctggcttagagggctgccgagaggactgatgggcatgtggaacacacacacatggggcccggggacagcgagcgctgtggggtgctggccatccccccttcccaccctccaccccccacccctgtcctctctgctggctctgctttcctgcctgctgacgcctgccttgtgcagctatgacccaccacaacacgaaccaaatccactaattactccgagtacgccacgcttggcagctgaagacatctagctggggtccccatattttcctgttcagtcgctagtttgtaaaataacacctcccttctcctggtctctgccgccccgcatcccagtaccgcctcctccggccattcatggcctgcgtgtcttgtgaatccagcgtgcatctctgtcctccagaggcctcccgtgattaatccctcctgatcccctcctaggcggacggtcccttcagccctcacaaattcagttcacattacagcagtggttctctactgggggtgactttgtgcccaaggggacatttggcaatgtcgggagataatttttttggcacaattctagtgggtagaaggtggggatgctgctcaataccctgcaatacacaggggtgggggtgcggggcccacaacaaggaattatctggcaacagggcaggggctgtaaaccctgcattacaataatctgtccttgttgatgctgctctgtttaaaaaaaagaagctatcaggggttgcactgtgcgtgctagccctccagctggaattcttttgattcttctatagcacctaagacaataccatgcctaagatggattaactgataatgattaattttctaagtaaacagctatccaggaacatttttcattacatgtctgggatatcctacgataaaaaatagccacgtaaatgtttgaaaagtctgtgttccttgagagaaaaaatggggaattc

SEQ ID NO: 690113 - DNA, 1104 bp, Homo sapiens
caaacagcacagtgagggcatgagctcagcggccaggcaggcctttgagctgtgctctgctgattactagttgagaggctttgggagttactcgtcctttgcgtgcctcagtttttccagctgtaaagtgggaatcacagtagcctctggcttagagggctgccgagaggactgatgggcatgtggaacacacacacatggggcccggggacagcgagcgctgyggggtgctggccatccccccttcccaccctccaccccccacccctgtcctctctgctggctctgctttcctgcctgctgacgcctgccttgtgcagctatgacccaccacaacacgaaccaaatccactaattactccgagtacgccacgcttggcagctgaagacatctagctggggtccccatattttcctgttcagtcgctagtttgtaaaataacacctcccttctcctggtctctgccgccccgcatcccagtaccgcctcctccggccattcatggcctgcgtgtcttgtgaatccagcgtgcatctctgtcctccagaggcctcccgtgattaatccctcctgatcccctcctaggcggacggtcccttcagccctcacaaattcagttcacattacagcagtggttctctactgggggtgactttgtgcccaaggggacatttggcaatgtcgggagataatttttttggcacaattctagtgggtagaaggtggggatgctgctcaataccctgcaatacacaggggtgggggtgcggggcccacaacaaggaattatctggcaacagggcaggggctgtaaaccctgcattacaataatctgtccttgttgatgctgctctgtttaaaaaaaagaagctatcaggggttgcactgtgcgtgctagccctccagctggaattcttttgattcttctatagcacctaagacaataccatgcctaagatggattaactgataatgattaattttctaagtaaacagctatccaggaacatttttcattacatgtctgggatatcctacgataaaaaatagccacgtaaatgtttgaaaagtctgtgttccttgagagaaaaaatggggaattc

SEQ ID NO: 690114 - DNA, 1104 bp, Homo sapiens
caaacagcacagtgagggcatgagctcagcggccaggcaggcctttgagctgtgctctgctgattactagttgagaggctttgggagttactcgtcctttgcgtgcctcagtttttccagctgtaaagtgggaatcacagtagcctctggcttagagggctgccgagaggactgatgggcatgtggaacacacacacatggggcccggggacagcgagcgctgtggggtgctggccatccccccttcccaccctccaccccccacccctgtcctctctgctggctctgctttcctgcctgctgacgcctgccttgtgcagctatgacccaccacaacacgaaccaaatccactaattactccgagtacgccacgcttggcagctgaagacatctagctggggtccccatattttcctgttcagtcgctagtttgtaaaataacacctcccttctcctggtctctgccgccccgcatcccagtaccgcctcctccggccattcatggcctgcgtgtcttgtgaatccagcgtgcatctctgtcctccagaggcctcccgtgattaatccctcctgatcccctcctaggcggacggtcccttcagccctcacaaattcagttcacattacagcagtggttctctactgggggtgactttgtgcccaaggggacatttggcaatgtcgggagataatttttttggcacaattctagtgggtagaaggtggggatgctgctcaataccctgcaatacayaggggtgggggtgcggggcccacaacaaggaattatctggcaacagggcaggggctgtaaaccctgcattacaataatctgtccttgttgatgctgctctgtttaaaaaaaagaagctatcaggggttgcactgtgcgtgctagccctccagctggaattcttttgattcttctatagcacctaagacaataccatgcctaagatggattaactgataatgattaattttctaagtaaacagctatccaggaacatttttcattacatgtctgggatatcctacgataaaaaatagccacgtaaatgtttgaaaagtctgtgttccttgagagaaaaaatggggaattc

SEQ ID NO: 690115 - DNA, 1104 bp, Homo sapiens
caaacagcacagtgagggcatgagctcagcggccaggcaggcctttgagctgtgctctgctgattactagttgagaggctttgggagttactcgtcctttgcgtgcctcagtttttccagctgtaaagtgggaatcacagtagcctctggcttagagggctgccgagaggactgatgggcatgtggaacacacacacatggggcccggggacagcgagcgctgtggggtgctggccatccccccttcccaccctccaccccccacccctgtcctctctgctggctctgctttcctgcctgctgacgcctgccttgtgcagctatgacccaccacaacacgaaccaaatccactaattactccgagtacgccacgcttggcagctgaagacatctagctggggtccccatattttcctgttcagtcgctagtttgtaaaataacacctcccttctcctggtctctgccgccccgcatcccagtaccgcctcctccggccattcatggcctgcgtgtcttgtgaatccagcgtgcatctctgtcctccagaggcctcccgtgattaatccctcctgatcccctcctaggcggacggtcccttcagccctcacaaattcagttcacattacagcagtggttctctactgggggtgactttgtgcccaaggggacatttggcaatgtcgggagataatttttttggcacaattctagtgggtagaaggtggggatgctgctcaataccctgcaatacacaggggtgggggtgcggggcccacaacaaggaattatctggcaacagggcaggggctgtaaaccctgcattacaataatctgtccttgttgatgctgctctgtttaaaaaaaagaagctatcaggggttgcactgtgcgtgctagccctccagctggaattcttttgattcttctatagcacctaagacaataccatgcctaagatggattaactgataatgattaattttctaagtaaacagctatccaggaacatttttcattacatgtctgggatatcctacgataaaaaatagccacgtaaakgtttgaaaagtctgtgttccttgagagaaaaaatggggaattc

SEQ ID NO: 690116 - DNA, 602 bp, Homo sapiens
attctcccagctcagcctcctgagtggctggaactacaggtcctcaccaccacacctggctaattttttgtgtgttttgtagaaacactttgytgcccaggctggtctcaaactcctgggctcgagtaatcctcctgcctcagcctcccaaagtgctgggattacaggaataagccaccacacccagcctagaacagtgacctcatacctgcctaccatgatcccctccttcaatctgtcccaaccaccaccgccagctccaatcacacgtgtctctgctcaaaagccctccatgcttccgccgttcctaccaaatgaagctcgagctccttatctggtgtccaagtcccccacagtcaccttctctccctctctctcactgccccctcctgaatcccagcaatggccacacctaacatttgggcgtctcaggcaggcacccgctttcactcaccgccagcgctgcctgtccagcccacgtgtctggaacacccgcacctcccattcagcatgttgatgctcccaactttccagttccagctcaataccgcttcctgaaaagccttggtagagtttctgggctcaccccctaagcagaaggg

SEQ ID NO: 690117 - DNA, 602 bp, Homo sapiens
attctcccagctcagcctcctgagtggctggaactacaggtcctcaccaccacacctggctaattttttgtgtgttttgtagaaacactttgttgcccaggctggtctcaaactcctgggctcgagtaatcctcctgcctcagcctcccaaagtgctgggattacaggaataagccaccacacccagcctagaacagtgacctcatacctgcctaccatgatcccctccttcaatctgtcccaaccaccaccgccagctccaatcacacgtgtctctgctcaaaagccctccatgcttccgccgttcctaccaaatgaagctcgagctccttatctggtgtccaagtcccccacagtcaccttctctccctctctctcactgccccctcctgaatcccagcaatggccacacctaacatttgggcgtctcaggcaggcaccsgctttcactcaccgccagcgctgcctgtccagcccacgtgtctggaacacccgcacctcccattcagcatgttgatgctcccaactttccagttccagctcaataccgcttcctgaaaagccttggtagagtttctgggctcaccccctaagcagaaggg

SEQ ID NO: 690118 - DNA, 601 bp, Homo sapiens
tcagagagacctgcagctgaaggtctttggagaggtggtcacctgcttctttgaggctcgcctgtgtagactactgttttatgtaatggtggcattccaccttccccagcccagtgctcctcctgccttgcaaacggacgacccgtactccaaagctcactccgtgacacccaaaagcactcctcgtgtcacgtgatgcggagagctcccccttccacctttcccgcctcacggacacctgctctgcagcgcctcggtcacgaagtccttcccggatttcctcttgccgctgaacagcagtaccagccgcggggcgcctcccagcggggccatggggccgccacgcctcgcgatgcctgaagctgacacttctccctacccctaaaatcgggacaccgcgcggaatggacgcggccactaagcggagcggcaacaaggarcaatcgcgcccctcctcgccgtagctgcgaacagggctgaccgcccgcgaccgtgccctcagctcatgtccaaacagatatggggagaaaagggtgagacacgcggagagaaaggcggttccttcacagagcagcctcccctcgtgaagctcccccacccg

SEQ ID NO: 690119 - DNA, 616 bp, Homo sapiens
tttgatatactttggaaatgccaaagttggattcttagagaggttctatagaatactcaggagcttcttgtaagcaaagtcctgtatctcttggaaatcagttgtttcaggatcaagtacttcatgttcaaagaactggccactagaaaacaatcactctggtgttatacaaaattacaaggaaaattctaaaggaaggaagaatattaatgctccttgaccattatacagtgcagacatcgtawcctctcaacaaccttgtaagacaaatgaagtctcacctttattttatagtttatcaaattaagctatcaagtagccgaggcataggagagcctagatccaaagacttctctatttgacaccaaagactacggtctttctttccctctaatactcagttatatacaactcttcagagcagagttccaaaagcagaggagaatctgcatctattcatctttagttttttcttcttgttaaatatctgtttgatatgcattcgcctatccaagtgttaggaagcaacttttctcttgctttacatgtggttcatgttttcattagaatccttgatgtattattattctttctctttaactaaaaatgtaatata

SEQ ID NO: 690120 - DNA, 3288 bp, Homo sapiens
tgcctaggttgaaaaatgttggtggttgttattacaaacatttctatcaataaagcaatgccacttgtcttgctccagtcccctgaaaggatagttgcatttaatattactccagaccctacaaacgtaactaaaaactatggggactcaatattttctttaacccaattgaagcatcagtgaaatgttttaaatgactccatttaaacattggtacatatttttttttaaaagaaaccactctaaaatggaggcctttcattgatagacacaatgcggttaaacccagtgaaattcgattacctcttgattgggtcgggcaagccaggaagagaattttacatttgaaatcaacaaattgaatttggtaccttttgcagcttcagcaattgctcgccgactagttcctcacaagatcagaggtggccccgtcaacatccaggttctgttgaatgacatgctctgtttagaaaggtttttccttgtttagattctgaatgaatatttgcttccaaagttattacagctacaaaacacatgctgactatacactttccccccaaaatacaaaatatatgaatttatacatatatataattgttgcttaaaagaacttatatataatatataaataaatatgtatgtatttatacacatatatgccttttgcttataagaacttataaagttcttatatataagctcttttaagcaacagttacatatacgtgtgtgtatatatagatacacaaatatatatacacatatgtatatacacgtgtgtttgtgtgtgtgtgtgtatatatatatattttacccagtatggctggtatgctaaatatccagctatacatcatcagtgttaataaggtcttttactaattttttttgtcttatacagataaccacaattaacaatttctttaagtcaacatgctaagtcagcaatgggcaaaatattgctattctgctgactgcatatttttaaaaatattttattctctccctccccactgtctccaccacacacaaagattgcacacctattttgtgcatgtcaactgaatgaacatgtgcattggagacatgctgatcctggggtgcagcctggcacctggaaactatcaagcgcatataattgcaacaggtgacatgtgtttttgttttacatatggtttattctaagaagatctttctgatctttgtctcaagattaaagccaaaatctataatttggccacctggccaagaagaccccacaatgggggcccccagctacttttccaccccatcctgcaccaccattccctttcccaccatcttccagttttccaggccacattttattcccccatgtgttacgccctttgcctatacaggagcttggtacgtgttctttcctgttttctaagctttatcgggacataattcacataccatacaatttgcccatttaaactgtacaattctcccatcctccacccagtcctaagcaaacactaacctgcttttgtctccatagatttacctattctaaacactttatagaaatggaatcatagaatatgtggtcttttgtgactagcttctttcactgagcataatgttttcaaggcttatccatattgtagcatgtatcartactttacttttttgacaaataatattcttttgtatgaataaactacatcttatttattcattcgtcagttaatagacattgcagttgtttctcctgtttggctattatgaataatgctgctgtgaacactcttgtacaagattttgtgtagacaaatgttatcatttctcttgggtatgtatctaggagtggaattgctggaatggagtcatatgataactctatatttaaccacctgaaaaactgccagactgttttccaaagtggctgcatcattttacattctccccagcaaacatgaaagttccaatttctctgcatccttaccaacacttataattccaatcttatactctttctttttatagccaccctagtggatgtgaagtagtatctcattgtgctttctttcttaacttttcatctgggtaattcctattatctttaaatctccagcctaaaagtcacttccatagggaatcttaccttggctaccccaccctcaaactagcctcagattcctctcagaaaacccatcctttctctctaaactttaagttcaacatggacaggcaccattccatctcttctttattccccactctagccccagcatctagctatttatttatttatttatttatttatttatttatttatttatttgagacggagcttggctcttgttgtccaggctgaggtgcaatggcctggttttggctcgctgcaacctctgcctcccgggttcaagtgattctcctgcctcagcctcccgagtagctgggattacaggtgcccgccaccatgtctggctaatttttgtatttttaatagagacgaggtttcaccatgttggtcaggctggtctcgaactcctgacctcaggcagtctgcctgcctcggcctcccaaagtgctgtgattacaggcatgagccaccgcacccggccgcatctggctattatgtgaactataaagttgttgaaagtgtattaagtcaatgccactttttttaaataatgagaaaaagtgtgtattatctgaaaatcacctgtgtcagaataattgacatgattacctttaaatccatttcatttttcagtatttctacagacaaaactattgaggaagattctaatatcactggcaagggtaggaaaggggctctatgatataaccataatgaatgcttctgttgtcctgaattttgttggagctgtacacatttatgtttgttaagaaaaaggatttttgtgggaaagtgcaatatatacaagcaaaaacaaatggacttgagaaataaggaacttaaggggactggattttcctgctttagctgtgagctaagcatacctctagaggtttcaattcagtagatctgagatggggcccaggaatatgcattttaaacatagtccctagtaattctaacgccagtggtccatgagcttcactttaaaaatatatatatcctagttaatgtccttattatttaacataaacaagtcaatgtagaagtttaaaaatcaggctctggagtttgatgcagatttaaacccctggactgacatttactatgtggcttagaacgaattacttaatctttctaagccttagtttctggcccataagaaatgccccaatatg

SEQ ID NO: 690121 - DNA, 3288 bp, Homo sapiens
tgcctaggttgaaaaatgttggtggttgttattacaaacatttctatcaataaagcaatgccacttgtcttgctccagtcccctgaaaggatagttgcatttaatattactccagaccctacaaacgtaactaaaaactatggggactcaatattttctttaacccaattgaagcatcagtgaaatgttttaaatgactccatttaaacattggtacatatttttttttaaaagaaaccactctaaaatggaggcctttcattgatagacacaatgcggttaaacccagtgaaattcgattacctcttgattgggtcgggcaagccaggaagagaattttacatttgaaatcaacaaattgaatttggtaccttttgcagcttcagcaattgctcgccgactagttcctcacaagatcagaggtggccccgtcaacatccaggttctgttgaatgacatgctctgtttagaaaggtttttccttgtttagattctgaatgaatatttgcttccaaagttattacagctacaaaacacatgctgactatacactttccccccaaaatacaaaatatatgaatttatacatatatataattgttgcttaaaagaacttatatataatatataaataaatatgtatgtatttatacacatatatgccttttgcttataagaacttataaagttcttatatataagctcttttaagcaacagttacatatacgtgtgtgtatatatagatacacaaatatatatacacatatgtatatacacgtgtgtttgtgtgtgtgtgtgtatatatatatattttacccagtatggctggtatgctaaatatccagctatacatcatcagtgttaataaggtcttttactaattttttttgtcttatacagataaccacaattaacaatttctttaagtcaacatgctaagtcagcaatgggcaaaatattgctattctgctgactgcatatttttaaaaatattttattctctccctccccactgtctccaccacacacaaagattgcacacctattttgtgcatgtcaactgaatgaacatgtgcattggagacatgctgatcctggggtgcagcctggcacctggaaactatcaagcgcatataattgcaacaggtgacatgtgtttttgttttacatatggtttattctaagaagatctttctgatctttgtctcaagattaaagccaaaatctataatttggccacctggccaagaagaccccacaatgggggcccccagctacttttccaccccatcctgcaccaccattccctttcccaccatcttccagttttccaggccacattttattcccccatgtgttacgccctttgcctatacaggagcttggtacgtgttctttcctgttttctaagctttatcgggacataattcacataccatacaatttgcccatttaaactgtacaattctcccatcctccacccagtcctaagcaaacactaacctgcttttgtctccatagatttacctattctaaacactttatagaaatggaatcatagaatatgtggtcttttgtgactagcttctttcactgagcataatgttttcaaggcttatccatattgtagcatgtatcagtactttacttttttgacaaataatattcttttgtatgaataaactacatcttatttattcattcgtcagttaatagacattgcagttgtttctcctgtttggctattatgaataatgctgctgtgaacactcttgtacaagattttgtgtagacaaatgttatcatttmtcttgggtatgtatctaggagtggaattgctggaatggagtcatatgataactctatatttaaccacctgaaaaactgccagactgttttccaaagtggctgcatcattttacattctccccagcaaacatgaaagttccaatttctctgcatccttaccaacacttataattccaatcttatactctttctttttatagccaccctagtggatgtgaagtagtatctcattgtgctttctttcttaacttttcatctgggtaattcctattatctttaaatctccagcctaaaagtcacttccatagggaatcttaccttggctaccccaccctcaaactagcctcagattcctctcagaaaacccatcctttctctctaaactttaagttcaacatggacaggcaccattccatctcttctttattccccactctagccccagcatctagctatttatttatttatttatttatttatttatttatttatttatttgagacggagcttggctcttgttgtccaggctgaggtgcaatggcctggttttggctcgctgcaacctctgcctcccgggttcaagtgattctcctgcctcagcctcccgagtagctgggattacaggtgcccgccaccatgtctggctaatttttgtatttttaatagagacgaggtttcaccatgttggtcaggctggtctcgaactcctgacctcaggcagtctgcctgcctcggcctcccaaagtgctgtgattacaggcatgagccaccgcacccggccgcatctggctattatgtgaactataaagttgttgaaagtgtattaagtcaatgccactttttttaaataatgagaaaaagtgtgtattatctgaaaatcacctgtgtcagaataattgacatgattacctttaaatccatttcatttttcagtatttctacagacaaaactattgaggaagattctaatatcactggcaagggtaggaaaggggctctatgatataaccataatgaatgcttctgttgtcctgaattttgttggagctgtacacatttatgtttgttaagaaaaaggatttttgtgggaaagtgcaatatatacaagcaaaaacaaatggacttgagaaataaggaacttaaggggactggattttcctgctttagctgtgagctaagcatacctctagaggtttcaattcagtagatctgagatggggcccaggaatatgcattttaaacatagtccctagtaattctaacgccagtggtccatgagcttcactttaaaaatatatatatcctagttaatgtccttattatttaacataaacaagtcaatgtagaagtttaaaaatcaggctctggagtttgatgcagatttaaacccctggactgacatttactatgtggcttagaacgaattacttaatctttctaagccttagtttctggcccataagaaatgccccaatatg

SEQ ID NO: 690122 - DNA, 1349 bp, Homo sapiens
tcccacccccaacttcagcctttcaagatctttttattaatacccacaattactctgatgtgattacattacacattgcatgtctgtttcaaaacatcacatggaccctataaatatatacactattacgcacccataataatgaaaaataaaaaaaaaaatttaaagaaaccacttgctttggtcccatctataatgttagtgcctgattttacctgctcctctggcttccaacttgctgcctgctcctcactcatggctttgtttagtcttgatatttcttggtgggtggcgttttactaagtcctgagatataaaggtgactaaaacaaatccccactgtgagggagtcgagttccctattgcctgactggccactcacctggcactgtgaggccccttctcagcctcagtatccccatcgagtggcctcacctgttcctcggctctggacctgcagggatgggttggacatagagatcatctgacctcttctttctctttccagtttgacttttagagactgaggctgtctgagaccatttaccagctatcactgaacagtgccctaagccttgggtgtcatggagggaacagatatggcccctggccttagattacctacaacatggtgtgggagatggggcacttatgaagaatgtgttgtgagatgtaatttttcagaatgaggagaaatccttcccactaagggattaaggtaggtttcatggaggaggtggcatttaggaagaggcagtggacatcttcaaggtcagataaaacaatcaggtgtcttggttttgctttgagacaggcccaggagttgctgtgattcaggccatgtgaattgttccsccacctgcacaccctgggcatcaaggagaaggcaatatctttgctcacaaagcattttgcaggcctgggaaatggagcttggattgtaaggggtccgaactactttagcgctgcagtggaaatagcctccgcatgagggaggagaagaatcaagcggggaatgtgccagctgaggactggaaaccgcagtcagaagaatggatctgcattttccactcctggcagagaacaggcctcagtcaggaatacaaccagacggctgggcctgggagtctccgaagcaaacctggaactgagtaagtcattatcctgggtgaaattgagtttgaggatgatcaggagaaggggacagacaaagaatcagaaagcgtgacaaaggagctgtctccccatctcaaagcattagacaaggtaaaactgtgatcactagtttcatcatcgtctgttcacgcggaggcccctgtctgctggggtggccagggagggcttcatgg

SEQ ID NO: 690123 - DNA, 935 bp, Homo sapiens
tgttactgtgtgaccttgtacaagtcactcaacctctctgagcctcagttcctcaactgtaaaatgggataataataacacccttgcataaggttgtagagaaaatgagacacaacgtgtgatgattttccttgtgtattaagtccaaacagaagttgcccttatcatattcttgagtaaatggcctaggagtaagttggagtgatggagaaaaatggagctgtggatatcatattgctgtcctttttctgactgaaaagttattttctggccctggaggctgctaaatcatcataaatgtgcaggtacattggaattatctggaaagtcttaaaaactattcatactcatgctccacttccaaggatttctatttagttggtctggggtgaggcctgggcaccaagagcttaaaactccccaggtggttctatcgtgaagccaggctgcaaggccccaggtggtcaatggctcttcacagctggtggggagagctgggagggatatcttctgctttgttccccacttcctgccccagaggccataatgggcaaggggtcagagggaagggcaggggcrggagagtcgccttggctgcagctttgttgtcaagtagaagatggtgttgcaatccacgcggggtccactcagttccctgtgaagactctgtcctgccaggccgtgattcaccccaagatgactccccacaccccttgttggctgtgatagcctggcctgcaaaagaggaaggaggcagctgacagggcatcagtaaatccaagagagcagacatgcccttcgggatgagggacaagaacaggaacaagctgggcttgagacctggggctggaacttagctcaattccccccacaagagagggaagacaacccagtatgggcagtgtgagtggtgcttatggggcctggctgtccaa

SEQ ID NO: 690124 - DNA, 650 bp, Homo sapiens
gagtggcttcaaatcatttatggaaataaatagcttgtaaatttataaaccaacaaaataattagctcctttatgagatgtttatgtgtttttaaaaattatttaggaattctgyttaccattacctagactcaattctccctctctacacaggattttgccctgagagtcacacacaggtttcctgtgcattgagagttttctgcctttcttaggactggtaccaagctagggagcagcaagagttggcacatcttagaaggtgtttccctcagacagggccagcctcagcctggttgtcactctgcccgcagttccacctcacagattcctttaggtgtccgaagtttggggtccttgagatggctcctattcaaatgtccctctgaggaggaacatagtttgagcagcagctgcaactcagaaagaggctcttcagaaacacacgttaagaaagtgccttttgtaagcaagtgtgagctatatactgctccatgtatcaggttgttataattcactccaccctggacccactgattctcaacagacccaaagcaaggcaaacaccaagcaccctgttcacagacagcccctcagcagagggaaatgcaaacacccctgctatccagccataagccagcaaagtggaa

SEQ ID NO: 690125 - DNA, 598 bp, Homo sapiens
tgacacgcccaggtggccaaaccttcgcacctgctgttcctgccatctggactgcccttccccaccctgtctcactggcaaggtcctattctacctgcaaagcccagcttcgaaatgaacatttctgcactatcttgtctaatacaccccaaaccacaacccctccaccagcagatctgacagcgccaatttccctcttcttttgattcactgattgcttgctgctaaaaattactgttttatgacgctaactctactagtaggctgtgagcmcccgaaggcaagggagagggctgattcttcaatatatccactgatctggctctcactcactcttcactcactcatccattcattcatgcactgagcactgaagtgaaccttggttttctgccaccatggcatccgcttcccctagcaacagtcccagttttcatctggggatccatccctctccccaatctcccttctccatgtctcaatggagctcttccctgtcttagcacaagccagatcctgtgatcagctgaaaagagagaatggaacctaagttaactctacagagtaaacataaggtttttgacaagaatggagagac

SEQ ID NO: 690126 - DNA, 1964 bp, Homo sapiens
ctcaagtcattcatcttttgccagtcttatactcttataacttctcccacttgttctttgcttggttctggccatgttatccttccctgactctatttgttttcaccctctctatttggctaagttcatattttgttaaaagcttacaattttaaaatttagttagaataaatgagacattaagttgaataaaatggaggatatagccaaagggaactttgggtcactcattaaagcaacaaatatttatttgctaactagtgtaagacagagattttctggctagcttccttcctctgtgaatctttaacttgatcattcttaccgactttatctgcatcatgcttcttaaattcactgagaagatctgaagaatgagcaaacagcttctccctcagagctctcagagccgactcctccactctgctaatcctgggacaggagatgaaaagcgacattttaacacactggtatagaaaaaatacttagagattttactatatttccactctctctttcttaacatatcagtctcccaagagctcagttttcgagggagagcgcctttactcttccctgttgtacacaaacaggatgagtatggggaatgccgctgtccttcctggtatgggacagtggttagagaagaagttctggagaaggatcacctctgtggtaaagttatctaatcatcctttgcttcagttttcccacctgtaaaacagtgattaaaatggtacctgtctccacttcacaggattattgtgaagattacaatgagtaatttcatgtacagcacttagaagaaagcctggcacatagaaagcactcaccaaatagtatctattatcacaactgttgtgcatttcttgtaatttattatcatgtgaaacagaaggcaaaatttatgaataacaaaataacactagtttagtttttycattcttattgggtcaatagagtaatgctgggcacagtacttggcccaaagtaagtgctcaataaatatctgtagttgaatgaacaagaatataaaaagaggcttggcgtggtggctcatgcctgtaatcccagcactctgggaggccaaggtgggtggattccttgagcccaggagttcgagaccagccttggcaacatggcaaaacccccctctctactcaaagtacaaaaaaaaaattagccaggcgtggtggcgtgtccctgtagtcccagatgcttgtggggctgaggtgggaggatcacttgaacccaggaggtagaggctgcagtgagccaagatcacaccactgcactccagcctgggtgaaaaagtaagaccctgtctcaaaaaaaaaaaaaaaaagaatataaaaagagataaaaggtaagcatacgttacttgtaatgtcttattgaggaaccaatcattctataaataatgaccagataacctatcttttcccgtgttaaaagttaaaaaaaattaaatcatgtttgatgaaaatcttactgcaattgaaggcatttaacatgacagtctttaagtgggctacatagatccttagaagagtgtgaacctagcctggcatggtggcacgtgcctatggtcccagctacttgggaagctaaggtggggaaatcacctgagcctgggaggtcgaggctgcagtgagccaagatcatgccactgcactccagcctggacaaccagaatgagaccctgtctcaaaaaacacaaaaaactgtgaaccagttaggcatggtggctcatgcctataatcccagcactttgggaggctgaagcgggaggatcacttgaggccaggagctcaagaccaccctgggcaacacagctaggctgggtttctttacaaaaaaaacttttaaaaattagccaggcatggtggtgcatgcctgtaatctcagttacttgggagactatggcaggaggattgcttgagcccaggagttcgaggttacag

SEQ ID NO: 690127 - DNA, 1964 bp, Homo sapiens
ctcaagtcattcatcttttgccagtcttatactcttataacttctcccacttgttctttgcttggttctggccatgttatccttccctgactctatttgttttcaccctctctatttggctaagttcatattttgttaaaagcttacaattttaaaatttagttagaataaatgagacattaagttgaataaaatggaggatatagccaaagggaactttgggtcactcattaaagcaacaaatatttatttgctaactagtgtaagacagagattttctggctagcttccttcctctgtgaatctttaacttgatcattcttaccgactttatctgcatcatgcttcttaaattcactgagaagatctgaagaatgagcaaacagcttctccctcagagctctcagagccgactcctccactctgctaatcctgggacaggagatgaaaagcgacattttaacacactggtatagaaaaaatacttagagattttactatatttccactctctctttcttaacatatcagtctcccaagagctcagttttcgagggagagcgcctttactcttccctgttgtacacaaacaggatgagtatggggaatgccgctgtccttcctggtatgggacagtggttagagaagaagttctggagaaggatcacctctgtggtaaagttatctaatcatcctttgcttcagttttcccacctgtaaaacagtgattaaaatggtacctgtctccacttcacaggattattgtgaagattacaatgagtaatttcatgtacagcacttagaagaaagcctggcacatagaaagcactcaccaaatagtatctattatcacaactgttgtgcatttcttgtaatttattatcatgtgaaacagaaggcaaaatttatgaataacaaaataacactagtttagttttttcattcttattgggtcaatagagtaatgctgggcacagtacttggcccaaagtaagtgstcaataaatatctgtagttgaatgaacaagaatataaaaagaggcttggcgtggtggctcatgcctgtaatcccagcactctgggaggccaaggtgggtggattccttgagcccaggagttcgagaccagccttggcaacatggcaaaacccccctctctactcaaagtacaaaaaaaaaattagccaggcgtggtggcgtgtccctgtagtcccagatgcttgtggggctgaggtgggaggatcacttgaacccaggaggtagaggctgcagtgagccaagatcacaccactgcactccagcctgggtgaaaaagtaagaccctgtctcaaaaaaaaaaaaaaaaagaatataaaaagagataaaaggtaagcatacgttacttgtaatgtcttattgaggaaccaatcattctataaataatgaccagataacctatcttttcccgtgttaaaagttaaaaaaaattaaatcatgtttgatgaaaatcttactgcaattgaaggcatttaacatgacagtctttaagtgggctacatagatccttagaagagtgtgaacctagcctggcatggtggcacgtgcctatggtcccagctacttgggaagctaaggtggggaaatcacctgagcctgggaggtcgaggctgcagtgagccaagatcatgccactgcactccagcctggacaaccagaatgagaccctgtctcaaaaaacacaaaaaactgtgaaccagttaggcatggtggctcatgcctataatcccagcactttgggaggctgaagcgggaggatcacttgaggccaggagctcaagaccaccctgggcaacacagctaggctgggtttctttacaaaaaaaacttttaaaaattagccaggcatggtggtgcatgcctgtaatctcagttacttgggagactatggcaggaggattgcttgagcccaggagttcgaggttacag

SEQ ID NO: 690128 - DNA, 1964 bp, Homo sapiens
ctcaagtcattcatcttttgccagtcttatactcttataacttctcccacttgttctttgcttggttctggccatgttatccttccctgactctatttgttttcaccctctctatttggctaagttcatattttgttaaaagcttacaattttaaaatttagttagaataaatgagacattaagttgaataaaatggaggatatagccaaagggaactttgggtcactcattaaagcaacaaatatttatttgctaactagtgtaagacagagattttctggctagcttccttcctctgtgaatctttaacttgatcattcttaccgactttatctgcatcatgcttcttaaattcactgagaagatctgaagaatgagcaaacagcttctccctcagagctctcagagccgactcctccactctgctaatcctgggacaggagatgaaaagcgacattttaacacactggtatagaaaaaatacttagagattttactatatttccactctctctttcttaacatatcagtctcccaagagctcagttttcgagggagagcgcctttactcttccctgttgtacacaaacaggatgagtatggggaatgccgctgtccttcctggtatgggacagtggttagagaagaagttctggagaaggatcacctctgtggtaaagttatctaatcatcctttgcttcagttttcccacctgtaaaacagtgattaaaatggtacctgtctccacttcacaggattattgtgaagattacaatgagtaatttcatgtacagcacttagaagaaagcctggcacatagaaagcactcaccaaatagtatctattatcacaactgttgtgcatttcttgtaatttattatcatgtgaaacagaaggcaaaatttatgaataacaaaataacactagtttagttttttcattcttattgggtcaatagagtaatgctgggcacagtacttggcccaaagtaagtgctcaataaatatctgtagttgaatgaacaagaatataaaaagaggcttggcgtggtggctcatgcctgtaatcccagcactctgggaggccaaggtgggtggattccttgagcccaggagttcgagaccagccttggcaacatggcaaaacccccctctctactcaaagtacaaaaaaaaaattagccaggcgtggtggcgtgtccctgtagtcccagatgcttgtggggctgaggtgggaggatcacttgaacccaggaggtagaggctgcagtgagccaagatcacaccactgcactccagcctgggtgaaaaagtaagaccctgtctcaaaaaaaaaaaaaaaaagaatataaaaagagataaaaggtaagcatacgttacttgtaatgtcttattgaggaaccaatcattctataaataatgaccagataacctatcttttcccgtgttaaaagttaaaaaaaattaaatcatgtttgatgaaaatcttactgcaattgaaggcatttaacatgacagtctttaagtgggctacatagatccttagaagagtgtgaacctagcctggcatggtggcacgtgcctatggtcccagctacttgggaagctaaggtggggaaatcacctgagcctgggaggtcgaggctgcagtgagccaagatcaygccactgcactccagcctggacaaccagaatgagaccctgtctcaaaaaacacaaaaaactgtgaaccagttaggcatggtggctcatgcctataatcccagcactttgggaggctgaagcgggaggatcacttgaggccaggagctcaagaccaccctgggcaacacagctaggctgggtttctttacaaaaaaaacttttaaaaattagccaggcatggtggtgcatgcctgtaatctcagttacttgggagactatggcaggaggattgcttgagcccaggagttcgaggttacag

SEQ ID NO: 690129 - DNA, 1964 bp, Homo sapiens
ctcaagtcattcatcttttgccagtcttatactcttataacttctcccacttgttctttgcttggttctggccatgttatccttccctgactctatttgttttcaccctctctatttggctaagttcatattttgttaaaagcttacaattttaaaatttagttagaataaatgagacattaagttgaataaaatggaggatatagccaaagggaactttgggtcactcattaaagcaacaaatatttatttgctaactagtgtaagacagagattttctggctagcttccttcctctgtgaatctttaacttgatcattcttaccgactttatctgcatcatgcttcttaaattcactgagaagatctgaagaatgagcaaacagcttctccctcagagctctcagagccgactcctccactctgctaatcctgggacaggagatgaaaagcgacattttaacacactggtatagaaaaaatacttagagattttactatatttccactctctctttcttaacatatcagtctcccaagagctcagttttcgagggagagcgcctttactcttccctgttgtacacaaacaggatgagtatggggaatgccgctgtccttcctggtatgggacagtggttagagaagaagttctggagaaggatcacctctgtggtaaagttatctaatcatcctttgcttcagttttcccacctgtaaaacagtgattaaaatggtacctgtctccacttcacaggattattgtgaagattacaatgagtaatttcatgtacagcacttagaagaaagcctggcacatagaaagcactcaccaaatagtatctattatcacaactgttgtgcatttcttgtaatttattatcatgtgaaacagaaggcaaaatttatgaataacaaaataacactagtttagttttttcattcttattgggtcaatagagtaatgctgggcacagtacttggcccaaagtaagtgctcaataaatatctgtagttgaatgaacaagaatataaaaagaggcttggcgtggtggctcatgcctgtaatcccagcactctgggaggccaaggtgggtggattccttgagcccaggagttcgagaccagccttggcaacatggcaaaacccccctctctactcaaagtacaaaaaaaaaattagccaggcgtggtggcgtgtccctgtagtcccagatgcttgtggggctgaggtgggaggatcacttgaacccaggaggtagaggctgcagtgagccaagatcacaccactgcactccagcctgggtgaaaaagtaagaccctgtctcaaaaaaaaaaaaaaaaagaatataaaaagagataaaaggtaagcatacgttacttgtaatgtcttattgaggaaccaatcattctataaataatgaccagataacctatcttttcccgtgttaaaagttaaaaaaaattaaatcatgtttgatgaaaatcttactgcaattgaaggcatttaacatgacagtctttaagtgggctacatagatccttagaagagtgtgaacctagcctggcatggtggcacgtgcctatggtcccagctacttgggaagctaaggtggggaaatcacctgagcctgggaggtcgaggctgcagtgagccaagatcatgccactgcactccagcctggacaaccagaatgagaccctgtctcaaaaaacacaaaaaactgtgaaccagttaggcatggtggctcatgcctrtaatcccagcactttgggaggctgaagcgggaggatcacttgaggccaggagctcaagaccaccctgggcaacacagctaggctgggtttctttacaaaaaaaacttttaaaaattagccaggcatggtggtgcatgcctgtaatctcagttacttgggagactatggcaggaggattgcttgagcccaggagttcgaggttacag

SEQ ID NO: 690130 - DNA, 1964 bp, Homo sapiens
ctcaagtcattcatcttttgccagtcttatactcttataacttctcccacttgttctttgcttggttctggccatgttatccttccctgactctatttgttttcaccctctctatttggctaagttcatattttgttaaaagcttacaattttaaaatttagttagaataaatgagacattaagttgaataaaatggaggatatagccaaagggaactttgggtcactcattaaagcaacaaatatttatttgctaactagtgtaagacagagattttctggctagcttccttcctctgtgaatctttaacttgatcattcttaccgactttatctgcatcatgcttcttaaattcactgagaagatctgaagaatgagcaaacagcttctccctcagagctctcagagccgactcctccactctgctaatcctgggacaggagatgaaaagcgacattttaacacactggtatagaaaaaatacttagagattttactatatttccactctctctttcttaacatatcagtctcccaagagctcagttttcgagggagagcgcctttactcttccctgttgtacacaaacaggatgagtatggggaatgccgctgtccttcctggtatgggacagtggttagagaagaagttctggagaaggatcacctctgtggtaaagttatctaatcatcctttgcttcagttttcccacctgtaaaacagtgattaaaatggtacctgtctccacttcacaggattattgtgaagattacaatgagtaatttcatgtacagcacttagaagaaagcctggcacatagaaagcactcaccaaatagtatctattatcacaactgttgtgcatttcttgtaatttattatcatgtgaaacagaaggcaaaatttatgaataacaaaataacactagtttagttttttcattcttattgggtcaatagagtaatgctgggcacagtacttggcccaaagtaagtgctcaataaatatctgtagttgaatgaacaagaatataaaaagaggcttggcgtggtggctcatgcctgtaatcccagcactctgggaggccaaggtgggtggattccttgagcccaggagttcgagaccagccttggcaacatggcaaaacccccctctctactcaaagtacaaaaaaaaaattagccaggcgtggtggcgtgtccctgtagtcccagatgcttgtggggctgaggtgggaggatcacttgaacccaggaggtagaggctgcagtgagccaagatcacaccactgcactccagcctgggtgaaaaagtaagaccctgtctcaaaaaaaaaaaaaaaaagaatataaaaagagataaaaggtaagcatacgttacttgtaatgtcttattgaggaaccaatcattctataaataatgaccagataacctatcttttcccgtgttaaaagttaaaaaaaattaaatcatgtttgatgaaaatcttactgcaattgaaggcatttaacatgacagtctttaagtgggctacatagatccttagaagagtgtgaacctagcctggcatggtggcacgtgcctatggtcccagctacttgggaagctaaggtggggaaatcacctgagcctgggaggtcgaggctgcagtgagccaagatcatgccactgcactccagcctggacaaccagaatgagaccctgtctcaaaaaacacaaaaaactgtgaaccagttaggcatggtggctcatgcctataatcccagcactttgggaggctgaagcgggaggatcacttgaggccaggagctcaagaccaccctgggcaacacagctaggctgggtttctttacaaaaaaaacytttaaaaattagccaggcatggtggtgcatgcctgtaatctcagttacttgggagactatggcaggaggattgcttgagcccaggagttcgaggttacag

SEQ ID NO: 690131 - DNA, 683 bp, Homo sapiens
aaataaaataatggtctttagagatttatgaaaccctaattatgtctgcatgtgagttctatgtccagcattagtaataattgtttttttaaaaaaacaaaacaaggccgggcacggtggctcacagctgtaatcccagcactttgggaggccaaggcgggtggatcacctgaggttgggagttcgagaccagcctgaccaacatggagaaaccccatctctattaaaaatacaaaattagctgggcatggtgacacatgcctgtaaacccarttactcaggaggctgaggcaggagggagaatcgcttgaatccgggaggtggaggttgcagtgagccaagatcgggccattgcactccagcctgggcaaaaagagcgaaaactgtctcaataaataaataaataaataaataaccaaaacctaaaacacttatttacaacttgaagacatgtcaaaaatgctaaaacagagaaattcttttatgactattagcattttctcagaaaagatcgtttctgggaagtatgagcccttcctgaaattatccttctattttgattaatacaactaaactttaattccttggattgtcaatgttttgagttatctactgctacataacaaatacctcaaaagttagtggtttaaaacaacaataaccacctatgatatttcacaatt

SEQ ID NO: 690132 - DNA, 1744 bp, Homo sapiens
  misc_feature 275, 385, 386, 387, 388, 389, 390, 391, 392, 393, 394, 395,396, 397, 398, 399, 400, 401, 402, 403, 404, 405, 406, 407,408, 409, 410, 411, 412, 413, 414, 415, 416, 417, 418, 419,420, 421, 422, 423, 424, 425, 426, 427, 428, 429, 430: n = A,T,C or G
  misc_feature 431, 432, 433, 434, 435, 436, 437, 438, 439, 440, 441, 442,443, 444, 445, 446, 447, 448, 449, 450, 451, 452, 453, 454,455, 456, 457, 458, 459, 460, 461, 462, 463, 464, 465, 466,467, 468, 469, 470, 471, 472, 473, 474, 475, 476, 477: n = A,T,C or G
  misc_feature 478, 479, 480, 481, 482, 483, 484: n = A,T,C or G
agccgagtttgcaccattgcactccagcctgggggacaagagcgagactttgtctttaaaaaaagagttaaaaaaattaaaatgaaatctaataactaatctgtttacaaaaaaatcatgtctaaaattatcttcatctgtgagaaaaataaaccagtttatgatcaatcaatagtaataaagagattcagctctgtatcatttagtttaagactaagatgagggttatgtcaatgacaattctgtgtctttttgtgtatgttaatcaggatctnccccacccatccccccacgcccccagaaatctcgacacactgatgtaggtaggtagagcttccccctgctcctgaaagcagagtcgcaaaagctcagggtggccactgtnnnnnnnnnnnnnnnnnnnnnnnnnnnnnnnnnnnnnnnnnnnnnnnnnnnnnnnnnnnnnnnnnnnnnnnnnnnnnnnnnnnnnnnnnnnnnnnnnnnntagcatccaacaaatcatagcttatcttcttaccctactagtgctcaatcactaacccaagtatcatcaggcaatagagcctaacagccacacatccccatcttttataaaactctaaaacatatgagtcattaggcaaatactagtgtccttctggggtgttgttaccccagaaagagaaagaggggcctcaaaacatatcctgagtttccctggaagggagagttktgacctgttggcagccacatgctaggaagcagcgcctggccacgctcacctgcctccactcctcctgagtgggcttccgcagctctccggcttcagagtctgcttctgaggctgagcgggagggctcctctttctctccggtcaccaggaggcctgcttgctgccggcaccgctctagctccagttccacggagctccgcacctgccgggagagctcccgcccgtccagggaaccgctgcaggggatgctggaggacctgctggttttctgggccttgtaggagccaagccgaaggggcgaagagggaagagagcggctttcggggagaaaccatgggatgggtccctgtgcagagctcttctggttggctcttctcttctcctccatctgcttctcactcttctgtctcgttttgcacctcatggtggaaactatctaaacacgtccagaaagagatacagatgctggaatgaaactgtaggcccagacaggtgtggtggcccactcctgtaatcctagaactttgggagactgagcccagcagaacactcaagcccgggagttcaagaccagcttgagcaacatggcaagaccgtgtctctacaaaaaatacaaaaaaatgagctggtcatggtggcacatgcctgtagtcccagctactagggaggctgaggtgggaggatcacttgagcccagaaggtcaaggctgcagtaaactgagattgaaccactgcactccagcctgagcaacagagggagaccctgaaaaaagaaagaaagaaagaaagaaagaaagaaagaaaagaaacagagaagccaggtgcggtggctcacgcctgtaatcccagcacattgggagcccgaggcaggctgatcacctgcctgaattgggagttcgagaccagcctgaccaacatggagaaaccccatctctcctaaaaatacaaaattagctggacgtggtggtgcatgcctgtaatcccagctacttgggaggctgaggcaggggaattgcttgaacccgggaggcg

SEQ ID NO: 690133 - DNA, 669 bp, Homo sapiens
tcccgggttcaagtgattgaacctcagatacccaagtagctgggattacaggtgtgcaccaacacayctggctgattttttatatgtttagtagagatgggctttcaccatgttaaccaggctggtcttgaactcctggcctcaagcgatccacctgcctcggcctcccaaagtgctggcattacaagcgtgaaccactgagccaagccaggaggttgttaattccatagcatttctggcctgccatccggatccaggaaataagtcctcagtctggagatgccaatgctggcagctggaagctgctggaaggcactgccaggtctgatgcacctgttgcgctcactaaatgcaacataaatacctgtgatttttccacactggctttcccctttccttctgcttgcaaatccaggtccctaaatttctgtactctctaagtctgacaaatcttgatcttttagaataaaagtagaaagcatgactttttcctcctgcccatcctagactgttgtcactttctccttcctttttcctcttctgtgctggagctgaagctgaagccagattaaccatgtcctgcttcaatagtccagggaaggactttttttttttttttttgagacagggtctcactctatcgttcaggctggagtgcagtagtatcat

SEQ ID NO: 690134 - DNA, 631 bp, Homo sapiens
ctgaggacagattcgcccaggactccgagatgaagaaatgcagtgactatgaatccatagaggtacccgacagttacacggggccacgcctctccttcccactcctgcctgaccatgcaactgccctggtagaagcattcagactgaaacaagtaagctcacctggggaacctgggtcactaccaactccatgaaatgtgtgaagggagacgaaacccagcacagaaagaatggccccagatttagggtgttcatgtcatgtgtccactagagagattctacccctgctgtgcttagccaggaccttgcagtcaatcagccrgttctgatgattgacagcttttcttcctaatcacataatctctcattgttcattcatcccacacataactactgagcactgctgtgtgccccacattgctctgggcactgaggatacagcagtgaacaaaacagataaaatctctgcccttatggggctggcattccatcggggaggcagacaatgaacaataaataacaataaataagacaattatgcagtatattagaaggcgatgagagctatggaaaagaataaactaagttatggatggaagaaatagcaattttatagagttgtctgggaagg

SEQ ID NO: 690135 - DNA, 599 bp, Homo sapiens
cgacactgtccaagaagaaacacgaatattctgggccactagagacgtctgcagtatgtcaggggagcgatgttctgtacctggataacacttccttctagacattctactcactatgccaaaggaaaagttaagcctgggaacygagacactccaaaactgccttccttttgttcccaaacatagctgtaatttcacacggttgctttatcttatgtaaaatgtagatttactgagcacgagataaatgcatcattgactttccctccattcccttgttttcatgtgctaaatgtagattcactgagcaccaataataagagctcacaagaatgtaaccatttgcctcactgtctaccctctttttatcccccgctcctgcttgctctttcccctttaaataccgaagttcctcaaaccctctttgggaaaagcacaggacaggtcctcctgtgactggtgtttctttttcccgggcacatccttagccttggcaaaataactctctcatggactgagtgctgcttcaggcacattttcgtttacacttttaaccttttctgacttcatcctcaaggacatttctttcatgcacatgt

SEQ ID NO: 690136 - DNA, 599 bp, Homo sapiens
cgacactgtccaagaagaaacacgaatattctgggccactagagacgtctgcagtatgtcaggggagcgatgttctgtacctggataacacttccttctagacattctactcactatgccaaaggaaaagttaagcctgggaaccgagacactccaaaactgccttccttttgttcccaaacatagctgtaatttcacacggttgctttatyttatgtaaaatgtagatttactgagcacgagataaatgcatcattgactttccctccattcccttgttttcatgtgctaaatgtagattcactgagcaccaataataagagctcacaagaatgtaaccatttgcctcactgtctaccctctttttatcccccgctcctgcttgctctttcccctttaaataccgaagttcctcaaaccctctttgggaaaagcacaggacaggtcctcctgtgactggtgtttctttttcccgggcacatccttagccttggcaaaataactctctcatggactgagtgctgcttcaggcacattttcgtttacacttttaaccttttctgacttcatcctcaaggacatttctttcatgcacatgt

SEQ ID NO: 690137 - DNA, 599 bp, Homo sapiens
cgacactgtccaagaagaaacacgaatattctgggccactagagacgtctgcagtatgtcaggggagcgatgttctgtacctggataacacttccttctagacattctactcactatgccaaaggaaaagttaagcctgggaaccgagacactccaaaactgccttccttttgttcccaaacatagctgtaatttcacacggttgctttatcttatgtaaaatgtagatttactgagcacgagataaatgcatcattgactttccctccattcccttgttttcatgtgctaaatgtagattcactgagcaccaataataagagctcacaagaatgtaaccatttgcctcactgtctaccctctttttatcccccgctcctgcttgctctttcccctttaaataccgaagttcctcaaaccctctttgggaaaagcacaggacaggtcctcctgtgactggtgtttctttttcccgggcacrtccttagccttggcaaaataactctctcatggactgagtgctgcttcaggcacattttcgtttacacttttaaccttttctgacttcatcctcaaggacatttctttcatgcacatgt

SEQ ID NO: 690138 - DNA, 599 bp, Homo sapiens
cgacactgtccaagaagaaacacgaatattctgggccactagagacgtctgcagtatgtcaggggagcgatgttctgtacctggataacacttccttctagacattctactcactatgccaaaggaaaagttaagcctgggaaccgagacactccaaaactgccttccttttgttcccaaacatagctgtaatttcacacggttgctttatcttatgtaaaatgtagatttactgagcacgagataaatgcatcattgactttccctccattcccttgttttcatgtgctaaatgtagattcactgagcaccaataataagagctcacaagaatgtaaccatttgcctcactgtctaccctctttttatcccccgctcctgcttgctctttcccctttaaataccgaagttcctcaaaccctctttgggaaaagcacaggacaggtcctcctgtgactggtgtttctttttcccgggcacatccttagccttggcaaaataacyctctcatggactgagtgctgcttcaggcacattttcgtttacacttttaaccttttctgacttcatcctcaaggacatttctttcatgcacatgt

SEQ ID NO: 690139 - DNA, 639 bp, Homo sapiens
ctataaaagtaaaatttattgaaaatatttttgttttctttctttctttttctttttttttttgagagagagtctcaattttgtgttccaggctggatggagtgcagtggcatgatctcagctcactgcagcctccayctcccagattcaagcgattctcctgcctcagcctcctgagtagctgggatttcaggcacctgccaacatgctcagctaatttttgtacttttagtagagacgaggattcgccatgttggccaggctggtctcaaactcctgacctcaggtgatctgcccgcattggccccccccaaagtgctgggattacaggcgtgagccaccacacccggcctgtgttttctttttaagatcaacatctaatcacaataacaaaacaaggagtacaaatttagctaatacacaagccacatgtaggctttccataagccgtggaacataggcacattaaatcctgtcagcatattattgtgtgacagagacatcagaataaatagcatgaagaaaggaatgaggtcacattaaggaaaataaggaaaataatgtataattgtgctttttggattgtggccaaattattttatttttaaaccatagatttttatttgaagctattttcat

SEQ ID NO: 690140 - DNA, 639 bp, Homo sapiens
ctataaaagtaaaatttattgaaaatatttttgttttctttctttctttttctttttttttttgagagagagtctcaattttgtgttccaggctggatggagtgcagtggcatgatctcagctcactgcagcctccacctcccagattcaagcgattctcctgcctcagcctcctgagtagctgggatttcaggcacctgccaacatgctcagctaatttttgtacttttagtagagacgaggattcgccatgttggccaggctggtctcaaactcctgacctcaggtgatctgcccgcattggcccccmccaaagtgctgggattacaggcgtgagccaccacacccggcctgtgttttctttttaagatcaacatctaatcacaataacaaaacaaggagtacaaatttagctaatacacaagccacatgtaggctttccataagccgtggaacataggcacattaaatcctgtcagcatattattgtgtgacagagacatcagaataaatagcatgaagaaaggaatgaggtcacattaaggaaaataaggaaaataatgtataattgtgctttttggattgtggccaaattattttatttttaaaccatagatttttatttgaagctattttcat

SEQ ID NO: 690141 - DNA, 987 bp, Homo sapiens
gacagaattatggtggcccacagagctactggacaagatgtgtgccctcaggctaacagccagtttgtttgtttgtttaaggccaccacagagacaaaagcatggctttaaatgcattttaaccagagctggaaacaatcaccttgaaatgctgtgagtcttgaaaagctgctccatctgtgaaattaggatttttacaataaataaatactcctctcactagcccagccctgagaaaaagcactgtccgtttagaagtctaaactctcctttgaataaagtaaaacaaaaactttttattcaaaatatatgggaaagtttatatccatagatgtcttctgagagaagtatgaaaggatgcacatgagtaagaagaaaactgaaactaaacatttagagtgggatgtgagaagcaatgatgaacaaggaaatggtaaagaagttaggaaaaaagtatgaatttaggttaactattaataatattgactaattcaagkagtttcctttttcattgatataaaatggttacacatatctttagggtatatatgatattttggtacctgtatacagtgtgtaataatcaaatcatggtaattgggatatccatcacatcaaatattcaccttttctttgtgttgggaatattataattcttcttgctattttaaaatatataattaattattattaactaattttcctagtgtattatcaaatattagaatttattccttctaactgtatttttgtactccttaaccaacttcccatgattccctcacccctcttccattcttagattctattaaccatcattctactctctgcctccataagatccacttttttagccccaacttatgactgagagagaacatgtgatatttgtctttcagtgcctgacttatttcacttaatataataatctccaggtccatctgtgttgctgcaaatgacagaattgtattctttttatggatgaat

SEQ ID NO: 690142 - DNA, 987 bp, Homo sapiens
gacagaattatggtggcccacagagctactggacaagatgtgtgccctcaggctaacagccagtttgtttgtttgtttaaggccaccacagagacaaaagcatggctttaaatgcattttaaccagagctggaaacaatcaccttgaaatgctgtgagtcttgaaaagctgctccatctgtgaaattaggatttttacaataaataaatactcctctcactagcccagccctgagaaaaagcactgtccgtttagaagtctaaactctcctttgaataaagtaaaacaaaaactttttattcaaaatatatgggaaagtttatatccatagatgtcttctgagagaagtatgaaaggatgcacatgagtaagaagaaaactgaaactaaacatttagagtgggatgtgagaagcaatgatgaacaaggaaatggtaaagaagttaggaaaaaagtatgaatttaggttaactattaataatattgactaattcaaggagtttcctttttcattgatataaaatggttacacatatctttagggtatatatgatattttggtacctgtatacagtgtgtaataatcaaatcatggtaattgggatatccatcacatcaaatattcaccttttctttgtgttgggaatattataattcttcttgctattttaaaatatataattaattattattaactaattttcctagtgtattatcaaatattagaatktattccttctaactgtatttttgtactccttaaccaacttcccatgattccctcacccctcttccattcttagattctattaaccatcattctactctctgcctccataagatccacttttttagccccaacttatgactgagagagaacatgtgatatttgtctttcagtgcctgacttatttcacttaatataataatctccaggtccatctgtgttgctgcaaatgacagaattgtattctttttatggatgaat

SEQ ID NO: 690143 - DNA, 3666 bp, Homo sapiens
gacagtggtgtaactaacattcaccaatattcagatcacagtgtcaaggttagtgagtttcttttcatttcagcagtctaactcacggctgtcatcatcaggtgtcatttaatactgggggaaaatgtacttgtgatttctgaccttagacagttatcagagtttagccttaataattgtgtcagagataagatcattaacagagttcagatggtggcaaaggaaccctaaataaatttactctttaagaatatattggtatctttatcggggctcttcctgagacatttctgacaaacaagagatgaggatattttcagtgtatgttcatgctacaaattaaactcccatcatgagaaatgcaaatttctttcctgagagctctgctctcttgtttgctttagaggagtcatgattatgatggtgtaaataccaagcttaagaccttaccactcaaataatcactcacttactcacttcttacacatgtccacctgccacagcaaaattcacctttgcctccacgcatgttaggtttatcttttccctcgaatgtattttcatacattagattttcacgcagataccagccctgtacatggtggggcctcaatcaacgtaaaacaacaatatctgcacacctcttagggagctacttgatatgaaaagtttttcattacttttctcacattatcttttttattcagcaaagcctaccctacgggtgtatttttttttcccctcaaaacgtctttatgccggatccttctcttctctgactgaaattcatctgtgtttattcctcaagctcttgcacttatatattttattacagcttcttcataccctttcccactcccaaacctaatccttttcttctttaccctgagggcccctgccaatataacttcaggtgaaacaaatgaaaatactagcttttgccccaggcttcagccttcttccaccaaaattaaaacgtaaaaacatcacatggatattaatattatattccctgccctgtaaaccttctataacgttctgtggtctgtcagtcaacagcatttattgagtgtccactatgaaaaggaagtcagtgccctttggaggactaaaggaagaaaaagtattctttgctttcctttactaccagtaaaagttccgtcttgttgtttccctccgctcggaattcctccacgcccccgtacctgtctgcaaacgctggaccaacacttgccctaagtgttttgttcctctcaggtacccattctcctggtttcccaaagaaatcttcaccgtacctataaactgtccaattcataataagctacgccccatcagctccaaaaggccatgayagaggcagtgaactaaaatctgtgaaccctgctgatgcgcctggaactgtagtagacactttacgttcctaataacattcattcctagagctagtctgcaagatgaaaattactcccatctctcagatcttgccaatcagaatcagaaaggctcagtaactagtttgaaggtttttaaagtggcagagtggagagcaaattcagatctgtttgactctaaaaagcttccagaggaaatacgtttattttgcaatttggccaaagaaaattgcctatccttatcaaattaggagttggggatcaagaaattcagattttgctgggcacggtggtgcgtgcctgtagtcccagccatttagcaggctgaggcaggaggattgcttgagtccaaaagtttgactccagcctaggcagaaagaaaagaaattcacattttcttaagtggtagtgacagaggccattaagctacaaatgaaagggtttgagtttagaaatgggcagcagcatgggaaagacaaaatagaatgtacatttgcaagagctttaggaataacagtgagatttcagccgaagagtcaaaggatttcctgggaattatccagtcatggttggatgatcttgggaagagtattggaaagaatgacagaggctgtggccacactgttcttgaggacagtcttatttccctctggagattctcccatattaatgcccatcctggtgtttcaaggttcaaagcctcagccacagcaacaaaatggcttcatgaaagataaagaggatcaaaaaactctcatacctggtgcttttgctgttaaaccaatctcaccagcccattcacaatcgcagggggtcagtgtaacatcagtaagccacatcacccaaagcccagatggtccaagtcatagccacatgtagctcctttatggcataagaaattatgtatcccaagagtcaaaatgactggggagatgttcacacaggaattccaaagtgaaagctgggttagctcccactactcaccacaaaagtcctctatttatgcatttataaggtgaggtaagggttgcctactcaagtgctggcagggacaggcaggtcatgtgagtgagtggtgacaggaaatggtagggtgatggagaatttgaacacagaacaaggctcttaactgtccaatccaatcctactgtcactttaatccctcatctaaagagaggagctgcaacccagtgaagacgattgttgaccagtgagaatggatacccagcattgccagatctttccatctttcgagacaacctggaaaaatgtagtttgtgtgtgttctctggattgtttaattggtaactaataaagcatttttaataggcaaaattgagctgtgaactgctccaggcagcccccacaccagtttggattgtctccaaagtcctccttcatcctgagccttctggctctgtcattgggttggatccctttgttctcgaggcaaggtattccatctactaaactaaaggcaggtatgtgtacctctgtaaagcctaagcagctactgagtcctgccatgctccctcctctctccttcttatatctcttttatcagtgtacagttagttccacctcaagtatatccatgtgctcaagtacatctgtgtgctcccttacctgctatgaactgacagctgcccaattcccaacagatttgctatacctcttttggactgtcacataagctctcttagccatcaaatacaaacacataatcgccactatcaaaagtaagcatttgcagtgcaggccgggtgcagtggctcacacctgtaatcccagcactttgggaggccgaagtgggtggattgcctgaagtcaggagtttgaaaccagcctggccagcgtggtgaaaccccatctcaactgaaaaatacagaaattagccaggcgtgatagagcatgcttgtagtctcagctactcaggaggctgaggcagaagaattgcctgagatcaggaggtggaggttgcagtgagctgagatcatgccactgcactccagcctgggtgacagagtgagactctgtctccaaaaaagcaaaaaaagtaagcatttgtgaggtaccctctaccaagctagctggctacgatccagcttacttccctacataggtaatgtttatggtgattaccagtgtgttatctgagtcagactgcctgggtttgaaccccaactcctctacctactaggtgtgtcatttggaaaaataaatgatacaacccctctgtgcttcaatgtcctcagctatagatggaaattac

SEQ ID NO: 690144 - DNA, 3666 bp, Homo sapiens
gacagtggtgtaactaacattcaccaatattcagatcacagtgtcaaggttagtgagtttcttttcatttcagcagtctaactcacggctgtcatcatcaggtgtcatttaatactgggggaaaatgtacttgtgatttctgaccttagacagttatcagagtttagccttaataattgtgtcagagataagatcattaacagagttcagatggtggcaaaggaaccctaaataaatttactctttaagaatatattggtatctttatcggggctcttcctgagacatttctgacaaacaagagatgaggatattttcagtgtatgttcatgctacaaattaaactcccatcatgagaaatgcaaatttctttcctgagagctctgctctcttgtttgctttagaggagtcatgattatgatggtgtaaataccaagcttaagaccttaccactcaaataatcactcacttactcacttcttacacatgtccacctgccacagcaaaattcacctttgcctccacgcatgttaggtttatcttttccctcgaatgtattttcatacattagattttcacgcagataccagccctgtacatggtggggcctcaatcaacgtaaaacaacaatatctgcacacctcttagggagctacttgatatgaaaagtttttcattacttttctcacattatcttttttattcagcaaagcctaccctacgggtgtatttttttttcccctcaaaacgtctttatgccggatccttctcttctctgactgaaattcatctgtgtttattcctcaagctcttgcacttatatattttattacagcttcttcataccctttcccactcccaaacctaatccttttcttctttaccctgagggcccctgccaatataacttcaggtgaaacaaatgaaaatactagcttttgccccaggcttcagccttcttccaccaaaattaaaacgtaaaaacatcacatggatattaatattatattccctgccctgtaaaccttctataacgttctgtggtctgtcagtcaacagcatttattgagtgtccactatgaaaaggaagtcagtgccctttggaggactaaaggaagaaaaagtattctttgctttcctttactaccagtaaaagttccgtcttgttgtttccctccgctcggaattcctccacgcccccgtacctgtctgcaaacgctggaccaacacttgccctaagtgttttgttcctctcaggtacccattctcctggtttcccaaagaaatcttcaccgtacctataaactgtccaattcataataagctacgccccatcagctccaaaaggccatgacagaggcagtgaactaaaatctgtgaaccctgctgatgcgcctggaactgtagtagacactttaygttcctaataacattcattcctagagctagtctgcaagatgaaaattactcccatctctcagatcttgccaatcagaatcagaaaggctcagtaactagtttgaaggtttttaaagtggcagagtggagagcaaattcagatctgtttgactctaaaaagcttccagaggaaatacgtttattttgcaatttggccaaagaaaattgcctatccttatcaaattaggagttggggatcaagaaattcagattttgctgggcacggtggtgcgtgcctgtagtcccagccatttagcaggctgaggcaggaggattgcttgagtccaaaagtttgactccagcctaggcagaaagaaaagaaattcacattttcttaagtggtagtgacagaggccattaagctacaaatgaaagggtttgagtttagaaatgggcagcagcatgggaaagacaaaatagaatgtacatttgcaagagctttaggaataacagtgagatttcagccgaagagtcaaaggatttcctgggaattatccagtcatggttggatgatcttgggaagagtattggaaagaatgacagaggctgtggccacactgttcttgaggacagtcttatttccctctggagattctcccatattaatgcccatcctggtgtttcaaggttcaaagcctcagccacagcaacaaaatggcttcatgaaagataaagaggatcaaaaaactctcatacctggtgcttttgctgttaaaccaatctcaccagcccattcacaatcgcagggggtcagtgtaacatcagtaagccacatcacccaaagcccagatggtccaagtcatagccacatgtagctcctttatggcataagaaattatgtatcccaagagtcaaaatgactggggagatgttcacacaggaattccaaagtgaaagctgggttagctcccactactcaccacaaaagtcctctatttatgcatttataaggtgaggtaagggttgcctactcaagtgctggcagggacaggcaggtcatgtgagtgagtggtgacaggaaatggtagggtgatggagaatttgaacacagaacaaggctcttaactgtccaatccaatcctactgtcactttaatccctcatctaaagagaggagctgcaacccagtgaagacgattgttgaccagtgagaatggatacccagcattgccagatctttccatctttcgagacaacctggaaaaatgtagtttgtgtgtgttctctggattgtttaattggtaactaataaagcatttttaataggcaaaattgagctgtgaactgctccaggcagcccccacaccagtttggattgtctccaaagtcctccttcatcctgagccttctggctctgtcattgggttggatccctttgttctcgaggcaaggtattccatctactaaactaaaggcaggtatgtgtacctctgtaaagcctaagcagctactgagtcctgccatgctccctcctctctccttcttatatctcttttatcagtgtacagttagttccacctcaagtatatccatgtgctcaagtacatctgtgtgctcccttacctgctatgaactgacagctgcccaattcccaacagatttgctatacctcttttggactgtcacataagctctcttagccatcaaatacaaacacataatcgccactatcaaaagtaagcatttgcagtgcaggccgggtgcagtggctcacacctgtaatcccagcactttgggaggccgaagtgggtggattgcctgaagtcaggagtttgaaaccagcctggccagcgtggtgaaaccccatctcaactgaaaaatacagaaattagccaggcgtgatagagcatgcttgtagtctcagctactcaggaggctgaggcagaagaattgcctgagatcaggaggtggaggttgcagtgagctgagatcatgccactgcactccagcctgggtgacagagtgagactctgtctccaaaaaagcaaaaaaagtaagcatttgtgaggtaccctctaccaagctagctggctacgatccagcttacttccctacataggtaatgtttatggtgattaccagtgtgttatctgagtcagactgcctgggtttgaaccccaactcctctacctactaggtgtgtcatttggaaaaataaatgatacaacccctctgtgcttcaatgtcctcagctatagatggaaattac

SEQ ID NO: 690145 - DNA, 3666 bp, Homo sapiens
gacagtggtgtaactaacattcaccaatattcagatcacagtgtcaaggttagtgagtttcttttcatttcagcagtctaactcacggctgtcatcatcaggtgtcatttaatactgggggaaaatgtacttgtgatttctgaccttagacagttatcagagtttagccttaataattgtgtcagagataagatcattaacagagttcagatggtggcaaaggaaccctaaataaatttactctttaagaatatattggtatctttatcggggctcttcctgagacatttctgacaaacaagagatgaggatattttcagtgtatgttcatgctacaaattaaactcccatcatgagaaatgcaaatttctttcctgagagctctgctctcttgtttgctttagaggagtcatgattatgatggtgtaaataccaagcttaagaccttaccactcaaataatcactcacttactcacttcttacacatgtccacctgccacagcaaaattcacctttgcctccacgcatgttaggtttatcttttccctcgaatgtattttcatacattagattttcacgcagataccagccctgtacatggtggggcctcaatcaacgtaaaacaacaatatctgcacacctcttagggagctacttgatatgaaaagtttttcattacttttctcacattatcttttttattcagcaaagcctaccctacgggtgtatttttttttcccctcaaaacgtctttatgccggatccttctcttctctgactgaaattcatctgtgtttattcctcaagctcttgcacttatatattttattacagcttcttcataccctttcccactcccaaacctaatccttttcttctttaccctgagggcccctgccaatataacttcaggtgaaacaaatgaaaatactagcttttgccccaggcttcagccttcttccaccaaaattaaaacgtaaaaacatcacatggatattaatattatattccctgccctgtaaaccttctataacgttctgtggtctgtcagtcaacagcatttattgagtgtccactatgaaaaggaagtcagtgccctttggaggactaaaggaagaaaaagtattctttgctttcctttactaccagtaaaagttccgtcttgttgtttccctccgctcggaattcctccacgcccccgtacctgtctgcaaacgctggaccaacacttgccctaagtgttttgttcctctcaggtacccattctcctggtttcccaaagaaatcttcaccgtacctataaactgtccaattcataataagctacgccccatcagctccaaaaggccatgacagaggcagtgaactaaaatctgtgaaccctgctgatgcgcctggaactgtagtagacactttacgttcctaataacattcattcctagagctagtctgcaagatgaaaattactcccatctctcagatcttgccaatcagaatcagaaaggctcagtaactagtttgaaggtttttaaagtggcagagtggagagcaaattcagatctgtttgactctaaaaagcttccagaggaaatacgtttattttgcaatttggccaaagaaaattgcctatccttatcaaattaggagttggggatcaagaaattcagattttgctgggcacggtggtgcgtgcctgtagtcccagccatttagcaggctgaggcaggaggattgcttgagtccaaaagtttgactccagcctaggcagaaagaaaagaaattcacattttcttaagtggtagtgrcagaggccattaagctacaaatgaaagggtttgagtttagaaatgggcagcagcatgggaaagacaaaatagaatgtacatttgcaagagctttaggaataacagtgagatttcagccgaagagtcaaaggatttcctgggaattatccagtcatggttggatgatcttgggaagagtattggaaagaatgacagaggctgtggccacactgttcttgaggacagtcttatttccctctggagattctcccatattaatgcccatcctggtgtttcaaggttcaaagcctcagccacagcaacaaaatggcttcatgaaagataaagaggatcaaaaaactctcatacctggtgcttttgctgttaaaccaatctcaccagcccattcacaatcgcagggggtcagtgtaacatcagtaagccacatcacccaaagcccagatggtccaagtcatagccacatgtagctcctttatggcataagaaattatgtatcccaagagtcaaaatgactggggagatgttcacacaggaattccaaagtgaaagctgggttagctcccactactcaccacaaaagtcctctatttatgcatttataaggtgaggtaagggttgcctactcaagtgctggcagggacaggcaggtcatgtgagtgagtggtgacaggaaatggtagggtgatggagaatttgaacacagaacaaggctcttaactgtccaatccaatcctactgtcactttaatccctcatctaaagagaggagctgcaacccagtgaagacgattgttgaccagtgagaatggatacccagcattgccagatctttccatctttcgagacaacctggaaaaatgtagtttgtgtgtgttctctggattgtttaattggtaactaataaagcatttttaataggcaaaattgagctgtgaactgctccaggcagcccccacaccagtttggattgtctccaaagtcctccttcatcctgagccttctggctctgtcattgggttggatccctttgttctcgaggcaaggtattccatctactaaactaaaggcaggtatgtgtacctctgtaaagcctaagcagctactgagtcctgccatgctccctcctctctccttcttatatctcttttatcagtgtacagttagttccacctcaagtatatccatgtgctcaagtacatctgtgtgctcccttacctgctatgaactgacagctgcccaattcccaacagatttgctatacctcttttggactgtcacataagctctcttagccatcaaatacaaacacataatcgccactatcaaaagtaagcatttgcagtgcaggccgggtgcagtggctcacacctgtaatcccagcactttgggaggccgaagtgggtggattgcctgaagtcaggagtttgaaaccagcctggccagcgtggtgaaaccccatctcaactgaaaaatacagaaattagccaggcgtgatagagcatgcttgtagtctcagctactcaggaggctgaggcagaagaattgcctgagatcaggaggtggaggttgcagtgagctgagatcatgccactgcactccagcctgggtgacagagtgagactctgtctccaaaaaagcaaaaaaagtaagcatttgtgaggtaccctctaccaagctagctggctacgatccagcttacttccctacataggtaatgtttatggtgattaccagtgtgttatctgagtcagactgcctgggtttgaaccccaactcctctacctactaggtgtgtcatttggaaaaataaatgatacaacccctctgtgcttcaatgtcctcagctatagatggaaattac

SEQ ID NO: 690146 - DNA, 3666 bp, Homo sapiens
gacagtggtgtaactaacattcaccaatattcagatcacagtgtcaaggttagtgagtttcttttcatttcagcagtctaactcacggctgtcatcatcaggtgtcatttaatactgggggaaaatgtacttgtgatttctgaccttagacagttatcagagtttagccttaataattgtgtcagagataagatcattaacagagttcagatggtggcaaaggaaccctaaataaatttactctttaagaatatattggtatctttatcggggctcttcctgagacatttctgacaaacaagagatgaggatattttcagtgtatgttcatgctacaaattaaactcccatcatgagaaatgcaaatttctttcctgagagctctgctctcttgtttgctttagaggagtcatgattatgatggtgtaaataccaagcttaagaccttaccactcaaataatcactcacttactcacttcttacacatgtccacctgccacagcaaaattcacctttgcctccacgcatgttaggtttatcttttccctcgaatgtattttcatacattagattttcacgcagataccagccctgtacatggtggggcctcaatcaacgtaaaacaacaatatctgcacacctcttagggagctacttgatatgaaaagtttttcattacttttctcacattatcttttttattcagcaaagcctaccctacgggtgtatttttttttcccctcaaaacgtctttatgccggatccttctcttctctgactgaaattcatctgtgtttattcctcaagctcttgcacttatatattttattacagcttcttcataccctttcccactcccaaacctaatccttttcttctttaccctgagggcccctgccaatataacttcaggtgaaacaaatgaaaatactagcttttgccccaggcttcagccttcttccaccaaaattaaaacgtaaaaacatcacatggatattaatattatattccctgccctgtaaaccttctataacgttctgtggtctgtcagtcaacagcatttattgagtgtccactatgaaaaggaagtcagtgccctttggaggactaaaggaagaaaaagtattctttgctttcctttactaccagtaaaagttccgtcttgttgtttccctccgctcggaattcctccacgcccccgtacctgtctgcaaacgctggaccaacacttgccctaagtgttttgttcctctcaggtacccattctcctggtttcccaaagaaatcttcaccgtacctataaactgtccaattcataataagctacgccccatcagctccaaaaggccatgacagaggcagtgaactaaaatctgtgaaccctgctgatgcgcctggaactgtagtagacactttacgttcctaataacattcattcctagagctagtctgcaagatgaaaattactcccatctctcagatcttgccaatcagaatcagaaaggctcagtaactagtttgaaggtttttaaagtggcagagtggagagcaaattcagatctgtttgactctaaaaagcttccagaggaaatacgtttattttgcaatttggccaaagaaaattgcctatccttatcaaattaggagttggggatcaagaaattcagattttgctgggcacggtggtgcgtgcctgtagtcccagccatttagcaggctgaggcaggaggattgcttgagtccaaaagtttgactccagcctaggcagaaagaaaagaaattcacattttcttaagtggtagtgacagaggccattaagctacaaatgaaagggtttgartttagaaatgggcagcagcatgggaaagacaaaatagaatgtacatttgcaagagctttaggaataacagtgagatttcagccgaagagtcaaaggatttcctgggaattatccagtcatggttggatgatcttgggaagagtattggaaagaatgacagaggctgtggccacactgttcttgaggacagtcttatttccctctggagattctcccatattaatgcccatcctggtgtttcaaggttcaaagcctcagccacagcaacaaaatggcttcatgaaagataaagaggatcaaaaaactctcatacctggtgcttttgctgttaaaccaatctcaccagcccattcacaatcgcagggggtcagtgtaacatcagtaagccacatcacccaaagcccagatggtccaagtcatagccacatgtagctcctttatggcataagaaattatgtatcccaagagtcaaaatgactggggagatgttcacacaggaattccaaagtgaaagctgggttagctcccactactcaccacaaaagtcctctatttatgcatttataaggtgaggtaagggttgcctactcaagtgctggcagggacaggcaggtcatgtgagtgagtggtgacaggaaatggtagggtgatggagaatttgaacacagaacaaggctcttaactgtccaatccaatcctactgtcactttaatccctcatctaaagagaggagctgcaacccagtgaagacgattgttgaccagtgagaatggatacccagcattgccagatctttccatctttcgagacaacctggaaaaatgtagtttgtgtgtgttctctggattgtttaattggtaactaataaagcatttttaataggcaaaattgagctgtgaactgctccaggcagcccccacaccagtttggattgtctccaaagtcctccttcatcctgagccttctggctctgtcattgggttggatccctttgttctcgaggcaaggtattccatctactaaactaaaggcaggtatgtgtacctctgtaaagcctaagcagctactgagtcctgccatgctccctcctctctccttcttatatctcttttatcagtgtacagttagttccacctcaagtatatccatgtgctcaagtacatctgtgtgctcccttacctgctatgaactgacagctgcccaattcccaacagatttgctatacctcttttggactgtcacataagctctcttagccatcaaatacaaacacataatcgccactatcaaaagtaagcatttgcagtgcaggccgggtgcagtggctcacacctgtaatcccagcactttgggaggccgaagtgggtggattgcctgaagtcaggagtttgaaaccagcctggccagcgtggtgaaaccccatctcaactgaaaaatacagaaattagccaggcgtgatagagcatgcttgtagtctcagctactcaggaggctgaggcagaagaattgcctgagatcaggaggtggaggttgcagtgagctgagatcatgccactgcactccagcctgggtgacagagtgagactctgtctccaaaaaagcaaaaaaagtaagcatttgtgaggtaccctctaccaagctagctggctacgatccagcttacttccctacataggtaatgtttatggtgattaccagtgtgttatctgagtcagactgcctgggtttgaaccccaactcctctacctactaggtgtgtcatttggaaaaataaatgatacaacccctctgtgcttcaatgtcctcagctatagatggaaattac

SEQ ID NO: 690147 - DNA, 3666 bp, Homo sapiens
gacagtggtgtaactaacattcaccaatattcagatcacagtgtcaaggttagtgagtttcttttcatttcagcagtctaactcacggctgtcatcatcaggtgtcatttaatactgggggaaaatgtacttgtgatttctgaccttagacagttatcagagtttagccttaataattgtgtcagagataagatcattaacagagttcagatggtggcaaaggaaccctaaataaatttactctttaagaatatattggtatctttatcggggctcttcctgagacatttctgacaaacaagagatgaggatattttcagtgtatgttcatgctacaaattaaactcccatcatgagaaatgcaaatttctttcctgagagctctgctctcttgtttgctttagaggagtcatgattatgatggtgtaaataccaagcttaagaccttaccactcaaataatcactcacttactcacttcttacacatgtccacctgccacagcaaaattcacctttgcctccacgcatgttaggtttatcttttccctcgaatgtattttcatacattagattttcacgcagataccagccctgtacatggtggggcctcaatcaacgtaaaacaacaatatctgcacacctcttagggagctacttgatatgaaaagtttttcattacttttctcacattatcttttttattcagcaaagcctaccctacgggtgtatttttttttcccctcaaaacgtctttatgccggatccttctcttctctgactgaaattcatctgtgtttattcctcaagctcttgcacttatatattttattacagcttcttcataccctttcccactcccaaacctaatccttttcttctttaccctgagggcccctgccaatataacttcaggtgaaacaaatgaaaatactagcttttgccccaggcttcagccttcttccaccaaaattaaaacgtaaaaacatcacatggatattaatattatattccctgccctgtaaaccttctataacgttctgtggtctgtcagtcaacagcatttattgagtgtccactatgaaaaggaagtcagtgccctttggaggactaaaggaagaaaaagtattctttgctttcctttactaccagtaaaagttccgtcttgttgtttccctccgctcggaattcctccacgcccccgtacctgtctgcaaacgctggaccaacacttgccctaagtgttttgttcctctcaggtacccattctcctggtttcccaaagaaatcttcaccgtacctataaactgtccaattcataataagctacgccccatcagctccaaaaggccatgacagaggcagtgaactaaaatctgtgaaccctgctgatgcgcctggaactgtagtagacactttacgttcctaataacattcattcctagagctagtctgcaagatgaaaattactcccatctctcagatcttgccaatcagaatcagaaaggctcagtaactagtttgaaggtttttaaagtggcagagtggagagcaaattcagatctgtttgactctaaaaagcttccagaggaaatacgtttattttgcaatttggccaaagaaaattgcctatccttatcaaattaggagttggggatcaagaaattcagattttgctgggcacggtggtgcgtgcctgtagtcccagccatttagcaggctgaggcaggaggattgcttgagtccaaaagtttgactccagcctaggcagaaagaaaagaaattcacattttcttaagtggtagtgacagaggccattaagctacaaatgaaagggtttgagtttagaaatgggcagcagcatgggaaagacaaaatagaatgtacatttgcaagagctttaggaataacagtgagatttcagccgaagagtcaaaggatttcctgggaattatccagtcatggttggatgatcttgggaagagtattggaaagaatgacagaggctgtggccacactgttcttgaggacagtcttatttccctctggagattctcccatattaatgcccatcctggtgtttcaaggttcaaagcctcagccacagcaacaaaatggcttcatgaaagataaagaggatcaaaaaactctcatacctggtgcttttgctgttaaaccaatctcaccagcccattcacaatcgcagggggtcagtgtaacatcagtaagccacatcacccaaagcccagatggtccaagtcatagccacatgtagctcctttatggcataagaaattatgtatcccaagagtcaaaatgactggggagatgttcacacaggaattccaaagtgaaagctgggttagctcccactactcaccacaaaagtcctctatttatgcatttataaggtgaggtaagggttgcctactcaagtgctggcagggacaggcaggtcatgtgagtgagtggtgacaggaaatggtagggtgatggagaatttgaacacagaacaaggctcttaactgtccaatccaatcctactgtcactttaatccctcatctaaagagaggagctgcaacccagtgaagacgattgttgaccagtgagaatggatacccagcattgccagatctttccatctttcgagacaacctggaaaaatgtagtttgtgtgtgttctctggattgtttaattggtaactaataaagcatttttaataggcaaaattgagctgtgaactgctccaggcagcccccacaccagtttggattgtctccaaagtcctccttcatcctgagccttctggctctgtcattgggttggatccctttgttctcgaggcaaggtattccatctactaaactaaaggcaggtatgtgtacctctgtaaagcctaagcagctactgagtcctgccatgctccctcctctctccttcttatatctcttttatcagtgtacagttagttccacctcaagtatatccatgtgctcaagtacatctgtgtgctcccttacctgctatgaactgacagctgcccaattcccaacagatttgctatacctcttttggactgtcacataagctctcttagccatcaaatacaaacacataatcgccactrtcaaaagtaagcatttgcagtgcaggccgggtgcagtggctcacacctgtaatcccagcactttgggaggccgaagtgggtggattgcctgaagtcaggagtttgaaaccagcctggccagcgtggtgaaaccccatctcaactgaaaaatacagaaattagccaggcgtgatagagcatgcttgtagtctcagctactcaggaggctgaggcagaagaattgcctgagatcaggaggtggaggttgcagtgagctgagatcatgccactgcactccagcctgggtgacagagtgagactctgtctccaaaaaagcaaaaaaagtaagcatttgtgaggtaccctctaccaagctagctggctacgatccagcttacttccctacataggtaatgtttatggtgattaccagtgtgttatctgagtcagactgcctgggtttgaaccccaactcctctacctactaggtgtgtcatttggaaaaataaatgatacaacccctctgtgcttcaatgtcctcagctatagatggaaattac

SEQ ID NO: 690148 - DNA, 3666 bp, Homo sapiens
gacagtggtgtaactaacattcaccaatattcagatcacagtgtcaaggttagtgagtttcttttcatttcagcagtctaactcacggctgtcatcatcaggtgtcatttaatactgggggaaaatgtacttgtgatttctgaccttagacagttatcagagtttagccttaataattgtgtcagagataagatcattaacagagttcagatggtggcaaaggaaccctaaataaatttactctttaagaatatattggtatctttatcggggctcttcctgagacatttctgacaaacaagagatgaggatattttcagtgtatgttcatgctacaaattaaactcccatcatgagaaatgcaaatttctttcctgagagctctgctctcttgtttgctttagaggagtcatgattatgatggtgtaaataccaagcttaagaccttaccactcaaataatcactcacttactcacttcttacacatgtccacctgccacagcaaaattcacctttgcctccacgcatgttaggtttatcttttccctcgaatgtattttcatacattagattttcacgcagataccagccctgtacatggtggggcctcaatcaacgtaaaacaacaatatctgcacacctcttagggagctacttgatatgaaaagtttttcattacttttctcacattatcttttttattcagcaaagcctaccctacgggtgtatttttttttcccctcaaaacgtctttatgccggatccttctcttctctgactgaaattcatctgtgtttattcctcaagctcttgcacttatatattttattacagcttcttcataccctttcccactcccaaacctaatccttttcttctttaccctgagggcccctgccaatataacttcaggtgaaacaaatgaaaatactagcttttgccccaggcttcagccttcttccaccaaaattaaaacgtaaaaacatcacatggatattaatattatattccctgccctgtaaaccttctataacgttctgtggtctgtcagtcaacagcatttattgagtgtccactatgaaaaggaagtcagtgccctttggaggactaaaggaagaaaaagtattctttgctttcctttactaccagtaaaagttccgtcttgttgtttccctccgctcggaattcctccacgcccccgtacctgtctgcaaacgctggaccaacacttgccctaagtgttttgttcctctcaggtacccattctcctggtttcccaaagaaatcttcaccgtacctataaactgtccaattcataataagctacgccccatcagctccaaaaggccatgacagaggcagtgaactaaaatctgtgaaccctgctgatgcgcctggaactgtagtagacactttacgttcctaataacattcattcctagagctagtctgcaagatgaaaattactcccatctctcagatcttgccaatcagaatcagaaaggctcagtaactagtttgaaggtttttaaagtggcagagtggagagcaaattcagatctgtttgactctaaaaagcttccagaggaaatacgtttattttgcaatttggccaaagaaaattgcctatccttatcaaattaggagttggggatcaagaaattcagattttgctgggcacggtggtgcgtgcctgtagtcccagccatttagcaggctgaggcaggaggattgcttgagtccaaaagtttgactccagcctaggcagaaagaaaagaaattcacattttcttaagtggtagtgacagaggccattaagctacaaatgaaagggtttgagtttagaaatgggcagcagcatgggaaagacaaaatagaatgtacatttgcaagagctttaggaataacagtgagatttcagccgaagagtcaaaggatttcctgggaattatccagtcatggttggatgatcttgggaagagtattggaaagaatgacagaggctgtggccacactgttcttgaggacagtcttatttccctctggagattctcccatattaatgcccatcctggtgtttcaaggttcaaagcctcagccacagcaacaaaatggcttcatgaaagataaagaggatcaaaaaactctcatacctggtgcttttgctgttaaaccaatctcaccagcccattcacaatcgcagggggtcagtgtaacatcagtaagccacatcacccaaagcccagatggtccaagtcatagccacatgtagctcctttatggcataagaaattatgtatcccaagagtcaaaatgactggggagatgttcacacaggaattccaaagtgaaagctgggttagctcccactactcaccacaaaagtcctctatttatgcatttataaggtgaggtaagggttgcctactcaagtgctggcagggacaggcaggtcatgtgagtgagtggtgacaggaaatggtagggtgatggagaatttgaacacagaacaaggctcttaactgtccaatccaatcctactgtcactttaatccctcatctaaagagaggagctgcaacccagtgaagacgattgttgaccagtgagaatggatacccagcattgccagatctttccatctttcgagacaacctggaaaaatgtagtttgtgtgtgttctctggattgtttaattggtaactaataaagcatttttaataggcaaaattgagctgtgaactgctccaggcagcccccacaccagtttggattgtctccaaagtcctccttcatcctgagccttctggctctgtcattgggttggatccctttgttctcgaggcaaggtattccatctactaaactaaaggcaggtatgtgtacctctgtaaagcctaagcagctactgagtcctgccatgctccctcctctctccttcttatatctcttttatcagtgtacagttagttccacctcaagtatatccatgtgctcaagtacatctgtgtgctcccttacctgctatgaactgacagctgcccaattcccaacagatttgctatacctcttttggactgtcacataagctctcttagccatcaaatacaaacacataatcgccactatcaaaagtaagcatttgcagtgcaggccgggtgcagtggctcacacctgtaatcccagcactttgggaggccgaagtgggtggattgcctgaagtcaggagtttgaaaccagcctggccagcgtggtgaaaccccatctcaactgaaaaatacagaaattagccaggcgtgatagagcatgcytgtagtctcagctactcaggaggctgaggcagaagaattgcctgagatcaggaggtggaggttgcagtgagctgagatcatgccactgcactccagcctgggtgacagagtgagactctgtctccaaaaaagcaaaaaaagtaagcatttgtgaggtaccctctaccaagctagctggctacgatccagcttacttccctacataggtaatgtttatggtgattaccagtgtgttatctgagtcagactgcctgggtttgaaccccaactcctctacctactaggtgtgtcatttggaaaaataaatgatacaacccctctgtgcttcaatgtcctcagctatagatggaaattac

SEQ ID NO: 690149 - DNA, 669 bp, Homo sapiens
agttcatcagataatggagacggccactaagtgacggaaggatggggcccatagacagcttagagatactcgacaaaggaatgattaatgtctcaggagggacaaagcaggacaacgtgagatttcatcacactactcaggaaggcaggcaatttaaaacatatgaattgtttatttctggaattttccatttagtattttaagaccatggctaacctcaggtaactgaaacctcagaaagtgaaaccgcgaataatggggactactgtgtgtgtgtgtgtgtgtgtgtgtgtgtgtgagtgtgtgtgtgtgtgtgtaaaatttaatttgaagaccacaaaaggartttacattgagtcccagagagcaatattaaatactaatattaaacaatggctgacagatccaaataacagttccacagtaaagtaaggggcagtaatagcgcttatttccatattgatgagatattaagatgcctctaatcaaagggcagaacattattttatatgccattttatgaaccatatttcaacaatgataagatgcctctgattataagacagaacatgattattttatgtaccagtaagaaaaataatttgccaattaaactgatgcactatcaattaccacgatgcatccaatttcagatatgttaaaatgtga

SEQ ID NO: 690150 - DNA, 1334 bp, Homo sapiens
tggatgaagttgttaaacttattcgctaaatgtgcaatacactctgtgggagagaagtgtatgaaagatgtgtgttggtgaaatgaaatgcatagagctgtggtttgtgtccagctttggcatacatgggtttggtggccttgggcaagattkcacctcagtctcctcacctgtgtaatgggaaacgacctcatggggttattatttttaacgtaaattatttactttttgaaattttttatttttatattttttaacttttattttaagttcagggttacaagtgtaggtttgttatataggtaaactcatgtcatgggggtttggtgtaaagattatctcatcacccaggtactaagcatagtacctgatagttattttttctgctcctctccctcctctcatcctccttcctcaagtaggtcccagtgtctgttgttcttctctttgtgttcattggttctcatcatttagctcccacttagaaataagaacatgtggtatttggttttctgttcctgcattagtatgctaaggataatggtctccagctccatccacgttcctgcaaaggacttgatcttattcttttttatggctgtgtagtatttcatggtatatgtatgtatcacatttttgttatcaagctaccattgatgggcacctgggttgattccatatctttgctattgtgaatagtgctgcagtgaacatacatgtgcgtgtgtctttatggtagaatgatttatattcctttgggtgtataaccagtaatgggattgctgagttgaatggtacttctgtttttatttctttaaggaactgccacactacattttacaatggttgaactaatttatactcccattggcagtgtataatcgttctcttttctctgcaaccttgtcagcatctgctggttttttggttttttgtttttaataagagccattcttattggtgtgagataagcgcctggcctatagtctgacaagttgatgctaaaatcctacatttgcttctgaattctcagagccctcttccctcaaaccaagaaaccatctttccatttcacagcactgtgcgaagagcaagtgaaatgatgcctgcattcgagtttacttccatcattacaaaacgaggtgcatccaggtatgacacttgttcaaaaaaatcaatttactttagttcagcaaaatatttagagtatctttcatccaagcagtacgataggttctggaaattcccaaataagcaaaaatcagccaggctccatgaggagttcacagtgaactgcaggacacaaaagaagaaagaaataattcaataataca

SEQ ID NO: 690151 - DNA, 1334 bp, Homo sapiens
tggatgaagttgttaaacttattcgctaaatgtgcaatacactctgtgggagagaagtgtatgaaagatgtgtgttggtgaaatgaaatgcatagagctgtggtttgtgtccagctttggcatacatgggtttggtggccttgggcaagattgyacctcagtctcctcacctgtgtaatgggaaacgacctcatggggttattatttttaacgtaaattatttactttttgaaattttttatttttatattttttaacttttattttaagttcagggttacaagtgtaggtttgttatataggtaaactcatgtcatgggggtttggtgtaaagattatctcatcacccaggtactaagcatagtacctgatagttattttttctgctcctctccctcctctcatcctccttcctcaagtaggtcccagtgtctgttgttcttctctttgtgttcattggttctcatcatttagctcccacttagaaataagaacatgtggtatttggttttctgttcctgcattagtatgctaaggataatggtctccagctccatccacgttcctgcaaaggacttgatcttattcttttttatggctgtgtagtatttcatggtatatgtatgtatcacatttttgttatcaagctaccattgatgggcacctgggttgattccatatctttgctattgtgaatagtgctgcagtgaacatacatgtgcgtgtgtctttatggtagaatgatttatattcctttgggtgtataaccagtaatgggattgctgagttgaatggtacttctgtttttatttctttaaggaactgccacactacattttacaatggttgaactaatttatactcccattggcagtgtataatcgttctcttttctctgcaaccttgtcagcatctgctggttttttggttttttgtttttaataagagccattcttattggtgtgagataagcgcctggcctatagtctgacaagttgatgctaaaatcctacatttgcttctgaattctcagagccctcttccctcaaaccaagaaaccatctttccatttcacagcactgtgcgaagagcaagtgaaatgatgcctgcattcgagtttacttccatcattacaaaacgaggtgcatccaggtatgacacttgttcaaaaaaatcaatttactttagttcagcaaaatatttagagtatctttcatccaagcagtacgataggttctggaaattcccaaataagcaaaaatcagccaggctccatgaggagttcacagtgaactgcaggacacaaaagaagaaagaaataattcaataataca

SEQ ID NO: 690152 - DNA, 1334 bp, Homo sapiens
tggatgaagttgttaaacttattcgctaaatgtgcaatacactctgtgggagagaagtgtatgaaagatgtgtgttggtgaaatgaaatgcatagagctgtggtttgtgtccagctttggcatacatgggtttggtggccttgggcaagattgcacctcagtctcctcacctgtgtaatgggaaacgacctcatggggttattatttttaacgtaaattatttactttttgaaattttttatttttatattttttaacttttattttaagttcagggttacaagtgtaggtttgttatataggtaaactcatgtcatgggggtttggtgtaaagattatctcatcacccaggtactaagcatagtacctgatagttattttttctgctcctctccctcctctcatcctccttcctcaagtaggtcccagtgtctgttgttcttctctttgtgttcattggttctcatcatttagctcccacttagaaataagaacatgtggtatttggttttctgttcctgcattagtatgctaaggataatggtctccagctccatccacgttcctgcaaaggacttgatcttattcttttttatggctgtgtagtatttcatggtatatgtatgtatcacatttttgttatcaagctaccattgatgggcacctgggttgattccatatctttgctattgtgaatagtgctgcagtgaacatacatgtgcgtgtgtctttatggtagaatgatttatattcctttgggtgtatamccagtaatgggattgctgagttgaatggtacttctgtttttatttctttaaggaactgccacactacattttacaatggttgaactaatttatactcccattggcagtgtataatcgttctcttttctctgcaaccttgtcagcatctgctggttttttggttttttgtttttaataagagccattcttattggtgtgagataagcgcctggcctatagtctgacaagttgatgctaaaatcctacatttgcttctgaattctcagagccctcttccctcaaaccaagaaaccatctttccatttcacagcactgtgcgaagagcaagtgaaatgatgcctgcattcgagtttacttccatcattacaaaacgaggtgcatccaggtatgacacttgttcaaaaaaatcaatttactttagttcagcaaaatatttagagtatctttcatccaagcagtacgataggttctggaaattcccaaataagcaaaaatcagccaggctccatgaggagttcacagtgaactgcaggacacaaaagaagaaagaaataattcaataataca

SEQ ID NO: 690153 - DNA, 628 bp, Homo sapiens
ttcaaatagtgaattcacacagtgaaaacctgtacaaatattcacagtgagttcacacagtgaaaacctgtamaaatattcacatagtgagttcacacagtgaaaacctgtacagatactcacagcagtattcaaatagtgaattcacacagtgaaaacctgtacaaatattcatagtgagttcacacagtgaaaacctgtacagatattcacagcagtattcaaatagtgaattcacacagtgaaaacctgtacaaatattcacatagtgagttcacacagtgaaaacctgtacagatattcacagcagtattcaaatagtgaattcacacagtgaaaacctgtacaaatattcacatagtgagttcacacagtgaaaacctgtacagatattcacagcagtattcaaatagtgaattcacacagtgaaaacctgtacaaatattcacatagttcacacagcgaaaacctgtacagatattcacagcagtattcaaatagtgaattcacacagtgaaaacctgtacaaatattcacatagtgagttcacacagtgaaaacctgtacagatactcacagcagtaatcaaatagtgaattcacacagtgaaaacctgtacaaatattca

SEQ ID NO: 690154 - DNA, 581 bp, Homo sapiens
cacaaggaagctcttaccaaagtcatggagagcaggcaacatgtggcagaaggraagacagaggtgcagaggctgatgacgtcagaatcacaggaacaggatttctttggccactttggctgaaattcaccacttccatccaattccagtgagagacatggactcacagatgcagcatttcttgcaacaagagatactactttttcaaaaagtcacccaggaattgatagtgttgaatgactcgatactcgatcgtggacggtttccagttcaaggatactttctacagcagaataataacactagcaaagagctagtacaaggatggttttgtgctcaactgaaatccagttgaatacagaattgtataggaaacagttaatatggtgatagaatagaaacagtagcaatcgtgaactaaatcatactatgaatgcctaaactactgctgtaacttttggaaaaatgataataccactttattgcttttcgaagtatgaatattttagtgtatatgctctagacttaaaactctataaagagtctcaaagaagttggctggataaagcctgctgtggatg

SEQ ID NO: 690155 - DNA, 581 bp, Homo sapiens
cacaaggaagctcttaccaaagtcatggagagcaggcaacatgtggcagaagggaagacagaggtgcagaggctgatgacgtcagaatcacaggaacaggatttctttggccactttggctgaaattcaccacttccatccaattccagtgagagacatggactcacagatgcagcatttcttgcaacaagagatactactttttcaaaaagtcacccaggaattgatagtgttgaatgmctcgatactcgatcgtggacggtttccagttcaaggatactttctacagcagaataataacactagcaaagagctagtacaaggatggttttgtgctcaactgaaatccagttgaatacagaattgtataggaaacagttaatatggtgatagaatagaaacagtagcaatcgtgaactaaatcatactatgaatgcctaaactactgctgtaacttttggaaaaatgataataccactttattgcttttcgaagtatgaatattttagtgtatatgctctagacttaaaactctataaagagtctcaaagaagttggctggataaagcctgctgtggatg

SEQ ID NO: 690156 - DNA, 581 bp, Homo sapiens
cacaaggaagctcttaccaaagtcatggagagcaggcaacatgtggcagaagggaagacagaggtgcagaggctgatgacgtcagaatcacaggaacaggatttctttggccactttggctgaaattcaccacttccatccaattccagtgagagacatggactcacagatgcagcatttcttgcaacaagagatactactttttcaaaaagtcacccaggaattgatagtgttgaatgactcgatactcgatcgtggacggtttccagttcaaggatactttctacagcagaataataacactagcaaagagctagtacaaggatggttttgtgctcaactgaaatccagytgaatacagaattgtataggaaacagttaatatggtgatagaatagaaacagtagcaatcgtgaactaaatcatactatgaatgcctaaactactgctgtaacttttggaaaaatgataataccactttattgcttttcgaagtatgaatattttagtgtatatgctctagacttaaaactctataaagagtctcaaagaagttggctggataaagcctgctgtggatg

SEQ ID NO: 690157 - DNA, 1543 bp, Homo sapiens
aataaattgtgcatctaatgtctaccaattaatgtacttgtagatgtatcttatcttaacttgagtctttgctgccactaatgaggtgtgaaggactcttctcccatggggaagtttttctttttccggagggaggagggcttttccaggtaatgtgtctagagtgttgggcagaagaatctgggaccacacctcaccagttctctccttaatcgacgtcatttgccttctcttccagctatgtttccagtgtcctctgggtgtttccaagagcaacaagaaacgaataaatctctggtgagttgtttatttgttcttcactttgttttacactgtattttctgagtttatgggtgtctgtgaattaaaaaggaaaagtggaaataagtaaaactcaggttgaaggaaatatacataaataagataaagctgacctgtagatatagacaggttataaaagcttagagttgtctaagttgagtgcaaagtttcctctgatctttctgatgccgaaacaaaaaaggcagtcatgtttgttacgtgattggaatggaacccgaaaagagagcacgctgtattcttgtgggacaggaaagcttgtgtgcaccaagtcttaaccaccaccttcattggtgacatagattatgtgctggaacatatttcacaccggtctggcagtaagcacttgtagtgttgtgcagtggaaacagtcatcttccgctaaggcatgacgtgttgtgcagtggaaatggtcatcttccgctaaagcatggcgtgttgtgcagtggaaatggtcatctgacgctaaagcacagcatgttgtacagtggaaatggtcatcgtctgctaaagcacggcgtgttgtgcagtggaaatggtcatctgctgctaaagcacagcttccatcataaggtatgctccttgctcaaagagtgtggtcccaaacagcttttgggaggtcctccttgactcatggatgaaacccggaacatcttgaggactgagttaaccacaggtccttaaataactctccacacatttttcttagtttatctctacatgcagggtgtgcagcagcctgttcaaagtcatattttctgggaaatattttcagtgtttatttgcaatttagcccactctgtgtagtcttaacttatttcttctaaactcaccattaacctaaataatagtcaaatttaggggggctgtatttgtcttactcgagtcttctaccatagttgaaactgtcgtacccaagcgagttagagagaaatgccacactttgagacgaattcaggagtcctttattagctggtgactgagagayggctaacacaggaaatactctcggccctaaagaatgggctagattttcttttatacattggtttagagaggggaggggggattccagctgcaataaacttacagaagaaaaaacagacaaaaaacttaaaaagacagatggttacaggaaaacaaactgttccaggtgcagaggctttaaattcaccacaaagtgatgagtgagggtgctctgggc

SEQ ID NO: 690158 - DNA, 1543 bp, Homo sapiens
aataaattgtgcatctaatgtctaccaattaatgtacttgtagatgtatcttatcttaacttgagtctttgctgccactaatgaggtgtgaaggactcttctcccatggggaagtttttctttttccggagggaggagggcttttccaggtaatgtgtctagagtgttgggcagaagaatctgggaccacacctcaccagttctctccttaatcgacgtcatttgccttctcttccagctatgtttccagtgtcctctgggtgtttccaagagcaacaagaaacgaataaatctctggtgagttgtttatttgttcttcactttgttttacactgtattttctgagtttatgggtgtctgtgaattaaaaaggaaaagtggaaataagtaaaactcaggttgaaggaaatatacataaataagataaagctgacctgtagatatagacaggttataaaagcttagagttgtctaagttgagtgcaaagtttcctctgatctttctgatgccgaaacaaaaaaggcagtcatgtttgttacgtgattggaatggaacccgaaaagagagcacgctgtattcttgtgggacaggaaagcttgtgtgcaccaagtcttaaccaccaccttcattggtgacatagattatgtgctggaacatatttcacaccggtctggcagtaagcacttgtagtgttgtgcagtggaaacagtcatcttccgctaaggcatgacgtgttgtgcagtggaaatggtcatcttccgctaaagcatggcgtgttgtgcagtggaaatggtcatctgacgctaaagcacagcatgttgtacagtggaaatggtcatcgtctgctaaagcacggcgtgttgtgcagtggaaatggtcatctgctgctaaagcacagcttccatcataaggtatgctccttgctcaaagagtgtggtcccaaacagcttttgggaggtcctccttgactcatggatgaaacccggaacatcttgaggactgagttaaccacaggtccttaaataactctccacacatttttcttagtttatctctacatgcagggtgtgcagcagcctgttcaaagtcatattttctgggaaatattttcagtgtttatttgcaatttagcccactctgtgtagtcttaacttatttcttctaaactcaccattaacctaaataatagtcaaatttaggggggctgtatttgtcttactcgagtcttctaccatagttgaaactgtcgtacccaagcgagttagagagaaatgccacactttgagacgaattcaggagtcctttattagctggtgactgagagatggctaacacaggaaatactctcggccctaaagaatgggctagattttcttttatacattggtttagagaggggaggggggattccagctgcaataaacttacagaagaaaaaacagacaaaaaacttaaaaagacagatggttacaggaaaacaaaytgttccaggtgcagaggctttaaattcaccacaaagtgatgagtgagggtgctctgggc

SEQ ID NO: 690159 - DNA, 648 bp, Homo sapiens
ctaggatttatgtgtttccttaaagtcttagtttgattatgttccatttagcatgagtgactccattttggtttggtttgttctgttgggacctattgcatgagcttagttcaaaacaatggcctcccagaattttgcttaaaaaattcctccttttggctgggcacrgtggctcatgcctgtaatcccagcactttgggaggccgaggtgggcagatcacgagatcaggagattgagaccatccttgctaatacggcgaaacctcatctctactaaatacacaaaaaaatagccaagaatgctggcgggtgcctgtagtcccagctactcaggaggctgaggcaggagaatggcctgaacccgggaggcagagcttgcagtgagccgagatcatgccactgcactccactctgggggacagagcaagactctgtctcagaaaaagaaaatcctccttttcagtcaagttctcacttagttgagagtgtgaccaaaatgtagggccttagcctcactcttagttaccattgttttgggtttccggtttagcacatcactcccattgttttgggtaatggttttagcacgtcactcccattgttttgggtttctggtttagcacgtcactcccattgttttgggttctg

SEQ ID NO: 690160 - DNA, 2281 bp, Homo sapiens
  misc_feature 2181, 2182, 2183, 2184, 2185, 2186, 2187, 2188, 2189, 2190,2191, 2192, 2193, 2194, 2195, 2196, 2197, 2198, 2199, 2200,2201, 2202, 2203, 2204, 2205, 2206, 2207, 2208, 2209, 2210,2211, 2212, 2213, 2214, 2215, 2216, 2217, 2218, 2219: n = A,T,C or G
  misc_feature 2220, 2221, 2222, 2223, 2224, 2225, 2226, 2227, 2228, 2229,2230, 2231, 2232, 2233, 2234, 2235, 2236, 2237, 2238, 2239,2240, 2241, 2242, 2243, 2244, 2245, 2246, 2247, 2248, 2249,2250, 2251, 2252, 2253, 2254, 2255, 2256, 2257, 2258: n = A,T,C or G
  misc_feature 2259, 2260, 2261, 2262, 2263, 2264, 2265, 2266, 2267, 2268,2269, 2270, 2271, 2272, 2273, 2274, 2275, 2276, 2277, 2278,2279, 2280: n = A,T,C or G
attggttgcttgatggggatggcattgagtctataaattcccttggacagtatggccattttcagaatattgattcttcctacccatgaacatggaaggttcttacatttgtttgtatcttatttcattgagcagtggtttgtagttttccttgaagaggtccttcacatcccttttaagttggatttctaggtgttttattctctttgaagcaattgagatccttattgtgagagtcagttcagaatctggggttttgttttgttttgttttgttttgttttgttttgttttgttttgagatggagtctctctctgttaccaggctggagtacagtggcacagtctcagctcatgcaacctctgcctcccaggtccaagtgattctcctgcctcagcctcccaagtagctgggactacaggcacgtgccaccatgcccagctaactttcgtatttttttttagtagagatggggtttcgccatgttggccaggatggtcccgatctgttgaccttgtgatttgcctgtctcagcctcccaaagtgctgagatcacagacgtgagccactgtgcccagcccagaatctgggttttaaccagatttgccattataaaatgaaatgaaaccaaaaccaccaatcaatatctgtagcagtgttattgttgggaagcatgcacgtttgtttgagcttatttatatatacagagctgtttagcttaatatttaaactgaaaatttttagtatttttagaatgttttagatactttgatgaataaattttgttttaacaaactactattaaaaaaattataggttatatatttctgaacacattggcagatgtaaatgacagttatattcacacaatcagtttttcttgcacagaaatgacattttgtcaaaaagttaaaatctttgaaatgtattttctgtcctcatctttccccttttgagcatttttctccccctgggttggttataaaatgttccctaacttcaggcatctgattaaattttgggttttctcccttcctaccaattcatatggattggtaatgatctgatagaagacaattgccraaaatcaatcaaatatattttaaattaaacttctccaagataatattcatattaatccttctttaattgctgaatgaggaataaatgttcactgacccttaaaatcctaaaacttaatcagctcactggagtggatgaatggatatttgtccagatgagaatgcttaaggtctacttcaaggagttcataatagtaaaaatgtccttttcttccatcagaagcttcatcctggatcttttcatccttatttttctactagctctccttctccaaatacactgacttggaaccccagtttcagtggtggactgcgtggatttgattcttagctatgctataatgagaaagtagctctaaccctattctcattttcttcacctgtaatatagaaatcatcatcagacaatatacagataggggccatttatttcacagataataataggtgaaaatggagagtatgtgggtgtagacgggaaagtgagtttaaatggtttcaggagtctgtggaagttgtctttggatgattcagtgttctcagggaagcacaaccaaaaagacattgaggatttctgggcaagtgttagggattagagacaggataagatacaaaactaggtaaattagagaatgaatagattggaacatatgtagtatgattgattgataggcagcactgagattctcattttcaagtgggatatttttcaatttgatccatatagctagttgctcaaatatatgtggggatttggtggaaatttggatataaccagggttattttcctggttatattcagcaaagtgaaagagaaaccaggaagttgaagtttcctgggaatggttggccatggaatttaggcaggagaacaggaaatagagtacatcaagtaggtaagggtcattgtgaatatgataaaataatagtttggaggtctcagagagattgaaaaattttatgtcagcatatgaaagggaatgattaaaggaggagctcagagaatgggatgaataaaattgtgactacagagaagttcctattataagtaatgacgatgcttcactcagtccgtctggaagtgtggtccctgtgctannnnnnnnnnnnnnnnnnnnnnnnnnnnnnnnnnnnnnnnnnnnnnnnnnnnnnnnnnnnnnnnnnnnnnnnnnnnnnnnnnnnnnnnnnnnnnnnnnnnt

SEQ ID NO: 690161 - DNA, 2949 bp, Homo sapiens
gacctcaccttgtaggaagagtgctgagaaaatatttcacctgctctttctccataaagagctgatactgatcattgctattttcttattcgatctgtaaaggtagcaaagacaaatgcttaatatttcatttttccttaaatgattcttaatgacttgcagtttttaaaaacttaccctgagagtaaaccaaattacccactaaatagtgttttcacacagaagatgtgtaagagcatacctgttgtaaggaattataattttaaaatcattctaaagaagcaccattgtttctaaggtgatttctactgaacwagcagttcaaacaaagtagacagggaagagaaatggctatcagtgatgtatggctcaacaggtaaaacttcctgccttctaaaatggctctacttggaagattctgaagattccattagaaatacttgtatttaaagggtaataatgtgggaaaatgaatatgttgatttgcttgattataagaaccacttcactagaaataattatatcaaaacatcatgttgtactccttaatgtaggttaagaaaactaaaatgaaagaaaaaaaatctaggaacacttgtgtttagtaaaccagttttagatttcactcttgtacacacccattatctaggaccaattaaacatttggcactgaggaataattcagagcaacaactcctaggggagaactagattgtctggttggtgatcaaaaagaactaaagcatctctgaaggcaattagtccccaacactgtgaccaaggccctggaggtggggcatgttctttctgccttccacacaccgcttcaggctgaacaaggtgttattttttaaccgctttgtgaattacacttctttaaattcctgtgataattattccctatttcacaagggtgcctttctgtaacatcttgaatatgttacacaaatagtctttcttgaggcaccctctggtgataatactaaagatcacaatcaaaaacaattgtgcccagagtagcagtaccactttgcatttaggttgtgatccactgaaaagtaaattaaacacattaatatttctatttagggaaattctgacaagtaattttataacaagatcacttcattaattataaagcttcaaaaatacttagtgaaaaaaactaacagatcaggttaattatatgagacttttcaggaaaaaaagccatacaaaagcaaaaaaaaaaatgagaggagagacaaaaactatctttgactaacattttaaaggtaaaattatttactcacgttatttttcaaaattacattgtcaaattagcattcacttccttctaatctcctgaagccatctcactaaaaattatgcttttgaaacaaattaatgagcttaattcattttctatgagtgtatgttttgacttacttagttaatttttttgacatggaactgttagctttcaatgctgctgcaaaggcttccttatattcttctaactcagttgtaacctcttcataagcagttttcattttgtagaatttacaatccacatctttaagtgtgagttccttcttatttagtgaagctgtatgatatccttgtttaactgctctaattgttttttatattgtgcttgttcctaaaacagaggaaaagaatacacttttaaaacaattataacctaattattatgtttgttgcctttcattttgagtcagcgattcaaagagtatttttgaatatgttaaaaaagaggatgaagtttaaaatatttcagcaatatcaaaactaataactgaattcagaattaagtctgatttgtaaaaatttgaaatcataattatgctagtattaatgtaatctggtcatataaaaagtaatagaatccattcatagttttaaaaagtgatcaatgaacactgtagcttaagaccaattcataattatcacataatttctaaaacacaattttttcctatgccaactggtcttaatcatcaaatgactccataatgagaatcattactctgaaagattgattttgttataataataatggaaatttaaatatttaaaagaaaaaacagataccatttttttctagaactctacaaagcagattgctacaagagaggcaatctctttatatatatatatatctccaaaatataatttgcagtgaaataaatgaaagcacattacaagtaaacttacctgatttaaacaactcacctgtaaatggatttcttctaatttttctactgcctgcattgccctttcatctagctctgatttatattcttgtagtttactaagttctaccatactgttttccatatgtgtcttaagatttaatatttcttcttccaacatctttttatcttcctcaagtttttcacattcctgttgtacttttttcatagataataactcctgttgaaaaacttgattctctttagccaaattgacacattttgaagatacagcttccttctccgccataagatcatcaaactgcaagaataaaatagtataacttgataatgaagtaggctgagaataatctaatacaaaaccaatagcaaattttgaaatgcatttacttgcaataaaatgttatctgtaatgcagcagattcttcaaatgtgaacccttaaattactcagaattttaagaacaaagttaaagctaccatgagtcataaaaatatattctttactatcatcatctttgccacagaatttttgtacttaattttacttttatttttctgataattcatttttgttcctccttaaatggcacaaagttatctcctagtaaaaagtgtctaacccccttccttcattatcattccccacagtatgtcaaaaaaagtttcagagatatcatattgagttatttaggccaaagtcaataaatgggtctaggaataagactttgaaa

SEQ ID NO: 690162 - DNA, 1964 bp, Homo sapiens
agaagctacattcatcccatttaaaaaacagaatatgggccagccttactgacttccttctaatgagtagaatgtagtgaaagggataccatgtggcttccctatctcagactgttttcccttggaacccagccccaattgtgagagccatcaggccacaaacagagcctgaaagtgcctgtgtcagtgttcatgctgcctgtcccaaccaagtttacagccgatggccagcatcaaccatcaaacaagtgggtgaccaaagcttcagaggattccatttccccaactgatcagctgttcctagggaagctgaagggagcagagcaagctgtcctggccaagtttttcccaaaccacaggttcatgaacaaaataaatgtttttctttcaagccacaagactctgggtaattgttaggaaaataagttttaaaaagagacaacaggaaacataacttatgcagcagaaaagagtctcctttaaagcaggatctaataaaggttgatatttatttattgatgtcaaacattattgagaagcagtagataaccaggagagagacataagctgctgaggaggaattttcctaaaacaacttcaattatgaactctgataacaaggcaagggtgtcttcttacaatttcccctcaagttaggaagtaagactgggaagcaagaagatgtatgatttgaaaaacaactagaaatactgggtgacataggcaaaatcagacatttacctgatttcaattaactaaaattctaaaagaagaagttttgagtatttattaatcaacctagtattcaattttcattttcttttctaaatgaggaaataaggagaatattatggaatgatttttattcttcacagaagtaaaataagcatagtgtgttttgagtgttaagacacaaatgcaacttctcctttaccttactccaagcttgtttgtatggagaagttaagaccatcccatttctatgttatgccacaatgcttctctatagcacacaacttggctctgaaattttgaaagtcaaaatactaatctactatgtgtctctgataaattgcctgaacgttacctgattttgaagtgctgcactcctaagactttttcttggaatgagttaaacgttttattccaagaatcctctactgagctagaaagcagagctgtgcatctctgtttcagtaaaaggaggtcaatatagggaactgtggtttctgagaatgcaagatctgcactaataaaaggattagccacagtgctacccaagagaaccagctaccaggaggaaagagggtctgtaaactgcaagatgatgacttcacttgatttccactgaggaaagctggtggctcagacttaaacttctccttcctagatggtaaacatctatggaaggttctatgaattataatgagttagtaaaacataatgcactgaatattagactatgtcagcagatcctgtaaccaaaactttctgaaaatataactatagtgggaggcaatggaaaagagactaaaggcttgaatggagaaaaaaagaaattaagtgtgtcttgtaagcctggcgtctgatcatgtcttagaggaagtaaggtataagctggccagagactcctttgtgacacaaaaggtgaagttacagacattccactaaatttaatttttattatgacataagacaactggtaatatgcaacatgattgaaaaaaacttctcattcaattcgattgggccttgacataagaatagacataaacaagctaagaattgacaatctaaaaataagcctgcacttttacagtcaattgattttatacaagcttmacaaaagaacaaaatgggaaaagaatagtcttttcaacaaatggtgctgggacaactgggtatccataagcaaaaaataaataaagttcgaccaaatatcatatttaataattaactcaaaa

SEQ ID NO: 690163 - DNA, 477 bp, Homo sapiens
ccattatgatttagaaagaagtttatttgggaatagcgacctaggaatatcactcgaaggtcacatggttacctgtaaaaataagaaaatcttgaaccattaaagagggaatgaagaataaaaatatggattggggaattgatgaagtcagatgttttcatgaaaacttatactgagatcaaggataggtttaataacacagcaattaagagagaaattttaaagtttaacttctgtgtcccttttccctggggggaataaagtatatacttggataaactatatagcccttgaatatctgatatagatgatttaacctctgccctgtgtttttggatttgccagtttaaggagaataagttgtcaggctatatgaytgtagaaattttaaaaatgcaaaacatgtcacaaaataattatttattttggggtacataaagccagggatctagatttaatttcaaacataaattttag

SEQ ID NO: 690164 - DNA, 1468 bp, Homo sapiens
ttccaccagtccctccaatgacacgtagggcttatgggaactacagttcaagatgagttgggtgaggacacagccaagccatatcacactaatattcactaacaactgtgttcattatcttctttctgggaaaaggtcaatcccatgtatttcgctgatgattattaagtggagctggagatctgatttctggatgcaaggagaaaggcatgtgcagtctccaagcctggcctctaaactgctcattgcacagtcctcttttctcaccccatttcccctctctgatgcagaagagctaataggaaaatcaggggacttaatggacaaagaaaccacaggatggaaagaatcccatttgtcatccttcattggacatcaatataagataaacagcaatctttgctgtgttcagctgccaagatttcggggtggaggtggttgtttcttacagcctctggtggtacacactcggaataaataacattttatatgaagaagaaagtgataacaagttttggtgagaatgaggaggaaagggaacccctacactgttatggaaatgtaccttgcaatagtcattgcggaaaacaggataaaaattcctcaaaaaattaaaaaacagaactccagtgatccagcaatcctactactgggtatatattcaaaagatattaaatcaatgtgttgaagagaaaacgtcactttcatattcattgcagcattattcaaaatttctgagatatgaaaacagcctgaatatctctaggcagataaatggataaagaaaatgtggtgtatatatttacacacacatatacacacacaaacactgaatactattcagacaaaaaagaaaacaattctgccatttacaaaatcatggatgaaaccgaaggacattatgctaagttaaacaagccagaaatagaaagaaaaatactgcatgatgccacttatatgtggaatctaaaacaaacaaaaaaaaggtttaatacatagagacagagaatgaaacaatagttaacaggggcagggagggaagggaattaggaatatgtggagatgtaagtcacaaggtaaaagttgcagtgatgtgggttggataagtatgaagatttaatctataaataaagactaccgtttaaaatattgtacacctgagatttgctaagagaagattttaggtgctcttaccacacacattsactttcaacacccccacctacacacacacagttactatgtgagctgatggatttttcttttgcatgatctaaaatttcactatgtatatgtgtatcaaaacttcatgttgtacacattaaatatatgtaattcaaaaataataaaggcatgcctgcataatgttcatggtggtgcaaactggtgctaacaatatcgcaatattgctgaaaaccttgcgaaagtctccttgccctttgatcagttatatatttttagaaatttt

SEQ ID NO: 690165 - DNA, 1051 bp, Homo sapiens
tagagactgcctgtgtccccarcctacaatgaaaaccttacatactgaatctttcctcgtagtgaacactcatgtgttgtcacagttcattgcaggaagaagtaagtatgtcctgtgtgactctactaggagacaactcttgaaaatttgcacctggtttctttaagccttcatcccatggcctttttttctttactaattttgctgcgtgttattttgctttgataaatcttagccataaatacaactgtatactgagtcctgtgagttcttctactgaataagcaaatctggagccagttttagagacctctgacatagtaacaatgatggaagcaccagtatcttatataacctaatcctggaagtgacacaccaagacttctgccatatactattggttgcacagatcgattctgatgctttgagggacaggagtgtgaataccaggagccaggtagggatcactgggaaccatcttggaggctgctatgggaaatgcagcctttcatttagcaaattttaaataaagcattagtaaagttaccatacatactagtttgctgcagtagttctggcttacaaacattttcttccattcatgatagtgtcctataaaacctccattaaaaaactatgaagtccaatttatctatttttaaaaattttattgcttgtgcttttttggggtcatatataagaatccatttccaattctgaagtaatgaacttttttgtttctgctaataattttatagttcatacttttaggtaattttatagtttatacttttaaaatttcatttccctatgttttctaatggcaatacagtaatagaataaatttgggggtactgatttagtatgccacaaacttgctagaagtataaattataagtatagcttatacttttgttttcttccagtaattttatagcttatacatttaggtctttgatccacttggagtaaatttttagacacggtgtaaagtaagagcctgacttttgtcttcggcatatggctatctagttgtcccaggcccattaat

SEQ ID NO: 690166 - DNA, 614 bp, Homo sapiens
tgcaaaaggcccaatcagtcaaagggtcaatgggcagtcatttctacctagatagaggtcacttaaatggtttgttcttggatatcactcttattccatcaattcagtttcagaaaatgaaaccggatgattaagaggtgcccagcaatgtgcaacatacaggggatacaagaataaacaacatatcagtcatggacggaaagactctccaggttaatagagataaggagaggtaaattaattttcatcatgataggtgttgtgagacgcagttcaaggaaaagtagtggcataaaaaaagcagaagcaattaacatgcaggatattctgggggaccatatgtgaaacgttaccttacaatgagattctttgatycattagtaactaaaaccttttaggtggggttacatacagcctgactttctttgtgttagatttttttctaatataaatcctgttgcattggaacctaatctattttgaatcagagacaataaagaagtgactttaaaaattagtttcagtagtttaaaaaagggcaaattcaagaaatgggtaagacattctctgcttattttgccactaagctgaaaaaaagtcacatattttaatgt

SEQ ID NO: 690167 - DNA, 1391 bp, Homo sapiens
  misc_feature 669, 670, 671, 672, 673, 674, 675, 676, 677, 678, 679, 680,681, 682, 683, 684, 685, 686, 687, 688, 689, 690, 691, 692,693, 694, 695, 696, 697, 698, 699, 700, 701, 702, 703, 704,705, 706, 707, 708, 709, 710, 711, 712, 713, 714, 715: n = A,T,C or G
  misc_feature 716, 717, 718, 719, 720, 721, 722, 723, 724, 725, 726, 727,728, 729, 730, 731, 732, 733, 734, 735, 736, 737, 738, 739,740, 741, 742, 743, 744, 745, 746, 747, 748, 749, 750, 751,752, 753, 754, 755, 756, 757, 758, 759, 760, 761, 762: n = A,T,C or G
  misc_feature 763, 764, 765, 766, 767, 768: n = A,T,C or G
cttactctgtgtggctattcctctctggcattttcacatctacattcattctatcaatattataaagttcttgttaaaattttaaatcactttcttatttagaaaacaaaatgaatataattttatatctacatacctaaataaattgccttccctgtatacatacaatctcttcaacaaaacccagtataaaaccatgcaggaaatggcagactttgttcttagaaccaggcatataaaatgycttctgaatattatttattattttgccctttccactcatatttctaaatcagtttgtctctctaatattatcacatgaatagttttgccaaacttgggtacactcatctgcatgcaagtccttagaatggtttcccaagaactgttttaatattggaagttctcgtgctgattaaaaattttgaaaataatctttaaaatatatggaggtataccactgaactgcaaacttaaaaatggttaagatggtacattttatgttatgtgtattttaccacaataaaaataataagttttaaaaaatagtcaataagcctatattgggaagtcttcccattagggagaaatatatggaggtatatgtatgtgtatttagaaaaaaggaagcttcaccaaggattaatttctacctttgcatggactctnnnnnnnnnnnnnnnnnnnnnnnnnnnnnnnnnnnnnnnnnnnnnnnnnnnnnnnnnnnnnnnnnnnnnnnnnnnnnnnnnnnnnnnnnnnnnnnnnnnnggcagctagatttttcccccattggttatttcctttatgggaataaaggtactttgggataagcattaatccttatgctacctgatgtaacatgatgcagcagtaaacaaaatgaatgacactgcatttgtgtaaatgtgttctgattccgacttaggcacaaatttaatggttattcagtcaatcagttagctctttctgaagtgctaagaatatttttaaaaatcattgatattaattacttccctattaaacaactatttactgcaaaagatgtcaggcaaattatgtagcattgttttctacaggcagggtctcaatctacttgtggcacgggtttctaaatgttttacttttgttcaatttgtttttaattgaatagaagtctcttggttttctccacagacagtgtttctttttaaattccagaaatatgtaatataaaccttcatcctaactacttctatttctagaaatcatcattttgtgtaaaggtctcattatgatttaagttctgtaactattttcattcattaagtctaagtgattgcaacagagtgccggaaagtcttagattttttggtaatttataatatatatatattcattttaggcataggcaa

SEQ ID NO: 690168 - DNA, 483 bp, Homo sapiens
tttgtgtcacttcactgagagacatatcaaatctggtttttgtttctttgtgatgtcagcggctgttaagtctcaatacttaaatgtattccttcactgggggctaaaaaagagtgtttttctatcattttgttttttcttattcgctgaagaagattttaaaggaggtgagtccccttatctatcatttgtttatctagtgacagactgctgtctttttacttaatttaagatcaattggttcatatgaactcatggatttcaaacataatttaaatgtatttcttggttttcaatctgttggamtgcttatccttattcgagtttacattgtttcatctttggccagtgagatcctgaggaattgatttctgagaccttttgccatgaccctagtaatcttacatggactctttgctatccatttgatatgtcaagatgtttcagggtcatcttgtacattttctgatgctgacctgaaaa

SEQ ID NO: 690169 - DNA, 1314 bp, Homo sapiens
acatttgtcctgatatattgaattgttagcatgacagaatcacttaagctggattcactaacatcaggtttcctctcattattgacccctacagagtaggctctgacaagtggaactgctgcaaagttcattaataatgtggaataaatcaattgttcaggaaatactgaaaacagatgacactgaactcatacattttgcaagttcagcacaagcccatctccaccaaggacacacaatctctctctgtgtccttttctgacctacccatggaacctggtcttagattccgcttttcctcgagtatcccacagatacatggctcctcaacccctggaaacacagtaagctaagagtcattcaaaaagaaatggctacaagcttaaaaagaaaaaaagttgaaggcttacaaaagatttacaaacaggaagraagtgaagggcatgatttagggggtatgcctggattttactcatatttatgtttatttcagacatactatttctgtggccgtagatcctaactaacaacagctcagttgtgtgagttaaagggcattatcaggaacagcaaacgggcaagaatctaacctagcatactgtttaagatgcagggtagctacttctgggatgtgaagaatcccttactgcgaggtgttaaactgtggctgcagacaacaatatacatatgtttctttgtttttattactagcatcgcctcaacactcttcaaattgcatcacttaactaaatttgtcatccagaggttttagtttaaatatgcccatgctccaaaaacctttagctctgtgtgtgtgtgtgtgtgtgtgtgtgtgtgtgtgtgtgtgtgtgtgtcctcatgttatacagtataatcagcttatgttggtctatgctattggggacagaaataacatagataaaggaaatccacagagaatctgaaaataagctgatttttgccaatagatttaacttctcacccaccaaaccttaaatggaaactcctttccttgattgattattctcctcttctggactgcttaatagaagtgctaattagcagtgcaataatcaaaaggagggtggcaggagaaaaagtaagaatccacagaacagaatcatccacaaactagggaactggtcctaatcttctaagaatgaattatcccgattcttaaaattgaccgctcatattttgtttctttaaacttagtttctctcttttttttttccctttactaagctacatatttttttaagggtggagaggatgtcacgttacagacaagatcctttaagagaaaaatcatca

SEQ ID NO: 690170 - DNA, 586 bp, Homo sapiens
gaacattttctctcttgcaaaataaaaaawaaacaaaaagaagaatctactaggatgagttgttttttaggatttaaaattataatatatgtaagattatgtatctataaatatagatacataagtatgtatatactttcccgaggatcaatgattcagtatttgctaattcagaatttgcaacaattttatagaatatagataacagagaaaataagaatggaatctgtgtgtgtgtacatatgtataataaacatgtaaaattgctcaacctcacctgtaataatggaaatgcatgtaaatatcatgatatattttactagtagattaataaaaattaaagatcggtaatttaaaatataaaaatatgaagaaagtcttatcaagtcttatcaactgttgagagaggacactaatacaaatttgtcacagatcattttacaatatttattaaaaccaatcagttacttagaaattcatctcgcagatagtataaggatttctttagatttttttgtaaacaaaaaaagtaaaaataatccaaatatctatcagtagggaatggtttaaattatttaggcacatt

SEQ ID NO: 690171 - DNA, 586 bp, Homo sapiens
gaacattttctctcttgcaaaataaaaaaaaaacaaaaagaagaatctactaggatgagttgttttttaggatttaaaattataatatatgtaagattatgtatctataaatatagatacataagtatgtatatactttcccgaggatcaatgattcagtatttgctaattcagaatttgcaacaattttatagaatatagataacagagaaaataagaatggawtctgtgtgtgtgtacatatgtataataaacatgtaaaattgctcaacctcacctgtaataatggaaatgcatgtaaatatcatgatatattttactagtagattaataaaaattaaagatcggtaatttaaaatataaaaatatgaagaaagtcttatcaagtcttatcaactgttgagagaggacactaatacaaatttgtcacagatcattttacaatatttattaaaaccaatcagttacttagaaattcatctcgcagatagtataaggatttctttagatttttttgtaaacaaaaaaagtaaaaataatccaaatatctatcagtagggaatggtttaaattatttaggcacatt

SEQ ID NO: 690172 - DNA, 625 bp, Homo sapiens
catgttggccaggctggtctcaaactcctgacctcaggtgagctgctcgcctcagcctcccaaagtgctgagattacaggcgtgagccactgcacccaacctggaatgacatcttaaagcattgattaaaaaaataactagcagtataacattctatattgtatcaaaataggtttcaaagaaaggtgaaataagtatatttttggacaaaaaccagggaatttatcccaacaggcattcagtaaaagaaatattaaactggtattttcaggcctaaggaaaatgatcccagataaaatcactgaagagaatgaagaataccagaacagcaaatatgtggtaaatataaataattgctgaatatacaaaacaataatagtcatgtctttggatatagaaataaagtacatgaaaataatacatagaagaaaagggggcaaatgtttaaagtattctaaatttcaaccagtktgtgaaaatacattgaattgtacagttttgacatgcatatttttcagtataattcttcttcaatacaaagttaccatctttcatgtctttccactttccatttgaccccaccaccttcacccaccatcaacatccaggcttatacatctggcta

SEQ ID NO: 690173 - DNA, 689 bp, Homo sapiens
tgcttcaacaaatttttatgttgttacatgtttgataagaaatatttttaaaactgtagatcttaatttctacaaaaatatttattataagacatcattatagacatgttttatgttttaatatttacataaaatctagacataaatcagaataggcacactgatctacagcctacagaattgagaattmgagacaataatcttcaattatatgaaaaaatacatagagttacgtatttacctaaataagtttcatttttgctctttacttacaccaacactcattttcatctaattaagtgtagaattttaaactaattacgtcctatttaagaagacttttgtttatttaattgaaaggttcttttttacttatgagaacttatttcaatgaacttgcccctgaaaacatttttatgtagacaccaaaaatatttaaaataaataaaattttatgtgtatttatctttaatgcatgctattacttgttatcactgggtctataaaagcagtctactttttggttaatggaagtagtaattagcacctagccatcaactctggataaaactacatttctggataaactacttattaatacagatataatagattaagaaaaccccaaatgggcatatactttggagaaaaagataaagaagtcaggtaacaaatagtttcttactaca

SEQ ID NO: 690174 - DNA, 639 bp, Homo sapiens
taaatgtttatcattgtcatccaacttagaataagaagggggaaaacataaggaagattgaaaaaattgagaattaaaaattgagccatgagaaaagtattaaaaatcaagatagccaaagttcagtgaaatctaacgaagtggttcccacctactttattactaaaactcttttatatatttcttttatagatttgaaattgraatatattttgtctaccaaactatatttactaaaatgtttcctattttaatccatcattgtaactgtaaaataaatcatatcccaagtattcatttaatattatctatctgatcagaactactgatcattatataaccaatattaccatagtattgatataattccaataaaagcaaagaagcataacatactgttactctatggaaccttatacaaatatacaatggtattttaggctgcaaatagttacagatactatttttaccaccacagatcttacagtgatttttaaactaaactttttattttgagataattttagatttccatgcagatatagaaataatgcaaagatcccatgtaccctttattcagttttctcccatggtaacatcttacaaaatgagaacatattatcaaagccagtaaaatac

SEQ ID NO: 690175 - DNA, 634 bp, Homo sapiens
acagttgcctcacagcctgcctgcccaagagggcctcctggaggaatgtgaagatctcagtgggaaaataaagaaaaaacaaaacaaaacaaaaaaactagggaccatactagatgtctatgaattaaaatcagaagcagataactagaggagccaatttgctcctgataggaacctatgagtaacagatggccagtaatggtgctagggtttggtggccttcagagatttcatgaaaacttctctcaaaagagaaagaatcagctttaaacaactatcagacccagaggatgccaatcctagataattacaaagtacaagttaagtaacgtttttccttctgtgatagactgaataatgtcttcctgtccaaagaygtacacaccctaatctgcaaaaacgcacatggattttgtggatgtgattaagttacagatgttgagataaaaagattgtcctgacttatccatgtgggcctaatgtcattacttgggtccttatgcaagggaggcaagaggtcaaaggcagaaggagatgcaacgtcagaagtagaggttggatctggtggagaaacctagtgaggggaggaagaggagttgaattttaggtagggaattaggcgggacaataaaaa

SEQ ID NO: 690176 - DNA, 634 bp, Homo sapiens
acagttgcctcacagcctgcctgcccaagagggcctcctggaggaatgtgaagatctcagtgggaaaataaagaaaaaacaaaacaaaacaaaaaaactagggaccatactagatgtctatgaattaaaatcagaagcagataactagaggagccaatttgctcctgataggaacctatgagtaacagatggccagtaatggtgctagggtttggtggccttcagagatttcatgaaaacttctctcaaaagagaaagaatcagctttaaacaactatcagacccagaggatgccaatcctagataattacaaagtacaagttaagtaacgtttttccttctgtgatagactgaataatgtcttcctgtccaaagatgtacacaccctaatctgcaaaaacgcacatggattttgtggatgtgattaagttacagatgttgagataaaaagattgtcctgacttatccatgtgggcctaatrtcattacttgggtccttatgcaagggaggcaagaggtcaaaggcagaaggagatgcaacgtcagaagtagaggttggatctggtggagaaacctagtgaggggaggaagaggagttgaattttaggtagggaattaggcgggacaataaaaa

SEQ ID NO: 690177 - DNA, 625 bp, Homo sapiens
tgcttagttttctatcataaatctcttcttttgaaaaggaaacatacatcaaaaccatttctcttatttttattactattatatttaattgtaccttatttattacagaaaatatcttcattttcttggaacactgatacatgtcctttgccttttttattgtgttaatcaagtttgccaaagcattttgagccatctttgattttgaatacaatcttgttgtaggccctcctgagccagaaataatgagtctaaagtggcctgaactttctaacacgttttaatttttaggttaataaatattaacctaaaattactttacttattcattactttatttattttgtatttacagtaaattaactttcattacttcattactttatttcattttatttcattagtttatttgtttttaaagtaaattaacatgagaaattgctgctttgttaataagtcagtcttcctttaggttgtctaatatgaacaaaaayttactctaataaagtacttccaaaatgtccaattttacatttaagcattctcatcatttatattccatttttcacatgaccaccagaatgatctgttataatgtcaagtattagttatctactaaaagtgc

SEQ ID NO: 690178 - DNA, 1490 bp, Homo sapiens
tcacayggctttcttccttttgtgtctgtctctgtgtctctctccttgtaaaaaagacaccagtcattggatttagggaccttcctaatctagtatgagctcatcttaatctgactacatctgcaaagaccctgtttccaaataaggtcagatttacagataccagaagtgaagacttcaacatattttttggacacaatttaacaccgacaccatccaatatgatgctattctgaaaatatcatgtaaaacaattgtccatggaaagttttatagaaatgtccaattttactcctttttcttgatcaaaaagaaatgaagacttcagagttaaagactaggatcataacttctacggaaagtaaaatatgaatgctacttatatcacctagcaagagtttcccatgtagtggctagtaaacctttacctgttaagtgaacaatgctatcaggcttttgatcatatttatgtcctgccctattcatgttttatagaaggagttgttcagtgcctacccatgaaaggcactgaatgaatttgtatagtctatgaccttgagactcacacacataaactaattatatagacaggataggacattctctatttcaataaattttaaaaagagcagtaagccttgctcagtgtgttacttttagcctttggtagccaagaaataggtcttaggagggataacacttaggaagaaaactcttatgtttatcttatgcctgaattgcagtgtagtgaagcaactaacaggtcagtcttaaatcaggtggctttcattaaattcctgcttctattactttcttaatttgtgaccttagccatttaattaacctcccagcactttgggaggctgagatgggtggatcacctgaggtcaggagtttgagactagcctggcgaacatggtgaaacccatctctactaaaaacacaaaaattagctgagtatggtggcaggtggctttaatcccagctactcgggaggctgaggcaagagaattgcttgaacccaggaagtggaggttgcagtgagctgagattgtgcccctgcactccagcctgggtaacagagtgatactccacctcacaaaaaataaataaataaaaataaaaaatgaacctctataaactttaatttttcttatctgcaaaatgggaatatcagtagtatctacctcataagtgagattataaaagtaagaaactttgtacagagttaacatatgctaaaatattaatatgtcttggctgttattatcccctaattataatatttattcaggaacagaaccatagcatatttatcacatgtaattaggttaaatatatgacccctaaatctcagagataagtaatgaaaataatttccaaacctggaaatatagggacactttttaaaaatacgtttacaatatctaacactgtctttcatttgacaataatttgataaatattagaaaactaatatgttgagttgc

SEQ ID NO: 690179 - DNA, 1490 bp, Homo sapiens
tcacacggctttcttccttttgtgtctgtctctgtgtctctctccttgtaaaaaagacaccagtcattggatttagggaccttcctaatctagtatgagctcatcttaatctgactacatctgcaaagaccctgtttccaaataaggtcagatttacagataccagaagtgaagacttcaacatattttttggacacaatttaacaccgacaccatccaatatgatgctattctgaaaatatcatgtaaaacaattgtccatggaaagttttatagaaatgtccaattttactcctttttcttgatcaaaaagaaatgaagacttcagagttaaagactaggatcataacttctacggaaagtaaaatatgaatgctacttatatcacctagcaagagtttcccatgtagtggctagtaaacctttacctgttaagtgaacaatgctatcaggcttttgatcatatttatgtcctgccctattcatgttttatagaaggagttgttcagtgcctacccatgaaargcactgaatgaatttgtatagtctatgaccttgagactcacacacataaactaattatatagacaggataggacattctctatttcaataaattttaaaaagagcagtaagccttgctcagtgtgttacttttagcctttggtagccaagaaataggtcttaggagggataacacttaggaagaaaactcttatgtttatcttatgcctgaattgcagtgtagtgaagcaactaacaggtcagtcttaaatcaggtggctttcattaaattcctgcttctattactttcttaatttgtgaccttagccatttaattaacctcccagcactttgggaggctgagatgggtggatcacctgaggtcaggagtttgagactagcctggcgaacatggtgaaacccatctctactaaaaacacaaaaattagctgagtatggtggcaggtggctttaatcccagctactcgggaggctgaggcaagagaattgcttgaacccaggaagtggaggttgcagtgagctgagattgtgcccctgcactccagcctgggtaacagagtgatactccacctcacaaaaaataaataaataaaaataaaaaatgaacctctataaactttaatttttcttatctgcaaaatgggaatatcagtagtatctacctcataagtgagattataaaagtaagaaactttgtacagagttaacatatgctaaaatattaatatgtcttggctgttattatcccctaattataatatttattcaggaacagaaccatagcatatttatcacatgtaattaggttaaatatatgacccctaaatctcagagataagtaatgaaaataatttccaaacctggaaatatagggacactttttaaaaatacgtttacaatatctaacactgtctttcatttgacaataatttgataaatattagaaaactaatatgttgagttgc

SEQ ID NO: 690180 - DNA, 647 bp, Homo sapiens
tttcatatgagtaattaaattttaagtcaaactttctgtcaaaataggatgttggcaacattagtttattaacttgtaaataataaattaattaaacaaaagaaaaaaataaacaacaaagtgctttgctgactaataatatcaatttatcaaaaaaattccatacatgagcatctaccagatagctcttgtgaaggtcgtatttaagctgaatttccctcctgatcaaataagcctgttatttagttgttgaaatgatccaagtatgtttatagtctgtgtaatacaaaaaaataaatacttatacaatgcacatttcaacaataaaacttatcaactttttagttgaaacttctatttaattgattccatttaacacttagctgaacaccaagtaaacacagaggctgacacacagtatgaaagtaagatagcaactgatggaaattagttgtaaaccttattttccagaaggaacaaaaacataatttctgagactgcaacccattccaattaacaattacattaytgaaatcattaaaaataaacagactacctaaataaatgtaaaaccctactctgattgcagtgaagtttaaaaactttattgtagttgttagggaaattaaaaaatatgtacagaacaa

SEQ ID NO: 690181 - DNA, 1417 bp, Homo sapiens
ttaaaaagaacaagtccttccatttttatttttttcattcttcttataatattcttatattttatttttcattcttcttataagattttacgtgtgacattaaaaaggacaaggaaacagatgcatctttaatctgctattttaaacccaaaggtccaaagcacaattttgatagtactgaaaatgtaagagccttgtctttcacttcctcaatagttttttttagaaaagatgtaatcattactcctatgcaaatataaaatgggcatatatcaaatgctttatttaattcwtaaaaaatgaattcaaagagaattatttgaattaacacaaacaggtagtcatgaaaggtgaaacaaattttcaatagatacaaaatattctctatccacagaccaaaaatcaattgcatttaactggacaaaattcacttacatttttattaagaagaataatttgcattattatcaattttctataattacaatcttgtaaaatagttcaaagacaatgaacagtggagagaaagcagaacagcactaggcagaacaaccaagaatctcctttgtctatttcagtttttttcaacttttcctaaaacatctgggtgtggaaatgagttaagcgttttgattgccattccagaatttcaattttaacacttgggctgttcacagcatgtaaatttgttatgttcctcaacctctacatgttcaaagttgtttctggcactccgccaagactccaatcacttgatagttaccacttacgactttcccccaagggatgggtcccaaatatgtctcaataattttcacagaatagttcctcctaagagaaaatatgaatactcttttagtcttctcatttagacagaatacatattcaatttctagtgttttatgtcaataaagctgtcttttgggacattaattcttcactgtgcacagtgaggccatttctaagtactaagtgacagaggctctctatgagacttaactttgaacatgttaccactgctggattcacgccacatgaaataaatacccttaaatatattaacctcaatatatggtaattcataaagaatagttttattattttacacaaatattaagtgaacagctggacaagtttttacaggtgtatacatttgtgtaactataatccaggtcaaatgagaaacatttactgcatcttagaaagttcccatatggcctttcccagtcacctgatcaagcagtattaattgaaaagagacatcagagtataaatctaaaggaattaaatcagaatgtcaaagaggtatctgtattcctatgttcattgcagtattattcacaatagccaagatatggaagcaacctaagtgtccaataatggatgaatggacaaaaaatgtgttatatacatatgg

SEQ ID NO: 690182 - DNA, 666 bp, Homo sapiens
actgcaattgaagttctcacaattccttcctcatcattacactctaatttccctcctgacttccttattgctctactgggggaggagaatggagggattgctttaatagcaattttacacttcattctaaaaacctgtcctgtgcttcagtgaagaatatatggaagaaaatcatcagttcagaagattatagatctgataagaacaagttgcttttggtttttatagctatttattttccatttgagtccttctatatataagcactgagtctgttttggacttcttgctggtgtcattgttgcttgactatgggggggataatttcatttcacttataggataagccagctctttcctgttagtaaaattccttgaccataagcatctaattaatcaagacatgttctcacagcatgttgctctaagtcctagtgtatgcagtgtagaagagaccttttaagacttttatcctcttaatatctaggtgtattagtccrttttcatgctgctgataaagacatacccaagactggccaatttacagaagaagaggtttattggacttacagttccacatggttggggaggcctcacaaatcatagtggaaggcaaaaggcacatctcacatggtggcagacaagagaaggaagcttgtgcaggga

SEQ ID NO: 690183 - DNA, 880 bp, Homo sapiens
ggcattcttgctaattttaaaagcatgctcaagrttcgtaaaataattttaaaaatcagcaactaaatatcaacattttctatcacaaaacatataaacataaaattataaatgcattgaaaatataaatgctaaatatgtattaacagataacattaataaagtatcgtgctaaaacacattacataagaaatgagaattataaaacatttaaaaatataattttctcttttttaaaagatgaaaatgttaaatctttttacgatatgatatacattgatttttcttttaaactgcatatacattgtggcataatctaaatagaagaatcatggtaaatgtttccaaagtcttagtactacttctaatttctgaattttttttttcagcttttattttagattcaagggttacatgtgcaggcttgttacccgggtatattgcttgatgatgaggtttgggatatgaataatcctattacccaggtactgagtacaatacccaataggtagtttttcaactcttttctcccatttttcctcctcccatctagtagtccccagtctctgttgttgccatatttatgttcatgagtacccaccgtttagctcccacttgtaagtgagaacatgcttatatttggtctttggttttctttttctgttagtttgctttggataatgggctccagctccacccacgttgctgcaaaggacatgatctcattcttttttatggctacatagtatttaatggtgtatatgtacattttcttcatgcaatctaccattgatgggcacctaggttgattagatgtctttgctattgtgactagtgctgtgctgtgatgaacatatgagtgtgtgtgtcttttggtaga

SEQ ID NO: 690184 - DNA, 880 bp, Homo sapiens
ggcattcttgctaattttaaaagcatgctcaaggttcgtaaaataattttaaaaatcagcaactaaatatcaacattttctatcacaaaacatataaacataaaattataaatgcattgaaaatataaatgctaaatatgtattaacagataacattaataaagtatcgtgctaaaacacattacataagaaatgagaattataaaacatttaaaaatataattttctcttttttaaaagatgaaaatgttaaatctttttacgatatgatatacattgatttttcttttaaactgcatatacattgtgrcataatctaaatagaagaatcatggtaaatgtttccaaagtcttagtactacttctaatttctgaattttttttttcagcttttattttagattcaagggttacatgtgcaggcttgttacccgggtatattgcttgatgatgaggtttgggatatgaataatcctattacccaggtactgagtacaatacccaataggtagtttttcaactcttttctcccatttttcctcctcccatctagtagtccccagtctctgttgttgccatatttatgttcatgagtacccaccgtttagctcccacttgtaagtgagaacatgcttatatttggtctttggttttctttttctgttagtttgctttggataatgggctccagctccacccacgttgctgcaaaggacatgatctcattcttttttatggctacatagtatttaatggtgtatatgtacattttcttcatgcaatctaccattgatgggcacctaggttgattagatgtctttgctattgtgactagtgctgtgctgtgatgaacatatgagtgtgtgtgtcttttggtaga

SEQ ID NO: 690185 - DNA, 625 bp, Homo sapiens
ccatctcygtcctcaatgacagacagtgcttggtaacaaaagcaaattagaacgatcacatttccaatgtcaaatctccaccaaaaacgttgaatgagagatttgctccaaaacagaggagagattattcttccagcagaattgacaaaacttacggtcagtttcaacagcaggagcttgcatgatgaggaattagccaaggccaaaatcctctaaacttaaaggactacccccaatggagttgatgtcagtggtttttacaccttctgcaaccaagccccacagatggtagcatacctaaagtacttctaataaagcaaccaaccacagggcgtacatgaaaattagaattaactggtttaggtaaatgcacatatgacacattgctcatgctcaaatgtttcaaactaaattgaaaaaaaacacacacaatataagttggaagcaatgcagtaaacagattagtagctggagaaagtggtaatagtgtttcaagtactgaagtgttttaataagacaatatgaaaattaatgagaaattgaaataggacaatagtcatggaaatacaaaggatggaacaggtatttttaaaagtctctgtgaataaccctcctaaattcagta

SEQ ID NO: 690186 - DNA, 625 bp, Homo sapiens
ccatctccgtcctcaatgacagacagtgcttggtaacaaaagcaaattagaacgatcacatttccaatgtcaaatctccaccaaaaacgttgaatgagagatttgctccaaaacagaggagagattattcttccagcagaattgacaaaacttacggtcagtttcaacagcaggagcttgcatgatgaggaattagccaagrccaaaatcctctaaacttaaaggactacccccaatggagttgatgtcagtggtttttacaccttctgcaaccaagccccacagatggtagcatacctaaagtacttctaataaagcaaccaaccacagggcgtacatgaaaattagaattaactggtttaggtaaatgcacatatgacacattgctcatgctcaaatgtttcaaactaaattgaaaaaaaacacacacaatataagttggaagcaatgcagtaaacagattagtagctggagaaagtggtaatagtgtttcaagtactgaagtgttttaataagacaatatgaaaattaatgagaaattgaaataggacaatagtcatggaaatacaaaggatggaacaggtatttttaaaagtctctgtgaataaccctcctaaattcagta

SEQ ID NO: 690187 - DNA, 625 bp, Homo sapiens
ccatctccgtcctcaatgacagacagtgcttggtaacaaaagcaaattagaacgatcacatttccaatgtcaaatctccaccaaaaacgttgaatgagagatttgctccaaaacagaggagagattattcttccagcagaattgacaaaacttacggtcagtttcaacagcaggagcttgcatgatgaggaattagccaaggccaaaatcctctaaacttaaaggactacccccaatggagttgatgtcagtggtttttacaccttctgcaaccaagccccacagatggtagcatacctaaagtacttctaataaagcaaccaaccacagggcrtacatgaaaattagaattaactggtttaggtaaatgcacatatgacacattgctcatgctcaaatgtttcaaactaaattgaaaaaaaacacacacaatataagttggaagcaatgcagtaaacagattagtagctggagaaagtggtaatagtgtttcaagtactgaagtgttttaataagacaatatgaaaattaatgagaaattgaaataggacaatagtcatggaaatacaaaggatggaacaggtatttttaaaagtctctgtgaataaccctcctaaattcagta

SEQ ID NO: 690188 - DNA, 617 bp, Homo sapiens
ggcgggcggatcacctgaggtcaggagttcgagacaagcctggccaacatggtgaaaccccatctctactaaaaatacaaaaattagctgggcatggtggcaggcagctgtaatcccagctacttgggaggctgaggcaggagaattgcttgaacccaggaggcagaagttgcagtgagccaagatcgtaccattgcattccagcctggaggacaagagtgagacttagtytcagaaaaaaaaataaaataaaaaatattatttagaactaaggtatttaaaatttagatgatcattaaagtttgtagacacacaatactgggtatgtagtgtcctgttataaatcaaattctgaaaacagtgatggactgaaaacaacagaaaaacaaggaattaaaaaatacagaattaaggagaaaagatctatattcttaggcaagagctctgtgtgtaaaaaccaattaaaaatgaaagttggtaaattagttctttaccttgttcatcaagaagtttctttgtaagatcttcagcttcatctccaccctctaattctaaggtgtcatcattaatttctagattctccaactcaagttccaaatcatcgggacttgatacct

SEQ ID NO: 690189 - DNA, 617 bp, Homo sapiens
ggcgggcggatcacctgaggtcaggagttcgagacaagcctggccaacatggtgaaaccccatctctactaaaaatacaaaaattagctgggcatggtggcaggcagctgtaatcccagctacttgggaggctgaggcaggagaattgcttgaacccaggaggcagaagttgcagtgagccaagatcgtaccattgcattccagcctggaggacaagagtgagacttagtttcagaaaaaaaaataaaataaaaaatattatttagaactaagktatttaaaatttagatgatcattaaagtttgtagacacacaatactgggtatgtagtgtcctgttataaatcaaattctgaaaacagtgatggactgaaaacaacagaaaaacaaggaattaaaaaatacagaattaaggagaaaagatctatattcttaggcaagagctctgtgtgtaaaaaccaattaaaaatgaaagttggtaaattagttctttaccttgttcatcaagaagtttctttgtaagatcttcagcttcatctccaccctctaattctaaggtgtcatcattaatttctagattctccaactcaagttccaaatcatcgggacttgatacct

SEQ ID NO: 690190 - DNA, 2149 bp, Homo sapiens
tggcagccccaacccctagcaggagcagagcagtaacacagatgaaaagtgcaggtgacggccttcactaaggacacatttactcacctgaatgaacaagcagtgggaccctttatacccagtcacttgggctcaagaaatagctggattctccccatggaggctgccctcctccccctcccccacttccccgatttaaggttgaagatggttggaatgcaccgcacctatgaagaccagtggacatggctggggttagagccagaacaagccctcaaaagaacacaggccatactggagacttgggacagccaagtggaaccagaacaggacataaagtgagcttgtacatccaacagccatgagtaacatcgaaaaggttgtagcctagccaacacggcgaaaccccatctctacaaaaaatacaaaaagtagttgggcttggtagcatgcacctttaatcccagctgcttgggaggctgaggcaggagaatcacttgaacccagggggcagaggttgcagtgagctgagatcatgccactgcactccagccagggtgacagaatgagaacctgtctgaaaaaagaaaaaaaaaagacaggttgtaacccatcctccaagataccccccatacatctaaaacaattagattaaacagactaaacatgtttctgtcctctgtctcatgtctctcaggcagcagggcttcccatgtattttatgctagcaggcactgtcccacaccctcctgaagccacggtgtcttaaggcttcttctgtcataaaacgtgcctttggatccactaccaacaacttcttgacaaggtccagagctaaagcaacaattgggcaaatcacagtgaaaagtataaatatattatcagtaatagtatgccagaattaacaggtcaccatccagaaagagcagagagggtctgagatcatcagggagtcagcagacagggccccctaatcttcctcattctctgtattcagagtactgtgagaaggccaggaatgataatgacactccctgtctcctgctgctgggacatcattcacgacctcttcaccgcctgttccctctcctgttgctagactcaaggtcaaactaattaaagctaaacttctacccaattctaagatacttgggatgcacagcaaactctccctgacagatggatgggtgagagttactcagccagggagaggctccctggaactgcagacttgtcagaaataaaacttgactactccagcaagcaacaaatgcacgctggcctgtaaattacaacataattattccttaaatattctgacatttaacacaatcacctatgttatgttatttaacattcaagacctagaatattatataggctagtgaatattatccttcatctctggagtatgaaaaggagcgtaactggtgaaattgctgkttttttgttatctgactaagtgtattaaccaaatccagtgaacgtttctgtctgcatcgtattcaagatctttgcagcttttgacgccaatgatcactctcttattgaaacacttgtcttttttttttctaattctgaggcactacttactggttttcttcttccctcactgcttcttcctttcttgtcttccatattccattcttcttttcctaacttctaaatatgaaatatcactcaggacttagacctgagccttttcctcttttccttttatatagtttgtctatgtggtctcttcaatatccaagatatcatatttatgcatgcaacattctaattcaaacattatctggccaggcacagtagttcacgcctgtaatcccagcactttgggggctgaggcgggcagatcacctgaggttgggtgtttaaaccagcctggccaacatggtgaaaccccatctctactaaaaaatacaaaattaaccagacatcatgacatgcacctgtagtcccagctactcaagaggcttaggcaggagaatcgcttgaacccaggaggcagaggtcgcagtgagccaagattgtgccactgcactccagcctcaaaatataaatatatatatatatataaaatcattatagatatagttgaagcttcctatgtactattttccaacctcattcctctccttttcctgga

SEQ ID NO: 690191 - DNA, 647 bp, Homo sapiens
gtgctgggattacaggtgtgaaccactgtgcctggtcctcctttccttctttctttcttcctctttccttccccctcccctctcctccattcctttcccctcccctctttcatcccccctccctttttccttccttgcttctttccttccttccttcctcagggtcttgctctctcacctaggctggagtgcagtggcatgatcactgcaccatgactttcaggctcaagtgatcctcctgccccagcctcccaggtagctgagactacaggtgcatgccaccgtgtctggctaatttaaatttttttttttttttttttttgaggcagagtcgtagtcttttgcccaggctggagtgcagtggtgtgatcctgtcttactgcaacctccgcctctcgaattcaagtgattctcctgyctcagcctcctgagtagctgggattacaggcatgcactaccacacctggctaattttgtatttttagtagagacggggtttcaccatgttagccaggctgatctcaaacttctgacctcaggtgatttgcccgccttggcctcccaaagtgctgggattacaggcgtgagccactgtgcctggtccttctttccttctttctttcttcctccttccttccccctcccct

SEQ ID NO: 690192 - DNA, 1764 bp, Homo sapiens
  misc_feature 1374, 1375, 1376, 1377, 1378, 1379, 1380, 1381, 1382, 1383,1384, 1385, 1386, 1387, 1388, 1389, 1390, 1391, 1392, 1393,1394, 1395, 1396, 1397, 1398, 1399, 1400, 1401, 1402, 1403,1404, 1405, 1406, 1407, 1408, 1409, 1410, 1411, 1412: n = A,T,C or G
  misc_feature 1413, 1414, 1415, 1416, 1417, 1418, 1419, 1420, 1421, 1422,1423, 1424, 1425, 1426, 1427, 1428, 1429, 1430, 1431, 1432,1433, 1434, 1435, 1436, 1437, 1438, 1439, 1440, 1441, 1442,1443, 1444, 1445, 1446, 1447, 1448, 1449, 1450, 1451: n = A,T,C or G
  misc_feature 1452, 1453, 1454, 1455, 1456, 1457, 1458, 1459, 1460, 1461,1462, 1463, 1464, 1465, 1466, 1467, 1468, 1469, 1470, 1471,1472, 1473: n = A,T,C or G
tctgaatatatagaatttctcacaacatcctactttacatagtaggtaggtcatctataattgcttgtttagaaaaattatttatgaagattttgttactctcttttggcatcacactacaaaaacatttttttccaggtttcatgataagtaataaaattacctcattctataaatgaagataatattatatctcaatccaccataatcaaataagcttaaaggcgccattggaaatacggatatctatatatatggtgttgccaaggaaggttgactgaatgaagtagtattctgttcatcttagtaaattcttcaaaatccttcctccaaacctcaggctttcatatgtaggaactcactttctcagtgcctcaaattttatcaggatcatgaatgctaatcagatatagatagatgtgtcagcttcttgaatcaaaatctacatgtattttgttcgctatgtataaagtatccccatggcctcaactaaaatgccttctgggactcggcagggaatgtgaataagtgacattataggagtgcagacccagtgggaattggacagtatatgccctatttaaaggcacccaattattattatttcaaaatactatgtggctaaataaagtaatgataataacaaaaacaataaactgttattgatgttatctaatagttggtagaaataaacactttattattagtattatcattattatcatcattatcattatattttcatcttakgtactctactatttgatttatgaaatttaaatattatcctttggctcccacatgttatctattcagcaaccaatacatttattcaattttcctctttcttcttttttatgtttatttctactagatcaggtcacacaaccttatgtactcttgttcctcccttgtcttcagctttgttgtattgctagatcttaaaaaaatgtctagccaatgtttactttactccttctgttcaggtttttcttgccatatccccattggatgaaggtcttcctttggtccacccttcaagaaagggtctggagtataatatccctcaagtctttgaatgtttaaatttgctttcctacagtttcaatacttgaaagacatttggctggatgtaaaattgtgagtcatatatcttttccttgaatttactgaaatttcttgtaccactattatttattttgcttattactgtcaagatcctactgatcttatgtttcataagaaatgtggtctttttggcacagcgtggtggctcctgcttataatcctagcactttgggagctggggcaggaagatcactagagctcagaaatttgaaaccagcctgggtaacagactatgaaggaaggacnnnnnnnnnnnnnnnnnnnnnnnnnnnnnnnnnnnnnnnnnnnnnnnnnnnnnnnnnnnnnnnnnnnnnnnnnnnnnnnnnnnnnnnnnnnnnnnnnnnnaccaaaacaatagataatgtaatcaaaataaaaattataattggaagataaaatattagggacaataatgttgaatatataacatttattgagtcaatggaggggtaaaaaataaagattcagaaacacatgtaaaaataaaaaaaaattctccttaaataccaaaaataaattggtagaaaatgtaatagaaaataatcacctcaaaatagcaacaaaatataaaatagttaaaaataattgtagccaaatgtgtgctagacttttatggaaaaaaaaaaacactgtaaa

SEQ ID NO: 690193 - DNA, 1764 bp, Homo sapiens
  misc_feature 1374, 1375, 1376, 1377, 1378, 1379, 1380, 1381, 1382, 1383,1384, 1385, 1386, 1387, 1388, 1389, 1390, 1391, 1392, 1393,1394, 1395, 1396, 1397, 1398, 1399, 1400, 1401, 1402, 1403,1404, 1405, 1406, 1407, 1408, 1409, 1410, 1411, 1412: n = A,T,C or G
  misc_feature 1413, 1414, 1415, 1416, 1417, 1418, 1419, 1420, 1421, 1422,1423, 1424, 1425, 1426, 1427, 1428, 1429, 1430, 1431, 1432,1433, 1434, 1435, 1436, 1437, 1438, 1439, 1440, 1441, 1442,1443, 1444, 1445, 1446, 1447, 1448, 1449, 1450, 1451: n = A,T,C or G
  misc_feature 1452, 1453, 1454, 1455, 1456, 1457, 1458, 1459, 1460, 1461,1462, 1463, 1464, 1465, 1466, 1467, 1468, 1469, 1470, 1471,1472, 1473: n = A,T,C or G
tctgaatatatagaatttctcacaacatcctactttacatagtaggtaggtcatctataattgcttgtttagaaaaattatttatgaagattttgttactctcttttggcatcacactacaaaaacatttttttccaggtttcatgataagtaataaaattacctcattctataaatgaagataatattatatctcaatccaccataatcaaataagcttaaaggcgccattggaaatacggatatctatatatatggtgttgccaaggaaggttgactgaatgaagtagtattctgttcatcttagtaaattcttcaaaatccttcctccaaacctcaggctttcatatgtaggaactcactttctcagtgcctcaaattttatcaggatcatgaatgctaatcagatatagatagatgtgtcagcttcttgaatcaaaatctacatgtattttgttcgctatgtataaagtatccccatggcctcaactaaaatgccttctgggactcggcagggaatgtgaataagtgacattataggagtgcagacccagtgggaattggacagtatatgccctatttaaaggcacccaattattattatttcaaaatactatgtggctaaataaagtaatgataataacaaaaacaataaactgttattgatgttatctaatagttggtagaaataaacactttattattagtattatcattattatcatcattatcattatattttcatcttatgtactctactatttgatttatgaaatttaaatattatcctttggctcccacatgttatctattcagcaaccaatacatttattcaattttcctctttcttcttttttatgtttatttctactagatcaggtcacayaaccttatgtactcttgttcctcccttgtcttcagctttgttgtattgctagatcttaaaaaaatgtctagccaatgtttactttactccttctgttcaggtttttcttgccatatccccattggatgaaggtcttcctttggtccacccttcaagaaagggtctggagtataatatccctcaagtctttgaatgtttaaatttgctttcctacagtttcaatacttgaaagacatttggctggatgtaaaattgtgagtcatatatcttttccttgaatttactgaaatttcttgtaccactattatttattttgcttattactgtcaagatcctactgatcttatgtttcataagaaatgtggtctttttggcacagcgtggtggctcctgcttataatcctagcactttgggagctggggcaggaagatcactagagctcagaaatttgaaaccagcctgggtaacagactatgaaggaaggacnnnnnnnnnnnnnnnnnnnnnnnnnnnnnnnnnnnnnnnnnnnnnnnnnnnnnnnnnnnnnnnnnnnnnnnnnnnnnnnnnnnnnnnnnnnnnnnnnnnnaccaaaacaatagataatgtaatcaaaataaaaattataattggaagataaaatattagggacaataatgttgaatatataacatttattgagtcaatggaggggtaaaaaataaagattcagaaacacatgtaaaaataaaaaaaaattctccttaaataccaaaaataaattggtagaaaatgtaatagaaaataatcacctcaaaatagcaacaaaatataaaatagttaaaaataattgtagccaaatgtgtgctagacttttatggaaaaaaaaaaacactgtaaa

SEQ ID NO: 690194 - DNA, 631 bp, Homo sapiens
caggcttattaggaagaggaaattcccgcctaataaattttggtcagaccagttgatctcaaaaaccctgtctcctgataagatgttatcaatgacaatggtgcccgaaacttcattagcaattttaattttgcatccgtcctgtggtcctgtgatctcaccctgcctccacttgccttgtgatattctattaccttgtaaagtacttgatgtctgtgacccacacctatttgcacactccctccccttttgaaaatccctaataaaaacttgctagtttttgtggcttgtggggcatcacagaacctactgacatgtgatgtctcccctggatgcccagctttaaaatttctctcttttgtactctgtccctttatttctcaagctggccaacgcttaaggaaaatagaaaagaacttacgtgaatatcrgggccaattccccgatacacatgctttaaaaatcagctacagattgctgatatttgataagaaaattagttttcaaaacaagaaattttgtcttaagaagtggcgacatcatctttgaatgaagatagcaggagaaagtgttcagggcctgatatttccttggcaaataattcacgtctgctccaacataaaaagaaata

SEQ ID NO: 690195 - DNA, 596 bp, Homo sapiens
tggaataaattggcatgtagcataggctggtgataatcacgcctgacatgtgcttccaggtatttggcgtctgaatgtactgtgtgcatttgtcagctagacaaacatagtcacagtttgggatggaggaaactaagaacagtaaaacattttaaacttcaagaaattacctgacatttgcattttcgacagaacaaatttccctttaaatcaatcagtaggcattggaatcttggtttcactttcccctgttccttttttgggctttatccaatttcatttttaaggaaactacagcattagtgctctttatttgcttcccagatctgtatgcygaagagttagtagcaactcctggtgacataagttctttggttctagccaactttgagctgtttttttaatctgaaaataatctactataaataagtaaatgaatgaatgaatgaaataatagatgaagctgagattattataagccttgctttatattatataagggctaattgtgtcaaccagtgccctttctgatacagcattctggtaaccttcattacatttcttatagatggatttcttttttatttctgttttcc

SEQ ID NO: 690196 - DNA, 1087 bp, Homo sapiens
ggggccactgtctctggtctcccttgagcttctggtctcctagagggagacaggcatatacgcagaaaatgaaaaacaaaactargttataattacgtatcagactcaatggagacacaaaaaggagaactcaatgtaagaggtgaggggtaggaaagaagtttatgctaagccttaaagggtcagaataaagtaagacaattaatctactaatatgttaattttgaataagaaggaggaggaagaagagggaacaggagtttgttttttctttgcttcctttttaaaatccttattgtatttcaaaaccttacctctgcttgccagcagagtgcatgttgcctagttgggaaatgtagcactgcgtagcccatcaccttatattcaggctgggatcagctcagtgtttaccaggtattaacagagtaaacttaggaccaaagaacacagcatctgacattgcaaagaagtgccatgcaaaagctgtgtaacaccatcctcagagttatggcccttatgcactaagaatacagatgtgcattcacttgtttattcattcactcaaccaatgtttacccaccatttattaagtgccaggtgctgtgctaggcatcagtgatatttggtgaacattctatatttagttcttgatctcacggaatgcacagttcagtggggaaagcaatctgacactcacaagtcaacacatcattattgaccgtaaaaggaccatgaaaaaggaataaagtgctaaaacagcattcagctggagaccttccctgattaaatgacttttcagctgaagtccaggaaagagggaacaatgtaagaaacagcattccaaggagagggggaaagatttcttagcctgctccatagaagctctagaatcaagtgagtcttatctgaactacctaggcaaggattcacaggaaagacttccaaatgcattaccacttcaagattcccctgctgaccctcccaaactctaaacggaaagcacatcctaatttgaaaggatgaaaaggtgactttgccttctgggttaatgtctacacgaaaatagctttgaagagagtgaatgtgc

SEQ ID NO: 690197 - DNA, 1291 bp, Homo sapiens
atggttggtgaacacggaataatagtttaatcattcagataaactattttgcagaaacatttaaaatcagaaattgcagaactactatctgaactttaaagggacactcttaaccatattttgttttatttagtactcacgctgacaagttgatttaccacctcattttcccaacaagtgtcaagatttcaatatgcagttaatggtttctaaaaacagtgactatttaattacatccttatagtttccccaaattgcttatagtttgccctcatttagttaggtctataatatttctcaattagtgtaaaaatttctactcctttttaatcattgatgcatataatgatgtataaaaattattrtgtagatagcccctccatgaaaacttaaaatcaaaagcttttagcatcaaagtatcagaatacaaactaaagaaaacacaccaattcagaaagattttctttaaatatattaaagtgaataaaatgttcacagagaatcactcacatctaaggatatagactttttcctaaagtgaaactatttttggctcactcagactctgagtagtgtttcactgattttgaatttcactggtcagaaccagtgttggtagtaagaattattgtcccagaagagaatagaaatgcttgccaactctactttcaacccttgctggaatccctatgttgtgggtagagatatgactaaattaagcagttttaagtctaagccagaaagatttaattattgatttattggttttacaattgttaaatattgcctttaaccgagtatatgttttatcatgtaataatcactttggcagcctcaaatgtcatgggttcacagggtaaatgttaaggtaatagctaaacaattgagcgtataggagatctatagtgagtgaaaaaaattcaagatgtaatacagagtccagtatgacagacttgagaaactttcaaaaactaggaaaagaaaaccaaaagtcattcttgcagtgtctctgattgcactgacttgatgcagaattggtgcattaacatatgtatacattacatatgtatacttgtgccatgctggtgtgctgcacccattaactcgacatttagccttaggcatatctcctaatgctatccctccccgctctccccaccccacaacagcccccagagtgtgatgttccccttcctgtgttcatgtgttctcattgttcaattcccacctataagtgagaacatgcggtgtttggttttttgtccttgcgatagttgactgagaatgatga

SEQ ID NO: 690198 - DNA, 1291 bp, Homo sapiens
atggttggtgaacacggaataatagtttaatcattcagataaactattttgcagaaacatttaaaatcagaaattgcagaactactatctgaactttaaagggacactcttaaccatattttgttttatttagtactcacgctgacaagttgatttaccacctcattttcccaacaagtgtcaagatttcaatatgcagttaatggtttctaaaaacagtgactatttaattacatccttatagtttccccaaattgcttatagtttgccctcatttagttaggtctataatatttctcaattagtgtaaaaatttctactcctttttaatcattgatgcatataatgatgtataaaaattattgtgtagatagcccctccatgaaaacttaaartcaaaagcttttagcatcaaagtatcagaatacaaactaaagaaaacacaccaattcagaaagattttctttaaatatattaaagtgaataaaatgttcacagagaatcactcacatctaaggatatagactttttcctaaagtgaaactatttttggctcactcagactctgagtagtgtttcactgattttgaatttcactggtcagaaccagtgttggtagtaagaattattgtcccagaagagaatagaaatgcttgccaactctactttcaacccttgctggaatccctatgttgtgggtagagatatgactaaattaagcagttttaagtctaagccagaaagatttaattattgatttattggttttacaattgttaaatattgcctttaaccgagtatatgttttatcatgtaataatcactttggcagcctcaaatgtcatgggttcacagggtaaatgttaaggtaatagctaaacaattgagcgtataggagatctatagtgagtgaaaaaaattcaagatgtaatacagagtccagtatgacagacttgagaaactttcaaaaactaggaaaagaaaaccaaaagtcattcttgcagtgtctctgattgcactgacttgatgcagaattggtgcattaacatatgtatacattacatatgtatacttgtgccatgctggtgtgctgcacccattaactcgacatttagccttaggcatatctcctaatgctatccctccccgctctccccaccccacaacagcccccagagtgtgatgttccccttcctgtgttcatgtgttctcattgttcaattcccacctataagtgagaacatgcggtgtttggttttttgtccttgcgatagttgactgagaatgatga

SEQ ID NO: 690199 - DNA, 1291 bp, Homo sapiens
atggttggtgaacacggaataatagtttaatcattcagataaactattttgcagaaacatttaaaatcagaaattgcagaactactatctgaactttaaagggacactcttaaccatattttgttttatttagtactcacgctgacaagttgatttaccacctcattttcccaacaagtgtcaagatttcaatatgcagttaatggtttctaaaaacagtgactatttaattacatccttatagtttccccaaattgcttatagtttgccctcatttagttaggtctataatatttctcaattagtgtaaaaatttctactcctttttaatcattgatgcatataatgatgtataaaaattattgtgtagatagcccctccatgaaaacttaaaatcaaaagcttttagcatcaaagtatcagaatacaaactaaagaaaacacaccaattcagaaagattttctttaaatatattaaagtgaataaaatgttcacagagaatcactcacatctaaggatatagactttttcctaaagtgaaactatttttggctcactcagactctgagtagtgtttcactgattttgaatttcactggtcagaaccagtgttggtagtaagaattattgtcccagaagagaatrgaaatgcttgccaactctactttcaacccttgctggaatccctatgttgtgggtagagatatgactaaattaagcagttttaagtctaagccagaaagatttaattattgatttattggttttacaattgttaaatattgcctttaaccgagtatatgttttatcatgtaataatcactttggcagcctcaaatgtcatgggttcacagggtaaatgttaaggtaatagctaaacaattgagcgtataggagatctatagtgagtgaaaaaaattcaagatgtaatacagagtccagtatgacagacttgagaaactttcaaaaactaggaaaagaaaaccaaaagtcattcttgcagtgtctctgattgcactgacttgatgcagaattggtgcattaacatatgtatacattacatatgtatacttgtgccatgctggtgtgctgcacccattaactcgacatttagccttaggcatatctcctaatgctatccctccccgctctccccaccccacaacagcccccagagtgtgatgttccccttcctgtgttcatgtgttctcattgttcaattcccacctataagtgagaacatgcggtgtttggttttttgtccttgcgatagttgactgagaatgatga

SEQ ID NO: 690200 - DNA, 1512 bp, Homo sapiens
atttgagtgatgtcactttggactatgtaggccttgtcagtcatataaggaaacctaggcaagactccgactattatcctcctgagcccaaccaaagttaacaaattgtgagtttgtgttttaagcaactaaatttgatgactgctaattacacagcaatggataattgaaataacaactaaagattaaagatgagataatgtgttgtgtttaaaaatttagcaagtgagtacttcatgaatatatttaccttgatggcattacaagctaaattttactgggctttattagaacaaattatttgagcattgatgagaaagtgaactttcaaactatcttatttacgtttatgtttcagttatcccacaaaagcaggaaattactttcaacaatgcacctgaggtattttatagtaactctctggttatttccatgtrtcaggtggagaaatatggatcagacacaaagacaataagattcattgctctctagcggaatactttttcttaaatgggtttattagtaaattgagaacttgatttgatgtttactctgacgtgtgatgtaaagttcttcctaaagccccctttcttttcctttttaaaattattaacatagatgaatacagagaatgtgaacatattagctatacagatatcacaacaggagaacagtaaatgttatgttttagactatttcaaccctaaaatatggacacaggttggaatgaggatccaattcagcataatagcctctaatggagtaggaaacatataaaatcctgtgttgctttatgaaatgttgcttatttgctgcatggttttaaaaagtatcagttttatttaatagtgggatctttatgtcagtgattactgatgtttccagcaagctaattcataccagggagacaatgtaaacatttagaaaggggattatatttctgtactatctgcatatgtcagatgacaacgagagtttcaaagtacaatcttatgaagggttgtattgcagatttggcctagaagcccaaaaccattaaatttttatcaaaattatacctgaaaattcttcatgttgtttattagcagtcattatctttacaaagatataggaaataaagtgatttccatctgttgcaatcacttgccttttacaatagacaaaattgttattttcattagattttacaaaaggaatgatatataaatttttaaaaggcatgtttaggttttttcaccagagaaatttagattattcttgcataaaatcaataaacataatccagcacataaacagatccaaagacaaaaaccacatgattatctcaatagatgcagaaaaggcctttgacaaaactcaacaacacttcatgctaaaaactctcaataaattaggtattgatgggacatatctcataataataagaggtatctatgacaaacccacagcaaatatcatactgaatggacaaaaactggaagcattccctgtgaaaactggcacaagactggg

SEQ ID NO: 690201 - DNA, 594 bp, Homo sapiens
cccagcactttgggaggcccagacaggccaataacttgaggtcaggatttagagaccagcctggccaacagggtgaaaccctgtctctattaaaaatacaaaaaaaaaaaaaaaatagccaggcatggtggtgcgcgcttgtagtcccagctactcaggaggctgaggcaggagaatcacttgaacccaggaggaggaggttgcagaaagccaagatcataccactgcactccagcttgggtgacagagcgagactttgtctcaaaaaaaaaaaaaaaaaaaaaaagttaaagtcattactttarattttgtttagagaatttttctgacaagaacaaatcaccaaaaaaagactggctttaatggtttgagtcaaagtttaataagagcatgctaggaaacatttgaatgaaattcactttttaaactgtttggtttcccttcaaatcccccagatgtgctgcaatcctcagtatccaagtatcttaattacccctctaaaagttaaatattaatccaaataatcacaaacctcatcttgagttgacctgacctccttctacactaaccattaataaactcatctctgatatg

SEQ ID NO: 690202 - DNA, 754 bp, Homo sapiens
cagcaacccagtgatgtcagaaacgtcggctagtgatttcagaggggaaataaaacaggagcaaagaatggctctagaaagacagttccttcatccttgcgaatagcatgcctcctggtagaaattcagaaaacatttctggctaaatacctgttttctttttctgagattgacttatttttcaaaggcatgtcaaatgatctttaaaaaaaaaataggtcaccatcctcttttctggattggtgaagaatgctgtttcaaatcagtggtgcctaaccacactggccactgtagatttttataagggggggatatattttttctaaaaattgatgttggagagaacattgaaagatgaaattttacgtactaacttcaggcccaaataatgctgactgacctggcttcaaacttacaatagtttttttaaagtattaggcacacagaagttctattcagttatcgaaattggtgctgatctcaccaatattgaataaaggggcttctccattgttccctctattgtttcctgtgtctcctggctgagaaaaagaagggaggaattcttcatactgcccctaattcaatccccttgcagtcccacccctataaacattaaatgtaaagagaccagaaaatattaaattaggcccaatgcctgtgttttcttaggcttcctatctaaataacatttatacagagcattatagaaatgtccactttgtaaaytgcttttcatacatacgttagccca

SEQ ID NO: 690203 - DNA, 1039 bp, Homo sapiens
ggaaatgctctataaactatacagaataggccaggcatggtggctcacatccgtaatcccagcacttaaaaaggccaaggaggattatttgagtccaggagtttgagacaagcctggacaacatagtaaaaccccacctctacaaaaaaataaaagaaattagccaggcatggtggcacatgcttgtagtcccagctaccgaggaggctaaggtgggaggactgcttgagtccaggaggttcaggttgcagtgagctatgatcatggcacagaactccaccctaggcaacagactgagaccctatctcaaatctatacagaaccaaytacatgcctgtaaatacagaagacgtcttctggctttctggaattctggggtgaaaaccatagttctgaaaatatttatgaagaaaatcacttttaaaaaagttgttctgggaaaaaatacatttcacatatttcttctataacataatacaatgtgataaaaatttctcatgtgaccaactctttagttaccattataaaaagttaatttttctccacaaaataatttcatcctgtgtgtatgttttttgtctgggtgagtgtattaaattctgtaatacttaacaattcgcggatacatgattctgcaagtgtttaagaatcaaatgatttatgccaacttggcaaaccctcgtcattattgatattagtaagagcctattgccagccaaaagtcaaaccctaaaatacaagtgttaaattgagtccttaacaaaaaagcacaagttttaggcctttctcaaggactaaaaatagctaaggctaaatacacacacacacaatgcaaaagcgaactaataaatgacaagataaaagcttctttggtacttcagcagttgagtgaggcaagccctaaccatgttctaattgtaaatggcacaccatacaaccaggaacccatcaggagacaaaatgaccttgaatttgtcaagggatttacattatgaccagtaagaatcaatataattgttacatgctttctagactgcaa

SEQ ID NO: 690204 - DNA, 1039 bp, Homo sapiens
ggaaatgctctataaactatacagaataggccaggcatggtggctcacatccgtaatcccagcacttaaaaaggccaaggaggattatttgagtccaggagtttgagacaagcctggacaacatagtaaaaccccacctctacaaaaaaataaaagaaattagccaggcatggtggcacatgcttgtagtcccagctaccgaggaggctaaggtgggaggactgcttgagtccaggaggttcaggttgcagtgagctatgatcatggcacagaactccaccctaggcaacagactgagaccctatctcaaatctatacagaaccaactacatgcctgtaaatacagaagacgtcttctggctttctggaattctggggtgaaaaccatagttctgaaaatatttatgaagaaaatcacttttaaaaaagttgttctgggaaaaaatacatttcacatatttcttctataacataatacaatgtgataaaaatttctcatgtgaccaactctttagttaccattataaaaagttaatttttctccacaaaataatttcatcctgtgtgtatgttttttgtctgggtgagtgtattaaattctgtaatacttaacaattcgcggatacatgattctgcaagtgtttaagaatcaaatgatttatgccaacttggcaaaccctcgtcattattgatattagtaagagcctattgccagccaaaagtcaaaccctaaaatacaagtgttaaattgagtccttaacaaaaaagcacaagttttaggcctttctcaaggactaaaaatagctaaggctaaatacacacacacacaatgcaaaagcraactaataaatgacaagataaaagcttctttggtacttcagcagttgagtgaggcaagccctaaccatgttctaattgtaaatggcacaccatacaaccaggaacccatcaggagacaaaatgaccttgaatttgtcaagggatttacattatgaccagtaagaatcaatataattgttacatgctttctagactgcaa

SEQ ID NO: 690205 - DNA, 646 bp, Homo sapiens
cattctcaccttgccccatttcctatgtgtatctctgttcccccatagtgaaaagccctgattcctaacatcagtacatttacttgtttcttataatcyatacaagaaaagttttagaatcaatgtggactctttgacaggttggagagtgcttcggaagcaacatttcatgacttcgtactgacccctagtgtttacttttttgcttttgtagttttcaagggattatccttaaagaggttgcctgttctgtatcaggttttctcaatctcagtatgactgacattttgtgccaatgattctttgttgtggtgggctgtcctgtgaaccgaaaggtatttggcaatgcccattgtgtccatccactagatgaaaacaacaccactccctcctctgcccttccaagctgggaccatcaaaaaggcttccagacattgctaccacaccttgggggtcaaaatcatccctggttgagaaccactgctctacccagacatgcagtagagagaaatgctattacaaatactttctaaatgtgaatatttaaatctctggtaaagaaaattagtcattactgaattttttgttcaattaatttattggtgtttcccaaggtgctcaggattatggaatttgttaatgttga

SEQ ID NO: 690206 - DNA, 646 bp, Homo sapiens
cattctcaccttgccccatttcctatgtgtatctctgttcccccatagtgaaaagccctgattcctaacatcagtacatttacttgtttcttataatctatacaagaaaagttttagaatcaatgtggactctttgacaggttggagagtgcttcggaagcaacatttcatgacttcgtactgacccctagtgtttacttttttgcttttgtagttttcaagggattatccttaaagrggttgcctgttctgtatcaggttttctcaatctcagtatgactgacattttgtgccaatgattctttgttgtggtgggctgtcctgtgaaccgaaaggtatttggcaatgcccattgtgtccatccactagatgaaaacaacaccactccctcctctgcccttccaagctgggaccatcaaaaaggcttccagacattgctaccacaccttgggggtcaaaatcatccctggttgagaaccactgctctacccagacatgcagtagagagaaatgctattacaaatactttctaaatgtgaatatttaaatctctggtaaagaaaattagtcattactgaattttttgttcaattaatttattggtgtttcccaaggtgctcaggattatggaatttgttaatgttga

SEQ ID NO: 690207 - DNA, 646 bp, Homo sapiens
cattctcaccttgccccatttcctatgtgtatctctgttcccccatagtgaaaagccctgattcctaacatcagtacatttacttgtttcttataatctatacaagaaaagttttagaatcaatgtggactctttgacaggttggagagtgcttcggaagcaacatttcatgacttcgtactgacccctagtgtttacttttttgcttttgtagttttcaagggattatccttaaagaggttgcctgttcygtatcaggttttctcaatctcagtatgactgacattttgtgccaatgattctttgttgtggtgggctgtcctgtgaaccgaaaggtatttggcaatgcccattgtgtccatccactagatgaaaacaacaccactccctcctctgcccttccaagctgggaccatcaaaaaggcttccagacattgctaccacaccttgggggtcaaaatcatccctggttgagaaccactgctctacccagacatgcagtagagagaaatgctattacaaatactttctaaatgtgaatatttaaatctctggtaaagaaaattagtcattactgaattttttgttcaattaatttattggtgtttcccaaggtgctcaggattatggaatttgttaatgttga

SEQ ID NO: 690208 - DNA, 895 bp, Homo sapiens
tttatacttaagagtttattatttggagagtttacaatattattcctgttatagaaactctcaggaagattattataaataatatcaagccaagggaaatcacctaaatgtctaaactacccaaacacgagaacacatagccattatggacttgtccaaatttgtaagaggtgcggtgttccaagaaaatctgaggtcatcaacratgcttgatcagtcagtacgaatgccagggaagaagtgagccatgtgacgttctgggtcatgaaatgagaggactctgagcacagctgaggcataagtaagatttgtaatgaagtccacaacagcatgttatgagggaaacagcacacatgatcctgggaaattgcctctcctctctgaacattatttttcttatgaaatagaaataacaataataatcataataactcccacttcacacaactgtactgacaattgagatgaagcctgggaaattgttttgtaagtgatgaagcaggaatggcaatgaagaaaatgattgtgaagatgatgacagtaatgcttcgcctgggcattgagagatgaatgaaacacacttcctcctacccctctaataacagaagatccagtagtgctccttcgcccaccttagagatcaagattgtgccttcatatgggctttggcatatgactagcagaacatagaaagttctcaggagcccctggtggaggtgggaattagggctggatacagtctgcacttgtactctgactttgttcctttcttaggactctaagggagttttttcatttgacatttgaaagggatacctaccatatgccattttctgtccttaaagagtttgttagctagcgagacaccacacaacatacatgcacatacatacgc

SEQ ID NO: 690209 - DNA, 895 bp, Homo sapiens
tttatacttaagagtttattatttggagagtttacaatattattcctgttatagaaactctcaggaagattattataaataatatcaagccaagggaaatcacctaaatgtctaaactacccaaacacgagaacacatagccattatggacttgtccaaatttgtaagaggtgcggtgttccaagaaaatctgaggtcatcaacgatgcttgatcagtcagtacgaatgccagggaagaagtgagccatgtgacrttctgggtcatgaaatgagaggactctgagcacagctgaggcataagtaagatttgtaatgaagtccacaacagcatgttatgagggaaacagcacacatgatcctgggaaattgcctctcctctctgaacattatttttcttatgaaatagaaataacaataataatcataataactcccacttcacacaactgtactgacaattgagatgaagcctgggaaattgttttgtaagtgatgaagcaggaatggcaatgaagaaaatgattgtgaagatgatgacagtaatgcttcgcctgggcattgagagatgaatgaaacacacttcctcctacccctctaataacagaagatccagtagtgctccttcgcccaccttagagatcaagattgtgccttcatatgggctttggcatatgactagcagaacatagaaagttctcaggagcccctggtggaggtgggaattagggctggatacagtctgcacttgtactctgactttgttcctttcttaggactctaagggagttttttcatttgacatttgaaagggatacctaccatatgccattttctgtccttaaagagtttgttagctagcgagacaccacacaacatacatgcacatacatacgc

SEQ ID NO: 690210 - DNA, 895 bp, Homo sapiens
tttatacttaagagtttattatttggagagtttacaatattattcctgttatagaaactctcaggaagattattataaataatatcaagccaagggaaatcacctaaatgtctaaactacccaaacacgagaacacatagccattatggacttgtccaaatttgtaagaggtgcggtgttccaagaaaatctgaggtcatcaacgatgcttgatcagtcagtacgaatgccagggaagaagtgagccatgtgacgttctgggkcatgaaatgagaggactctgagcacagctgaggcataagtaagatttgtaatgaagtccacaacagcatgttatgagggaaacagcacacatgatcctgggaaattgcctctcctctctgaacattatttttcttatgaaatagaaataacaataataatcataataactcccacttcacacaactgtactgacaattgagatgaagcctgggaaattgttttgtaagtgatgaagcaggaatggcaatgaagaaaatgattgtgaagatgatgacagtaatgcttcgcctgggcattgagagatgaatgaaacacacttcctcctacccctctaataacagaagatccagtagtgctccttcgcccaccttagagatcaagattgtgccttcatatgggctttggcatatgactagcagaacatagaaagttctcaggagcccctggtggaggtgggaattagggctggatacagtctgcacttgtactctgactttgttcctttcttaggactctaagggagttttttcatttgacatttgaaagggatacctaccatatgccattttctgtccttaaagagtttgttagctagcgagacaccacacaacatacatgcacatacatacgc

SEQ ID NO: 690211 - DNA, 623 bp, Homo sapiens
agcctcctcaaatccatttcagataaacttaagtttaaacagagtatttgctgaacaaattcaacttcagatacaccagatccccttccagtcccatttccatatatccctatatttacatactcatttttgaggcagagttgaacctttgaataaagcagtcgaaattaaaagttcaaaaatacatttcttatatacttagttggtgatgatttgtaaatacgagaactatattcttctttataggactacattgagtgtgccgaaaaattatacgatgccaaagtggagcgagttgactttacgaatcatttagaagacactagacgtaatattaataagtgggttgaaaatgaaacacatggtgagtattgaaataccctatttttctacaagatttgtcagttatatgtgaatactgggaacaaaagctgggagtcttttgtacatacaaggaacagctcctcctagttcaaagtaatgattgctgctacttaaaattgctttagtatttgtctgcaatgtggtttkgaataatcttaataatttgaatgctttgtacttttcagaagttcagtcttttacattatctcatttaattggcaaaaccctgcaggacaaac

SEQ ID NO: 690212 - DNA, 594 bp, Homo sapiens
tgttattctttcaacaatatgacactgtcttgattattgtggctttatgtaagtcttgaaatcaggyggtagccttcctctggctttattcttcttcttcaatattgtgcgggctattctgaatctttcccggcttccttttaactcaataacgcaagtgaggatatttagaagtctcttttctcagtcctccacttctcttgtcatgaactcaggccagtggcatctatacacatgagtgatttcttaatttttccccatttctatcatttttcttccatattttaaaagattgtatccacaaaactgcctttgtttcacagatttgcttcatcaaagatatctataacttctggtcagagattccaatcagcatgagatatcattgttactgacgattttgatatgtctgccacaaaagtaaacagcattatgcaacctaatgccaagtctaacgtgatgccaaattaagtttaagtgaggcaccaaaataaattaggtgctggcttccgaatgagacagtggactatatgtaggtaatccaacaaaacttggtatgagactccttaaaacttgtgcaggtcataaggcaaa

SEQ ID NO: 690213 - DNA, 594 bp, Homo sapiens
tgttattctttcaacaatatgacactgtcttgattattgtggctttatgtaagtcttgaaatcaggcggtagccttcctctggctttattcttcttcttcaatattrtgcgggctattctgaatctttcccggcttccttttaactcaataacgcaagtgaggatatttagaagtctcttttctcagtcctccacttctcttgtcatgaactcaggccagtggcatctatacacatgagtgatttcttaatttttccccatttctatcatttttcttccatattttaaaagattgtatccacaaaactgcctttgtttcacagatttgcttcatcaaagatatctataacttctggtcagagattccaatcagcatgagatatcattgttactgacgattttgatatgtctgccacaaaagtaaacagcattatgcaacctaatgccaagtctaacgtgatgccaaattaagtttaagtgaggcaccaaaataaattaggtgctggcttccgaatgagacagtggactatatgtaggtaatccaacaaaacttggtatgagactccttaaaacttgtgcaggtcataaggcaaa

SEQ ID NO: 690214 - DNA, 594 bp, Homo sapiens
tgttattctttcaacaatatgacactgtcttgattattgtggctttatgtaagtcttgaaatcaggcggtagccttcctctggctttattcttcttcttcaatattgtgcgggctattctgaatctttcccggcttccttttaactcaataacgcaagtgaggatatttagaagtctcttttctcagtcctccacttctcttgtcatgaactcaggccagtggcatctatacacatgagtgatttcttaatttttccccatttctatcatttttcttccatattttaaaagattgtatccacaaaactgcctttgtttcacagatttgcttcatcaaagatatctataacttctggtcagagattccaatcagcatgagatawcattgttactgacgattttgatatgtctgccacaaaagtaaacagcattatgcaacctaatgccaagtctaacgtgatgccaaattaagtttaagtgaggcaccaaaataaattaggtgctggcttccgaatgagacagtggactatatgtaggtaatccaacaaaacttggtatgagactccttaaaacttgtgcaggtcataaggcaaa

SEQ ID NO: 690215 - DNA, 594 bp, Homo sapiens
tgttattctttcaacaatatgacactgtcttgattattgtggctttatgtaagtcttgaaatcaggcggtagccttcctctggctttattcttcttcttcaatattgtgcgggctattctgaatctttcccggcttccttttaactcaataacgcaagtgaggatatttagaagtctcttttctcagtcctccacttctcttgtcatgaactcaggccagtggcatctatacacatgagtgatttcttaatttttccccatttctatcatttttcttccatattttaaaagattgtatccacaaaactgcctttgtttcacagatttgcttcatcaaagatatctataacttctggtcagagattccaatcagcatgagatatcattgttactgacgattttgatatgtctgccacaaaagtaaacagcattatgcaacctaatgccaagtctaacgtgatgccaaattaagtttaagtgaggcaccaaaataaattaggtgctggcttccgaatgagacaktggactatatgtaggtaatccaacaaaacttggtatgagactccttaaaacttgtgcaggtcataaggcaaa

SEQ ID NO: 690216 - DNA, 616 bp, Homo sapiens
cattgacaagactggtctcgaactcctgacctcacatgacctccccacctcggcctcccaaagtgctgggattacatgcatgagctactgcatccagctaattattactgttttaaaatatgcaaaatatcattgatggttttaatttttgaatgctgtttgtatttcagtaaaaatttttaaaaggaattaactatattcattttacatgtatgtatatacacataaattgtacttttacacatatatatttaaatgtactaggaacattattataagttaaaccyataaggtaggcactaatagtatcatgaaattttacagatgacaatattgaataacaatttattgggtaataactttgcccatggtcacacaaccaataagtaacaaagctgagattcaattctggaagtctggttccaaagtctgtacttgtaaccaactcattatgcttcccctccattgcctattcattgtctcctttaacttattttccactcccattactttaattttattagaaataaatattctttaacctcaggaactataaagaggctattctctaaacaaaatattacagcgagatgaatggattagggagaacagtaaa

SEQ ID NO: 690217 - DNA, 616 bp, Homo sapiens
cattgacaagactggtctcgaactcctgacctcacatgacctccccacctcggcctcccaaagtgctgggattacatgcatgagctactgcatccagctaattattactgttttaaaatatgcaaaatatcattgatggttttaatttttgaatgctgtttgtatttcagtaaaaatttttaaaaggaattaactatattcattttacatgtatgtatatacacataaattgtacttttacacatatatatttaaatgtactaggaacattattataagttaaacctataaggtaggcactaatagtatcatgaaattttacagatgacaatattgaataacaatttattgggtaataactttgcccatggtcacacaaccaataagtaacaaagctgagattcaattctggaagtctggttccaaagtctgtacttgtaaccaactcattatgcttcccctccattgcctaytcattgtctcctttaacttattttccactcccattactttaattttattagaaataaatattctttaacctcaggaactataaagaggctattctctaaacaaaatattacagcgagatgaatggattagggagaacagtaaa

SEQ ID NO: 690218 - DNA, 635 bp, Homo sapiens
tcgcttttcagagaaggatagaacctcttcatctccttgcttctatgaggacttagctctgagaaggtcccaggcagctgatcctcagtggtaagagttgggaagagcaaaataagaactgcttctggagtctgccctaccacataatctctaactgccaagggagccgaaatagagagactgaaaactgagagtttttaattccccagtaattccccaccaggtcttcaaagttttttgtttgagtcacacaaagtgatcaacctttagctggcctgaagaatatccagatccacccaccggtaccctagatccccagtatctccttggcatcctggtgctgtgctcttcttttccttttcttctttttttttgagacgtcactcttgttgcccaggctggagtgcaatggcacaatcttggctcaccacaacctctgcctcccgggttcaagcaattctcccacctcagtctcccgagtwgctgggattacaggcatgcaccaccacgcctggctaattttgtatttttagtagagacggagtttctccatgttggtcagactagtctaagaagtcctgacctcaggtgatctgcccgccttggccttccaaagtgctgatattacaggcatg

SEQ ID NO: 690219 - DNA, 638 bp, Homo sapiens
tgtattttaaatgtaagtaggagctagtcagctgtaatctcttaagaagtcgtcaaaggcatcaacttaaatttaagtctctcctctataatacatgatgcttccatgaaaatctttggagcaaaatcaaacttcataagcctaattttaaagaccctgaacaatcaaaagaaaatagcataacagtaactaccatttactgatttttttttactctgccaggccttgagctaaacattttgtatatctcatgatattgaatcctcacagtcaggcagagagttgagttagtattgttcctgttttaaaagcaaggaaactgatgttcagagaatcagtaagttgccccatgttttttagcccaaaagtagcaaaatcaagattttgcccgaggwggttctgactttgtctcccagctgtcccactcctggctatttctccacgcattagttgtcagccacctctttctgactagttaacacaagctctgcccttcccattagccttatgctttttgttgcacccccactctcctgctccatgatttctggctgtttatgctccaagcccttggtttttaaagcttagtttacattctccactctctttgaggaagtctggaatattcacttctatta

SEQ ID NO: 690220 - DNA, 610 bp, Homo sapiens
tgagttagatgtaattgactgaaaatccttttaaaattttatcctctaatattcatcttttttagttttttaatttttttattattatactttaagttctaaggtacacgtgcataatgtgcaggtttgttacataggtatgcatgtgccatgttggtttgctgcacccatcaactcrtcatttacattaggtatttctcctaacactatccctcccccagaccccaccttccaacagtccctgatgtgtgatgttcccctccctgtgcccacgtgttcccattgttgtttggttttctgttcttgtgatattttgctgagaatgatggtttccaacttcatccacgtcactgcaaaggacattaactcatccttttttgtggctgcatagtattccatggtgtatatgtgccacattttctttatccagtctattattgatggacatttgggttggttccaagtctttgctattgtgaatagtgctgcaataaacatacgtgtgcatgcgtctttatagtagcatgatttataatactttgggtatatacccactaatgggattgctgggtcaaatggtatttctagttctagatccttgaggaattgc

SEQ ID NO: 690221 - DNA, 3761 bp, Homo sapiens
attttaaaagtttagaaaagtgatccttaaaacagacacaaaatgacccagcatttgtacttttgagactacatcctagaggaactttgacacatatataaggagatatgtaccattattttattagcaagatctgtggtggccaaaaattaaaaagtgtaaatattcattagggctatgaatcaaatgtgatatattgtattatgaaatattctgcagcaattaaatagaaaaaaactctttataactaattctccaaaacagttttgaatgaaaaaataattttattcttctgttcaaaacccagaaaatcgtgtttcactctaaatggctaaagaccctgaatggcctagcatccctgtgtgaactggtattattacttctctgactttactcattatgcagtgtgcaccagccacactggcctcctggatgcccctaaataccccatgcacacttccaccttacagcttttgctttggctgttccctctgcctgaaatgctcttcccagctatttccttcatcttcctcaaatctttactcaaattcctcctaatcaatgaggcctgtcgtaaccactcaaattaaaattgcaactcaacttcactccaacttttgagagtcccaaattccgttccccatttcatttttttttttttcgtagtgcttactttcaaacacattctataatcccattttttggttgtgtttactgtttgctggctgtctcctctggctacagcataaaccccgtgagggctaggattttgtttcatccccagaagtttcctaaaacctaaaatagtacctgacacatagtaggtcactaaacatataaagcatacaggagagaaacactgaatatgaacactagggaagtgatagaatacattccctattacagaatatcatgaaggtattttaaaagcatgaataaaatcagtatctggtgatttccagaggttcatgatggagaagagataaagtgatatgtaccaggctgtttatactagttaccttgaagaagagaagaaaaagttgtaaaaataataaaatagaaaagacagtgtaatattaagtaaaaatatgcactacaaagatgtatgtaaatatatgtgtacatatgtattattactatgctatgtaaaggttttaaatggatatcactaatgattagtaaaacaacttgaacataaaaatattaattagggttctgcgggcaagttttgcctcagaattcttattgttttaatgggatttgtaataaagtaacatttataaaagaaagaaaatagagaaatcttgcctttcatattttcacaaataacttctaaaaggagtattttcattaatttttgaagtaaaacagactttctgtttaataaatctttttccactacaaacatactcatttccagaatatatcttattgttttttctgagcattattaaagaaatgaatatttcccaaaataaacttctaatgtgcaatataaatctgccacttgagcttattaagcattggtaacagtaaaggtagattcactgagtttcctctcaataatattattatactatattttatacaagtaagatactttataattaatattcaaattgatttctgtagcttttaatttttttatttcaataagttttgggggaacaggtagtgtttggctacctgaataagttctttagcggtgattcttgagtgcagctttttcttatgattcttttgtaaaacaaaatcttaagacactggtggagcaagaatttttagcctcattttatagatgaaaacgagagacaaagtctgaatgattacccaaggacactcatgtagttaaataggaactgtgcctagctaccctgacttctacttcagttcttccatttttgtctgtaaaaatctagcagtcacattcttacagcagctttaaaaagtastaatgaaatattttattaagaccctcctgtcttcagctgaagagatcattcatcaactgcttttcctctgtgttagaagaaaaattggactttataaaccaccagattatagtcacctcccaacagtcattgatggtactaaatatcagtgttacagactatgttcctccaaaatgtgtttgttgaaatcctaacccccaatatgatggaattaggagatggggaccttcgggagataatgaggtgatgagagtggaggcttcatgaatgagattagtgcccttcttaaaaaaaaggcccaagaaagcattttcgcccctttcattatgttaggttatattcaaaatacagcagtctatgaaccaggaagggggtccccaccactgaaaatgttggcaccttgatgggactccccaaattccagaagagtaaaaattaaatatttattgcttaagcaactctgtggaatttttgttacagtagcatgaactaagacaatcaagttattttaaaataatctacatcactgcttataattcataaccaccagtagaacgaaagttgatggaaaactaagttgacaacacaatacatgttatcaataagtggaccaaaattattcttatggtattaagtaaaagttttcaccaatatatgtcaaagatgcccaattgctttttcatttatttttctctttcaatgaataaatataatcacaaaattttcctattcttttcagaagaaacttacagagagaaaaggtcaccatgaaaggttagaaataaaagaaaaagaaaacacaaaaggaatgagaacgtgtgattagaaaagttgtactcataatgttgtgttgtttttagtaagaaactgatccacctaacatagtcatttttgttacttttccctttagatgtgcttgacttgtgctaattctttatattctcattttctactggggaagagcagcctgcgttgttaagacaaataacttgtcatagtcactgtcatggccatgtaaagaatgaagaagcttcttccttcagtgataaatctgtcactaccaactgactgcattactaccacatgcacctgtgccccacaaactaaggagaacagagatggagaagcaagtgggttaaaggtaagaagagagccattgaacgcaattttacggcatagtcaacaaacagtacccaggatttctcttataatcttctactaaaaccaaatagacttttggtttcccaatgtatctagctgactttttgtgcttttgacagctagatcacattcccaggagttacctacagcaccacactctcaccaagaaaaagaaaacttttctttatgggaagttaggttaagggagttggtgctaatcctgtgaagtaaaagacatgtgaaagcaagaggcctgagggctcctgcaaatcaagaacgatgaagtgtcagattttagccccaagaaaatgtcatagaaagaacttctaccaaacttagacttttcaaaatggctgtaaaattgcactttcttgcctacttaacaactccccttgtaccacccccagacacacacatacattctaaaaagttggcagctgctgtgggtggtggtggtgatcctagtggttgtttcagtggaggtggttggttctgcttttgctttcattttatatcaaaagccagacctttaaaacacattgattttgccccctacatttttatgaacaagatatgtaagtgtatatgttataaaattatacattcagtggccattaaaagtaaaatttgtggattcctgagatgtgt

SEQ ID NO: 690222 - DNA, 614 bp, Homo sapiens
tatgattgcttatatgagacagatattctttcaagacagttgtgtttcaagggggatattttttctcgtgttttatgactcagaattttgtgtctattaacacttacgttgtagtcatttgtctttgtctccttgtattcagccatgtgttrgcagacatcctttttattgtatactatatagtgaattttaggaaaagaaaaacacatagtaaacatttcttatggaaaaaaaaactaaatttgctcttatggttagcttagagcagacaatctcaaatgtgtttattccgatagtgctatgtgattcttagccacttgcacaaaccatcatcatatctccaatggggagttctcattatgccaaggtagtaaagtttacaggaattctagggcactcattttttctccccttcattgaaaaaatacaccaaatcagttttttgtctcgtaagttaatagctatttgaaatggcatggcatggcattggaaataacactgatctttcaatgtgaccatagacacattgcctgctttgaaaagttagtaaataaatttgctatccctccaggatccaacatatactttaaaacagttacattttatatattttg

SEQ ID NO: 690223 - DNA, 986 bp, Homo sapiens
cctttgcagaaatgtcttaacttgcctaacacctttcttgcccttctttgatccagtcaccacttwgcaccagaataatcttttaaaatgtaaattaatcatgttgcttacctgcttaaaatcctgcagtggcttttcatccatttataataaaattcagacccctttttcttggccctgtctacttctgccacctcatctatgcatcccccccttgtttgtgtattctccaaccacatgggccttcttcctcttcatatttcaagtcatcaaattcattcttattttgaggccttgatggtgtttctctgtgcttcagccccaggtctttgcagtcctgactttcatattattgtcagatcgtaggttctagcagaggcctgccattgactacctaagtggaagtgctcctcagtcattctctataccttctgctttattgtcatcttagcattcatcctggcctgatattttcttatttacttgcttgttatctgttacccacatctgtcaccagattgaaaactatgataatagggaccttatctgtattgcttagggctgcctctccagcacctagaatagtgtctgctatatattagattttccgtaaatattagttgggttatgtacagcagtgaacaggacagatatggccccgtcctcagaatttatggctcagagcagggtcagcaaacctttatttaaaggaccagatactaaatatttaaggtttgtaggccctttgttacaggctactcagttctgccattatagtgctaaagcagccatagacaatgaagaaatgaatgggcatagctgtgttgtaataaaacttcgtttagagaaacaagtggtgagtctctgtggtgtagtttcctctctcctaattaggggagagtagtgccactgagtggtacattgtgtaatgatggaacgcctttatctacagtgtccattcagtagccactagctacatgtagcta

SEQ ID NO: 690224 - DNA, 630 bp, Homo sapiens
atgtaacaacatcctcttacttttcctgtggtgggaaagtaccctgtagtactagcaaggtgcacccaggtagaggacaacaggaatagttatcctacttgctcaggcttacatttttacacatgaaacatagtttcttttacatgtttatttacttatttgttctcaggaagactgacagctgggtgatgtgaaagggacattatgttctgatatccttcagatagagaaatcctaaattgctgttaatttcttgtgcatattcagctgctggattgcatacatcacatcactagcaacctgtgcagawtggccaagggatggagtatgtggcattgggaacagagattgtccttggagatttctgctgtattccctgcaacttcaggaccttcttgctcttgaaagttgcagtttcatattggctgctggaccagtcctgtatgatgtgccacttatcaataaaatgaattggtttctccagggtgtggttatctcattatagttttaatttgcatttccctgataactaataatgttgaacattctttccatatgccatctatatatctttttatgcaaaacttaaatattttatacatgtttctaaaactggtttattttcttatt

SEQ ID NO: 690225 - DNA, 630 bp, Homo sapiens
atgtaacaacatcctcttacttttcctgtggtgggaaagtaccctgtagtactagcaaggtgcacccaggtagaggacaacaggaatagttatcctacttgctcaggcttacatttttacacatgaaacatagtttcttttacatgtttatttacttatttgttctcaggaagactgacagctgggtgatgtgaaagggacattatgttctgatatccttcagatagagaaatcctaaattgctgttaatttcttgtgcatattcagctgctggattgcatacatcacatcactagcaacctgtgcagattggccaagggatggagtatgtggcattgggaacagagattgtccttggagatttctgctgtattccctgcaacttcaggaccttcttgctcttgaaagttgcagtttcatattggctgctggaccagtcctgtatgawgtgccacttatcaataaaatgaattggtttctccagggtgtggttatctcattatagttttaatttgcatttccctgataactaataatgttgaacattctttccatatgccatctatatatctttttatgcaaaacttaaatattttatacatgtttctaaaactggtttattttcttatt

SEQ ID NO: 690226 - DNA, 609 bp, Homo sapiens
tcccctttctaggccatgtcagttaccctattgctgtaaatatggctgtgagtcccctacccactggcaaaccctgacctccaaaggaaaggaataggtcacgtatcacttggcttctttcggagaattaggaaaggtaaaagggaaatgtccaccattacagcagtattagctccctagaaaacagtttctgggctgggatgggtggctcacacctataatcccagcacttttggaggccgaggtgggcggatcacttgaggtcaggagttcgagaacaacctggccaacatggtgaaacctcatctctactaaaaatacaaaaactagcccggagtggtggtgggcgcctgtaatccsagctactcaggaggttgaggcaggagaatcacttgaacccagaagggggaggttgcagtgagccgagatcacaccactgtactccagcttgggcaacagagtgagactccatcttaaaaaaaaagaaaacagtttctggagagatactgttcagggaactgcactgcagagagaaagacaaaggctctgatgtcaacagatatttatcgagaaagtgttggaccaaaaggcagtggggcgggacagccg

SEQ ID NO: 690227 - DNA, 598 bp, Homo sapiens
cagccccgattacagtagcagcagcacggagcaactttggaaaccctgttctctcattgatggtttatagttcccaggccccaaagagaataacgatatgtctagttaaagatggaggattgaacccatgcattcattcctctgcttcattccaaagcttcattaaaataatagtaaaggaattttttttttggagtcgaagtctccctttattgcccaggctggagtgcagtggcgcaatctctgctcactgcaaactccgcctcccgggttcatgccattctcctgcctcagtctcctgagtagctgggactacaggcgcccgccaccacgtccgcctaatttttttgtatttttagtagaggcagggtttcaccttgttagccagtatggtctggatctcctgacctcgtgacccgcccgcctcggcctcccaaagtgctggggattacaggcgtgagccacctcgcccgtccagtaaagggatttttaaagggcattcacctgtaaatataaggaggacagaaaaagagaaaacagaccagagtgttggaaactggagagcagaaagttgcagggtaactaacttatagcrggg

SEQ ID NO: 690228 - DNA, 1022 bp, Homo sapiens
ttctttcttttgagatggagtcttgctctatcaccaggctggagtgcaatgacacgatctcagctcactgcaacctccaccttccgggttcaagcgattctcctgcctcagcctcccgagtagctgcgactacaggcacacgycaccatgcccagataacttttgtatttttagtagagccggggtttcaccatgttgaccaggatggtctcaatctcctgacctcatgatccacccaccttggcctcccaaagtgctgggattacaggcgtgagccactatgccctgcctcatttttctttttttttttttgagacggagtctccactctgtcacccagcctggagtgcagtggggcgatcttggctcaccgcaacctccgcctcctggctgcaagtgatcctcctgcctcagcctcccaagtagctgggattacaggcatacgccaccatgcccagctacacaatatgtatttttaaagtgacaagcagtatcgtcaatttctctttcctcatattttcttctttttttttttttttgagacacatttcactgtgtcacccaggctggagtgaagtggcaactgctgtctcctgggctcaaacaattctcctgtctcagcctcctgagcagctgggactataggttcatgacacaactcctggttaatttttgtatttcttgtagagatggggtttcgccatgttgcccaggctggtcttgaactcatggcctcaagtaatctgcccaccttggcctcccaaagttctaggattacaggaatgagccaccatgcccagccctcttatacttattctcttggtacaatcttgccccagaagtcttaagactagttaacagtctcttttttataatagaatttctacctgacaggtttttcttaaacgcataaaggaatacattgtacaaactgtgtttgaacaagtttttcagaaaccaaaatgaattcactaatagtcccattataacacattaaacagctttcatttttccatgtttcc

SEQ ID NO: 690229 - DNA, 1022 bp, Homo sapiens
ttctttcttttgagatggagtcttgctctatcaccaggctggagtgcaatgacacgatctcagctcactgcaacctccaccttccgggttcaagcgattctcctgcctcagcctcccgagtagctgcgactacaggcacacgtcaccatgcccagataacttttgtatttttagtagagccggggtttcaccatgttgaccaggatggtctcaatctcctgacctcatgatccacccaccttggcctcccaaagtgctgggattacaggcgtgagccactatgccctgcctcatttttctttttttttttttgagacggagtctccactctgtcacccagcctggagtgcagtggggcgatcttggctcaccgcaacctccgcctcctggctgcaagtgatcctcctgcctcagcctcccaagtagctgggattacaggcatacgccaccatgcccagctacacaatatgtatttttaaagtgacaagcagtatcgtcaatttctctttcctcatattttyttctttttttttttttttgagacacatttcactgtgtcacccaggctggagtgaagtggcaactgctgtctcctgggctcaaacaattctcctgtctcagcctcctgagcagctgggactataggttcatgacacaactcctggttaatttttgtatttcttgtagagatggggtttcgccatgttgcccaggctggtcttgaactcatggcctcaagtaatctgcccaccttggcctcccaaagttctaggattacaggaatgagccaccatgcccagccctcttatacttattctcttggtacaatcttgccccagaagtcttaagactagttaacagtctcttttttataatagaatttctacctgacaggtttttcttaaacgcataaaggaatacattgtacaaactgtgtttgaacaagtttttcagaaaccaaaatgaattcactaatagtcccattataacacattaaacagctttcatttttccatgtttcc

SEQ ID NO: 690230 - DNA, 679 bp, Homo sapiens
tcactccctcaactccaccccaaagaaaattctcaggaattacatcaaaaacactatatcatgttatcagacttccttttcttgattctctagagtgacaatatcttggaaagacaggacaatgttgaacatagttttcataaaattcatgattatatcaagamaattaaataccaacagagagaaaacaaggatgaccacttggtttctggcttaagtaactgggtagatgtttgcgccatttacagtagtacctccatcctcttttccactttctgggatttcagttacctgggtcaactattgtacaaagaaattaaatggaaaattccagaaattaataatttatacattttaaagtttgtactcttctgagtaacatgatgaaatctcatgacatccggctctgtcccacccaagatgtgaattgtccttttgtccagcatcttcacaatgtacaagccactttgctctagctgtgtacactgcgtgcccttccatcacttagtagccaattagcagatctgatattggttatatcatatctctttatggatgtctgatataaccaatatcagatctgctgttgctggtaccacaatgcttgaattaagttgacccttattttacttaattatggccccaaagtgcaagagtagggatgctggcaattcagaca

SEQ ID NO: 690231 - DNA, 679 bp, Homo sapiens
tcactccctcaactccaccccaaagaaaattctcaggaattacatcaaaaacactatatcatgttatcagacttccttttcttgattctctagagtgacaatatcttggaaagacaggacaatgttgaacatagttttcataaaattcatgattatatcaagaaaattaaataccaacagagagaaawcaaggatgaccacttggtttctggcttaagtaactgggtagatgtttgcgccatttacagtagtacctccatcctcttttccactttctgggatttcagttacctgggtcaactattgtacaaagaaattaaatggaaaattccagaaattaataatttatacattttaaagtttgtactcttctgagtaacatgatgaaatctcatgacatccggctctgtcccacccaagatgtgaattgtccttttgtccagcatcttcacaatgtacaagccactttgctctagctgtgtacactgcgtgcccttccatcacttagtagccaattagcagatctgatattggttatatcatatctctttatggatgtctgatataaccaatatcagatctgctgttgctggtaccacaatgcttgaattaagttgacccttattttacttaattatggccccaaagtgcaagagtagggatgctggcaattcagaca

SEQ ID NO: 690232 - DNA, 397 bp, Homo sapiens
aggaggcataaacacagggaaaaagtgtggtgccattgtggaggcaggcagtggcggtcaggaaatgttccatggaggaggtgatgattgagaagatctaagaacatgggcaggactttaacggaccctgtgggggaggtaaataaactcaatgttctggtctaaggagcagcctgagcaaggtatggaagtgaaaaaaatacaagatgtgttcrggaaatcacaaaattctgcttggctggacaacaggatacacgtagagtccagcctagggtggaaaagtgaacaggactgtaacacggaatctgaatgccagatggagagctgtgcatttacttcgcttggcaacagagaggcattgaagcttctcagcaaggacattacaggactggaattt

SEQ ID NO: 690233 - DNA, 397 bp, Homo sapiens
aggaggcataaacacagggaaaaagtgtggtgccattgtggaggcaggcagtggcggtcaggaaatgttccatggaggaggtgatgattgagaagatctaagaacatgggcaggactttaacggaccctgtgggggaggtaaataaactcaatgttctggtctaaggagcagcctgagcaaggtatggaagtgaaaaaaatacaagatgtgttcgggaaatcacaaaattctgyttggctggacaacaggatacacgtagagtccagcctagggtggaaaagtgaacaggactgtaacacggaatctgaatgccagatggagagctgtgcatttacttcgcttggcaacagagaggcattgaagcttctcagcaaggacattacaggactggaattt

SEQ ID NO: 690234 - DNA, 2852 bp, Homo sapiens
ccatattagtttttaaagcaaactcttttaggcttatgataccaagttaaacactgaatcagcaatttttaaaattgctcatttattgtgagatcctctcatttgatctgtaatactcaccgggcaggaagttcacatatttgattatggccaatatccaaaacttctagctttcggctttcacatacccactcaggcacattttctaagcggttcctaaatgcaagaacataaaagtaattggttgaatttgtcctcaaatgtggttctaaactcaaattgattacaaagaataaataaaacctcaaataaaataccaaagtaccaagggcataaatcgaaagaatgtgtggattcgcttttctctagaagcaagatgaattgtgatagggagaagaaataaagaaaaagtaaggaagaggcagagcacagtggctcacgcctatgggaggatcacttgtgcccaagagttcgagatcagcctgggcaacaaagcgagactccatttctacaaaacataaaaaattagttgctcatggtggcatgcacctatagtcccagctactcaaaagggtacagtgggaggactgctggagtagaggagttcgaggtttacaagtgagctatgatctcatcactgcactccaacctgggtgacagcatgagaccctatctttaggttaaattaaacttttaaaaagaaggaaggacatagttacatagtctgtatcatctctaaagtctaaaaaaacagtctagctccaaatttactttcctaaagggtctatagacctatgccaagttcagggagaatatgtgttatattgaacataaaaacacacgaagtcaatggcatatcatagttttattttcaaatttgtatttttacacttaatattaaaatatttcccaactccagctgtcatcatgaaaacacagccatggacaaatgggaagggagagaaacagttttaaaatggtggcagtgaaaagttcactgacagttaagactcagaattaattatttaaaaacatttacttgggcactagatggtaaytacagttactataaaaaagagaactaggccaggcatggtagctcatgcttgtaatcccggcactttgggaggcccaggctgcagatcaccggaggtcaggagtttgacacaagcctgactaacatggtgaaaccctgtctctactaaaaaaatacaaaaattagccgggtgtggtggcacatggctataatcccagctactcaggaggctgaggcacgagaatcgtttgaacccgggaggcggaggttgccgtgagccaagatcacaccattgcactccagactgggcaacaagagcgaaactctgtctcaaaaaaaaaaaaaaaaaaaaaagagagagagagaactaaactaatggtgtctttaactattaaatgaattgatcattacttaaataaactactctatttgaatgtgtccctagtcacactggttagctttttactttctttttaaaatacataaaatgatcaggcgcaaagaatttcaaacagtacgtacattatgacaattctttatacacagatgagtaattctgtgaaaacatgatgcttgggataagaattataagatattacagcaaaaggaaaaataattttgatgttagggtggtggaattatgcactatttatgttctttaattttgcaattatatctactcctcaattaaaatacagaaatagaaggaattattttctgcttagtgtctgtataagcacatacagttctggatttgaagccctaaacattgacatgctcatttttttttttaattgttaatatctaaaacatctcaacaggataggggattgaaagtattctttagtaaaaacaaccccaacatacaaaaattaaaacttctgtaagtgataaaataacttagaactttgcatggaggaacctgacctagtaaacactgtgataggtgacagcatgggaggtggatgaggtagtgtgttatagtgaagattctgggcatgagagtggccacaggaagatgaattatcatttaagaggcagaattcagagacaagcatgacacaagagtttccaattcagtctcacttaggggtttcaatggctaccatttgctgattacactgtttttaaaaagtagtttaactctatgactaattcttgaaaatacatctgggccgggcatggtggttcatgcctataatcccagccctttgggaggccaaggcgggtggatcacttgaggtcaggagttccagaccagcctggccaacacggtgaaaccccatctctacagaaatacaagaaaattagccaggcatggtggtgtgtgcctgtaatcccagctgctcaggaggctggagcaggagaatcatttgaacccaggaagtagaggttgcagtgagccaagattgcgccactgcactccagcctaggcaacagagcgagactccatctcaaaaaaacaaaaaaagaaaagaactgttcaagatatttatatgcatccatgtacgcaaatcccattcctatactcttcctatactgctcttattcaaaatgtgaaaataacatttggggttgctggggggtgggaggagtgggtggggaaagaaaactaattaggtaatgtctgatttaagttaattaaataaaattatctgataggtagtaggaaatgcatgaagcactactcaaagagttttatgattttataattatatatttataataaaaaaaattttttttttgatggatcaggttttttattattttttttttaatttttttttttattatactctaagttttagggtacatg

SEQ ID NO: 690235 - DNA, 1270 bp, Homo sapiens
acatttaaaaaagtaaatttgttattgaagttaaatatgatgttggttctttcattatatttaagacttaaaggatttgttgtaccaaaaatgaaggaaaaagagaaacaacaaaaaaagagaaaacaaaacacagtttcttcaaatctaaatgtatggaataatattttaaaaataaaaattgtttgcagattccctacttaaattttaagttagcacgcactagtcaaaaacttgccttaatttactgagcatttaacttgtgacctttgcttacttctctttcaccaagtgacacatttccattgtcaattctctcttaaacacatcattattttatgacagtcagatgccatgcttttaagggaagagagacaatagcttttactgtttatcagaccaaacagatgaaagcgagaaatttcaaatgagcaaagctatcctccaaattccccagttctctcttggacttgtttacacttacaaatcctaaagaatttgatttgcattttaaagcatttgctctttctttgtaaatatgtaaataggctagaagggtcactgaaagagagacaggagatttgacccttggcattacccattaattgtgaaaccttgagcaagggtgaaagctagatattgtcaaataaaaaacaatcaagactttaaaggttatcacacacgcttctcaaggattcaaggamctgatttgctaatgaagttcttcttcttatcacatacaggctgcctatacattacacatctttctaaacccttaggggagatgggtttctacatgggtatgacagactcaaatctctatgttttctcttctccttatgttacctattcaaatagataaaaccttcattagtgatatcaatggatgcttttcagtaaaactgctgttttaaagaaacctatgctttacttttcaaagcatctattttccaaactattgtgtgagaaaacttctagagttgagcagtaatagctcctagaaattcccagagaggtcacatcatgtggctggtggtggcatggtttggaatcacagctttcaaccattgctctgagttcacctgcaacgcatgacttaacaaaagcctctctctcctttgtagagagagaattacaggaaattcttttcagatcctgaaaaaaaaagtaccttaaagagtgtcagctttaatattatgattgttctaatgcagctacatatcaatacatattcccagtgatttactgaaagctgagtttagaataagaa

SEQ ID NO: 690236 - DNA, 595 bp, Homo sapiens
gttgctgttgtccgtgctgttattcttaacccctcagccttccaaattgtaggacagccttcctgtcattgttgacttgtaactatttatattagcctactgtaggtcaaattcatgatttgtcccatgtatgtcttgaacttttccattctcacatttttgcccttctcgaaacatctgccccaaccacctccacctgtcaaaaccttactaattcttcaaaacacactcccaaatgtcccttccttcttgaagtgatccgagttcctttgaattacacccattccccatccagcaatgtggagttgttcctgcccatgacatacacatcaacatagaacttttaacacgtttgttattmttctacctcatgtttgtggttatttgtgtataaatggaagtaaaccacacaagggcataattatatgtgtatccttaatggcctccaacccacataaaatcatgattaatggtagtttaatgaaaaatatctataagaataaaactaagggaaactgttcagagttcacttttgcattttattatgaaatttttcatgaagaatggttgattaatgagtacaaaaatacagtta

SEQ ID NO: 690237 - DNA, 1406 bp, Homo sapiens
ctagcctatgctaatcagttacaaattagtagaaagaaaaacaraacaagagtgacctaatgtttgcagaaattggatcagcagtcctagttcccaaacacgcagatactgaggccctggtgtggccttcaagggcttcccaaatcttatgccagctctttttctaaactcagtgtctaacattccccttcattcgagccatgtttacattaacccacacactttcatccaccatctctgctggttagatggtttgtttctcagcctggaatacactttctgctacccccaggccagctttcagcacgtgggatgctgacctctccatgtgtgtagttgacatctccacgtggatgcagtgcaacctcatgatgctattttatgagttagcgagagtccaaaaaaggggccttgctgggtgagcctgaagcagttgatgaagaagatcaaggtgtccttgatgtccttgccattgtccttgttctgcggcttagggtggtgcgtgggggaaggctcttcctctgggttcactggctcgtgtgttccttttctttttcaaaagccactccaggaaaagtcttgatagcagaagtcagttattaaaagctgtgtaaatgtactaaagaggacaggtgccagacacattttcatttaacattttactctcaactgggaactgtttgcctttgaaggaatgtcaggcacagttcctagttggggctggagcatttttgtgatgttctgcacaagttttggtctagagaagaaagctggctgcatggatagcatgaagaataccaatccacttgagtaataattatgcaaaatcaggtttcagggcccactaggtaatcatccaacatttctgtgctgactcttgcacatagcacaagagagtgaagtatgccagatccaggaaaaggcaaagttcaataattagctataaatacaactttatagccatttccccagactaaagggtaaaagtttaacaactggctataattacaactttattgctacatctccagactctatttttatagggagaataatggcttcttcaatgattaacacggttgatagctactgctctgtctttgaagaagcacatggtatttcgtggaaatgtgcgtatgtgtgtgtttgtatcttaagtcaaacattaacaaataacacagaaagtcccttgttttcttgtcttgcacttagccttttgcatctcacttacttctttctttccttctttctttctctttctttctttctttctttcttttctttctttctttctttctttctttccttccttccttccttccttctctctctctctttctttctttctctctctctctttctctgtctctctctctctttctttctttctttccttccttctttct

SEQ ID NO: 690238 - DNA, 1406 bp, Homo sapiens
ctagcctatgctaatcagttacaaattagtagaaagaaaaacaaaacaagagtgacctaatgtttgcagaaattggatcagcagtcctagttcccaaacacgcagatactgaggccctggtgtggccttcaagggcttcccaaatcttatgccagctctttttctaaactcagtgtctaacattccccttcattcgagccatgtttacattaacccacacactttcatccaccatctctgctggttagatggtttgtttctcagcctggaatacactttctgctacccccaggccagctttcagcacgtgggatgctgacctctccatgtgtgtagttgacatctccacgtggatgcagtgcaacctcatgatgctattttatgagttagcgagagtccaaaaaaggggccttgctgggtgagcctgaagcagttgatgaagaagatcaaggtgtccttgatgtccttgccattgtccttgttctgcggcttagggtggtgcgtgggggaaggctcttcctctgggttcactggctcgtgtgttccttttctttttcaaaagccactccaggaaaagtcttgatagcagaagtcagttattaaaagctgtgtaaatgtactaaagaggacaggtgccagacacattttcatttaacattttactctcaactgggaactgtttgcctttgaaggaatgtcaggcacagttcctagttggggctggagcatttttgtgatgttctgcacaagttttggtctagagaagaaagctggctgcatggatagcatgaagaataccaatccacttgagtaataattatgcaaaatcaggtttcagggcccactaggtaatcatccaacatttctgtgctgactcttgcacatagcacaagagagtgaagtatgccagatccaggaaaaggcaaagttcaataattagctataaatacaactttatagccatttccccagactaaagggtaaaagtttaacaactggctataattacaactttattgctacatctccagactctatttttatagggagaataatggcttcttcaatgattaacacggttgatagctactgctctgtctttgaagaagcacatggtatttcgtggaaatgtgcgtatgtgtgtgtttgtatcttaagtcaaacattaacaaataacacagaaagtcccttgttttcttgtcttgcacttagccttttgcatctcacttacttctttctttccttctttctttctctttctttctttctttctttcttttctttctttctttctttcyttctttccttccttccttccttccttctctctctctctttctttctttctctctctctctttctctgtctctctctctctttctttctttctttccttccttctttct

SEQ ID NO: 690239 - DNA, 1406 bp, Homo sapiens
ctagcctatgctaatcagttacaaattagtagaaagaaaaacaaaacaagagtgacctaatgtttgcagaaattggatcagcagtcctagttcccaaacacgcagatactgaggccctggtgtggccttcaagggcttcccaaatcttatgccagctctttttctaaactcagtgtctaacattccccttcattcgagccatgtttacattaacccacacactttcatccaccatctctgctggttagatggtttgtttctcagcctggaatacactttctgctacccccaggccagctttcagcacgtgggatgctgacctctccatgtgtgtagttgacatctccacgtggatgcagtgcaacctcatgatgctattttatgagttagcgagagtccaaaaaaggggccttgctgggtgagcctgaagcagttgatgaagaagatcaaggtgtccttgatgtccttgccattgtccttgttctgcggcttagggtggtgcgtgggggaaggctcttcctctgggttcactggctcgtgtgttccttttctttttcaaaagccactccaggaaaagtcttgatagcagaagtcagttattaaaagctgtgtaaatgtactaaagaggacaggtgccagacacattttcatttaacattttactctcaactgggaactgtttgcctttgaaggaatgtcaggcacagttcctagttggggctggagcatttttgtgatgttctgcacaagttttggtctagagaagaaagctggctgcatggatagcatgaagaataccaatccacttgagtaataattatgcaaaatcaggtttcagggcccactaggtaatcatccaacatttctgtgctgactcttgcacatagcacaagagagtgaagtatgccagatccaggaaaaggcaaagttcaataattagctataaatacaactttatagccatttccccagactaaagggtaaaagtttaacaactggctataattacaactttattgctacatctccagactctatttttatagggagaataatggcttcttcaatgattaacacggttgatagctactgctctgtctttgaagaagcacatggtatttcgtggaaatgtgcgtatgtgtgtgtttgtatcttaagtcaaacattaacaaataacacagaaagtcccttgttttcttgtcttgcacttagccttttgcatctcacttacttctttctttccttctttctttctctttctttctttctttctttcttttctttctttctttctttctttcyttccttccttccttccttccttctctctctctctttctttctttctctctctctctttctctgtctctctctctctttctttctttctttccttccttctttct

SEQ ID NO: 690240 - DNA, 942 bp, Homo sapiens
aaaatatctaagatctttccctaatgtgttttcccttgcccctggagtagctccaaccatcactcttgttaggtggtcatattctacatgtcattcaatgtctaattcaaaggctactttttcaaggaagttcccataattggatgaaatagttctctactttgaactcccattgggctttgtttttcacaccgcataatcacctgtattgtcctgtccttgtccatttagcacctgacagacggtgctgaaaagttcaaggatgtgtggaagatggacgaaccatgtgaagtcacgtttgattactcctaccctcatttgccctatctgtttgtcactaattctttttacactttgcctccaactcatttccttctctcccacattggctgtcctggtctcaggtctcagagctcaaagtctgtattaatatagtagttttctgaagcagcgtcctcactgcagccacagaatcaaagaataataggatgataacatcacaaaaattgttctccattgttctaaytggttggtccccaggggagaaaaaggggttgacagaccagtccaacttccccagggggctgtttttgacacaggcaagatccttttttaggaactagacctgaggagaagtaataaataggaaagaagagtaatgatggggaaattacatgaacagagtgaggtgatgagatttctttttcgggggggtagtaaccatgagtttgaaattttaaagaaaggaaaaatgtttaaagggaatagtttgaaattttttgctaaatgatgctctatggaaaaaacttgtagaggatttcttacctttgcaagaaatcctacagtaagttgaagtttatttttgagaactttgtgcttagactagtagattgcttgatgtcatgttgaacaagactaaattataccaggcatggtggctca

SEQ ID NO: 690241 - DNA, 658 bp, Homo sapiens
cacacatrtacacactcacatgcatacacacacatatgctcacacacatgtacacacacacatatacacaccacacactaacatacgtacaggcgcacacaccgctacacacacacacatgtacacacacacacatgcacacactttggatcacaggctcaatttctagaccacacctggacctcgttaaatgctgcgggagttaagtgatggaaactgacccttccacctgtatgggtctgcacgtcattccctctgctgcctcaaaccggcagccatcctgtctcctcagcagactgggacctccccaagggaggacagggctggaggcttctctgggccgtctcaggcctcacccaccttgtcgatgaaggccgcgaacctgctgttgagggacttgatctgctccttctcctcctgcttcacgcactgtgcgttggggtcgatctccaggttgaggggcgtgaggaggctctcgttgaccgacacggtagtgatgcatggggggctgggtccgcacacgcccccggagcggtagccgaagctgcgtccgcaggagccggctcggaagccacctacagctatccggggcccgcaggagcccaggttgcagaggctgcggctgccgaagcccgtcagccctcggtagcaggacacc

SEQ ID NO: 690242 - DNA, 1703 bp, Homo sapiens
tttgtcctgatgctactgtaaacatttctccctagagactgactgctacctctaggtgaaaatgagactttttaaaagagtgacaccttctcaagaagagccttaggcaggtccttcaggagggattccagaataaggcattgctatcacaggagatgacatctcctgcgtgttactgcccctgaaaaccttccagtgggatgagacgtggaggaggcagacagtgatattgatgatcctgaccccatgtaggtctcagctaatgtgtgtgtttgtgtcttagtttttaacaaaacagttttaaaagtaaaacacaaagaaaatttaaaaatagaaaaaaacttacagaataaggatataaagaaagataatgtttttgtacaactgtatgacgtgtgtactaagtactaatattactataaaagagtttaaaagtttaaaaaataaaaaagcttgtcaagtaaaaaagttgtaatacaagttgagctaaagttaatttattattgaataaagacttttttattaatttagtgtatttaatttttattaatttagtgtatttattaatttagtgtatcccaagtgtacagtgtttataatgtgtacagtaatgtcctaggccttcatattccctcgcctcttctcactgactcacccagaggaacttccagtcctgcaaactccattcatagtaagtgccctatacaggggcactagtttttcttttatactctatttttactgtacctttcctctgttttgttatatttagatacatgaatatttgccattatgttacaattatctgtagtatttagtaccgtcacatgctgcacaggtctgtggcttaggacccctacgctccacggtctaccatcgaggttcgtgtaagtgctctatgatgttcatacaatggggagatggccataggatgcatttgttagaatgtattctgtggttaagtgacaagaggctgtatttaagcccctaacctcctccatttctgcacgcctatgggcaacaattgagtaggagaatcagaaggagacacagagccccaccacggaggactgaacactccagtctcggatgcagaaaaactagagttccgaatctggctcaaggttaacctctctacggctacattttttccgtctgtacaactgaagtaacagctttatatatagctgtctcttggtatctgcagcagattcgttccaggacccccacaaataccaaaattcaaggctactcaggcccagcgttcctccctgcggaaccctcggaaaccaaatgagctctccctatccacaggcgtggcatcctgaaaacaccttgctttccatscatggttggtcgaatcctgagttcgggagctgtggacacggagggtcaactgaactccagtgcactgcgttgtaacataaaacgatgcagactgcctggcatctgtgaagttcttttgaaacgtgtgcttgcagtcgcccctgcagacgcagcggctgcgctgtttgtgcgctgctccagagcccacggaaggagaatgggcttcagaacgaaacagatctggactcctcccgactcttcctctaacaggctatgaaaccttgagcaagtgactgtatgtctgtgaggccacattcccacgtaaaatagagattataacacctttcagtggaaggaggaagctttattgagatggc

SEQ ID NO: 690243 - DNA, 1703 bp, Homo sapiens
tttgtcctgatgctactgtaaacatttctccctagagactgactgctacctctaggtgaaaatgagactttttaaaagagtgacaccttctcaagaagagccttaggcaggtccttcaggagggattccagaataaggcattgctatcacaggagatgacatctcctgcgtgttactgcccctgaaaaccttccagtgggatgagacgtggaggaggcagacagtgatattgatgatcctgaccccatgtaggtctcagctaatgtgtgtgtttgtgtcttagtttttaacaaaacagttttaaaagtaaaacacaaagaaaatttaaaaatagaaaaaaacttacagaataaggatataaagaaagataatgtttttgtacaactgtatgacgtgtgtactaagtactaatattactataaaagagtttaaaagtttaaaaaataaaaaagcttgtcaagtaaaaaagttgtaatacaagttgagctaaagttaatttattattgaataaagacttttttattaatttagtgtatttaatttttattaatttagtgtatttattaatttagtgtatcccaagtgtacagtgtttataatgtgtacagtaatgtcctaggccttcatattccctcgcctcttctcactgactcacccagaggaacttccagtcctgcaaactccattcatagtaagtgccctatacaggggcactagtttttcttttatactctatttttactgtacctttcctctgttttgttatatttagatacatgaatatttgccattatgttacaattatctgtagtatttagtaccgtcacatgctgcacaggtctgtggcttaggacccctacgctccacggtctaccatcgaggttcgtgtaagtgctctatgatgttcatacaatggggagatggccataggatgcatttgttagaatgtattctgtggttaagtgacaagaggctgtatttaagcccctaacctcctccatttctgcacgcctatgggcaacaattgagtaggagaatcagaaggagacacagagccccaccacggaggactgaacactccagtctcggatgcagaaaaactagagttccgaatctggctcaaggttaacctctctacggctacattttttccgtctgtacaactgaagtaacagctttatatatagctgtctcttggtatctgcagcagattcgttccaggacccccacaaataccaaaattcaaggctactcaggcccagcgttcctccctgcggaaccctcggaaaccaaatgagctctccctatccacaggcgtggcatcctgaaaacaccttgctttccatccatggttggtcgaatcctgagttcgggagctgtggacacggagggtcaactgaactccagtgcactgcgttgtaacataaaacgatgcagactgcctggcatctgtgaagttcttttgaaacgtgtgcttgcagtcgcccctgcagacgcagcggctgcrctgtttgtgcgctgctccagagcccacggaaggagaatgggcttcagaacgaaacagatctggactcctcccgactcttcctctaacaggctatgaaaccttgagcaagtgactgtatgtctgtgaggccacattcccacgtaaaatagagattataacacctttcagtggaaggaggaagctttattgagatggc

SEQ ID NO: 690244 - DNA, 617 bp, Homo sapiens
gggactgccccctgagagccctgagatcgacatttctgaagccctgccacctgccatccctcgtagggattcaagtccaaatagccagagcctctggcagaggagatgggggaaactgaggtagccctagggtcgtcctctcaagtcaagctgcctggagactgtagcagctacggttgaggctgctcaggaagcacagaccgccccagacagcagctgaagctgaagactccagggccaggccatcgggtcaggcgttcaggaacgcgaaagctgacggctctgagccaggaggctctttggctgctgtcctctgggacgatgtttggggggcgcggggagcatcaggacaggactctcccgcagcagccccagcccccaccaggcggggacaggccaccagctccatgccagcaaacaaggagtcgcggctccacgcacagctgctggggcctctctttgggctgtccgtgcccccygggatccgttcaggtctccaccgcctgctttctgccagtctggcctcggcctcgctggggtctccgggggctggaatgggggaggcatctgggggtggggtgggcacagggctggacggcatcccagatgagggagca

SEQ ID NO: 690245 - DNA, 930 bp, Homo sapiens
  misc_feature 834, 841, 850, 874, 883, 923: n = A,T,C or G
tgccttcatctcatgtgagtttctcctcctcttccatcccttataaggatgagggtcgttgggcttagggccccctgggatgatccgggatgacctcatctccagataacctctccatgacagctgcaaagacccttgctccaattctgagattctgagattctggttggacatcacatattggaggccaccattccacccactacacaaagaaaccctcccctccagaacccctttccctgtccgaccagccctttgcagctttcacaccccctgacaaatttggttctgttcccttattctaccccctgccctaggccgagatccctgaagcgggcccagctccgttcactgctcccccggcctcctgctgtttcccacacgcagccatggtacagggcagctcatcccaccacctccccaaccgcagcctccagggatgtacaccctgcctcaggggctgtgcctgggccctggctggtggagggcacagccgtcagggaaggccctcagctgcaggatgccgtgcctcagagaccaaccaggccctcgaaggcactgtggccggcccagatgtcagcagctccagcaattaggctgggacagatggtgcctggtgacacaaggggactgtgggggccacaggggaccctgctcacctggacctacygtggaggccagggagggagatggactcgaagggcggaagggcccagagaaggcacatttgcagagcagcggccgcatttccagagctcgggagcccaacaggaatcccgtctggccatgggaccaccgcccttggggctgggggatgcccgcaggggacggcanagggcanacaggccangaaaagggggggggcagagggcanacaggccangaaagagcgcctgcagtgcccaaggaagggaccaaaccangcccctg

SEQ ID NO: 690246 - DNA, 612 bp, Homo sapiens
tgtgatcatgattatcattacatcaagttccatatatgcccagccagaataaatattaacccattttataaatgactttatactgcatttgtggatacagctccacccaaacccaaaacaacactgtttccatagtaaccaacagatttcaaagaaggaaaaaggaggggaagacttcagaacggatagcaatcaaataaaatagccagcatcaacaaaatatgtcagcattatttaaaacacacaggaccattctatagtttaatctctttcccagaaaaccaccccttctaagtcaccttcttgtaaagccagtcttccctcaaacaaacagttgcaaaattgtttccattttaattgaggaaagaagcaaatttcttgagtcattcctgggatccaaatgggagtatgatgaagaaaataacatctactaagtgacttagcccacacagaaattcacatkgattaccaactggtaattatgaaatcttagctgggctttgatgatcatattagagtgtccatttccttgctgaatgtaatgagggaggaaaagaagcaaaagccaaaatggaaagccagggagctaaaaaccgtaaaagctgcagacca

SEQ ID NO: 690247 - DNA, 1505 bp, Homo sapiens
  misc_feature 909, 910, 911, 912, 913, 914, 915, 916, 917, 918, 919, 920,921, 922, 923, 924, 925, 926, 927, 928, 929, 930, 931, 932,933, 934, 935, 936, 937, 938, 939, 940, 941, 942, 943, 944,945, 946, 947, 948, 949, 950, 951, 952, 953, 954, 955: n = A,T,C or G
  misc_feature 956, 957, 958, 959, 960, 961, 962, 963, 964, 965, 966, 967,968, 969, 970, 971, 972, 973, 974, 975, 976, 977, 978, 979,980, 981, 982, 983, 984, 985, 986, 987, 988, 989, 990, 991,992, 993, 994, 995, 996, 997, 998, 999, 1000, 1001: n = A,T,C or G
  misc_feature 1002, 1003, 1004, 1005, 1006, 1007, 1008: n = A,T,C or G
ctgttatccataaaaatgcaataggtattgcatagaattagttacaagcacaaaactgtgataccctatatgcccctgttacaagaaagttgtcattttacattatgggtatttattcgatattttcatagtttaattactaacaaagcattaataatgccagattgtgctgacaaacattgcagtctctgaataggagaaagaatatattctttgcaccattatacaatgatttagaactttaatagtgtgctggggaaaaaacatgtatctgtaacctgaaatagttgttttacctccctgagtacaaaatatgtcacacattctctcctaaatgtattctctatttttaccagtcattttgttgctaaaatgtaagatatggggatgggatgtgggtgattgtctccgtccttttgggcttctataactaaaataccttagactgggtaatttataaacaacaggaatttatttctcacagttctgggrgctggaaagtccaagatcaaggctgtggtggggtttggctggcgagggctccatccttcttgctatatcttcacatggtggaaggagcaaacaaactcccccagccctcttttacaagggcactaatattatttgtgagggctccactctcatgacttaatcacctgcccaaagaccctacttcttaatactaacacattggggattaatcttcagcatatgaattttggaggaacacaaacattcagaccatagcattgtttattggggtgaatgctcatttaacttttcccagaacaatccctgttaagtctgctaacctcctgtagttaatgataaaatttccttcattttccgaagtgttcttgtttggattataaattatgtaattaccctaatgacaattaactagacatnnnnnnnnnnnnnnnnnnnnnnnnnnnnnnnnnnnnnnnnnnnnnnnnnnnnnnnnnnnnnnnnnnnnnnnnnnnnnnnnnnnnnnnnnnnnnnnnnnnntgtttatactctagttctaccaaaactaatttattttgccttggtaagtataatttactccacatttacctcttaacataatccagctgtaggggtgaaaaactatatcctgtggccaaatccacctgttctcataatgttttttaggacacaagtacaagaatttgcttacttattgtctacggctgttttcaatatcagagtagataggtgtgacagaggctgcatggctggtgaaacaaagaaaaaaaaattactacctggtcctttacagaaaacatttgccaaccccttgtctagtgtaatcattccaaacacagaaactcactgcacagatttatagaaagtaaagtgcagtgtactctgttgaatatattctaaatctatgacatatcttagaagacattagttttaagaaaattattattgacagctgttttttcattcctgaggaattctcattaattaaaaagttcttatgtaaaatgcagcaaact

SEQ ID NO: 690248 - DNA, 615 bp, Homo sapiens
cagatattcagggtaattgtttatttttccctcattaatatgggaacaaattctaacgttgtaaaatttatgttaatagagtttccaagcccatgaactctaagtgaaatggccatgcaatccatgttttctagatccgtgttgcctacatctttagcttgattttaatatctaacctccctactctgattgtttaggtactagattaaattcaaaaatatatttactgtatgattcttgacaaagttctttttatattmttcatacctggtgaagtcataacttttctagatatttaaatgacatacacatgtattatttaatctcatgtgtatatctgattctgtggtcacatttcccaaggccagataaatgactgtagccagatagaggtagggctaggtgtaaaaagagatattcccacagattatatagttgctgtgtggagaaaactctctatgtttttcctctagcctcacaccacaaagatcaatcagcaacacagaagacttctgtgaccgaatgtgtgggttttttcctccatacatacaccaaggagcagatgccagctgagtgtcctctaattcagttctgacactacactgtctacctgga

SEQ ID NO: 690249 - DNA, 629 bp, Homo sapiens
aaacaaaagtatccaataagtttttaatggctacttttttcttattttagaggttgacaaatgggatgaaatctttgataggcaataaacttatttattaatttattatttattaatatgtttagagagtcaggggatacatgtgcatgtttgttaaatggacatattttgtagtggtgagatttgggcttctagtgtacctatttcctgagtagtaaacattgtacccaacaggtaatttttcaaccctcacactcttataccctcacaygtttggtgtccccagtgtctattactcccctctgtatgttggtgtgtacccattgtttaactcttacatataagtgagaacatgcagcatttgattttcccttttttatgagtcattttacttaggataatggcctccagcctcattcatgttgctgcaaaaaagactatttcattattttttatggctgcatagtattctgtggcatatatataccacattttctttatcagatcagctgttggtgtacacataggttgattgcatgactctgctcttatgaatactgctgcaataaacataccagtgcagatgtctttttgatataatgatttattttcctttggatacatacaca

SEQ ID NO: 690250 - DNA, 1157 bp, Homo sapiens
ctcattttcttcatttttgtgactgggtactgtacatgtttctaatgtggagagatcacattagaagaatactcttcccttccacttactgttttggaactgctgtttagctttggtaaatggaggccagaaagatcatgggaaagccaattaccacacggctgtgattccaaaggcaaagggaagacatgagggtggggagcagtgtgggtgaagggaggaaggtcatttggtgtaaagcaagacatagaaagaagcctgcctgcaaagtatcaggtggttcaaaacataaggtactcacttagaagggcagaaaaagttagctaaacaagaaacactatttggcaaaattcacagatataaacaaaatatgattgggttagactcctaaagaaaagatgcctaggagcaaaatattactgtcattttaatattattgatgatgatctcctgccacatatgacacaaattttttctggggtcagtaaaagttttatttaaaaaaaattaagtttctacctatagactaaaagaggctcgagagagatagtacccaattcactatgtatgaagctcattcagagaacaatttaaatttaaacaaagtttcaaaaaatttccagatatatacaaaaacatggaaatgtgaccatatttgatagcagatgataagaaatgtttgtaaatttgttataggcatcataacggtttcctgcctatgactatgggtggttgttcttgtaaaagtgctgtcttttcaagatacatgctgaaataaatacagatgacatgatgtttgaaatctgcttcaaaatcatctgaggatggaagaatggggggtgcaaagatgaaacaagaatgaccatgacttgttaggtgataaaagctggatgatacctacatggkgcttattatactattctctttattttagcacatgtgaggtatttagccaggactagaggtgcccaccaccactcccagctaattttatatttccggtagagatgaggttttgccatgttggccagccctatctatctatctatctacctatctatctatctatctatctatctgtattatatataaatatatatttatatatatttttgctggggaattaaacattatattacatttgcttgagtcacaaa

SEQ ID NO: 690251 - DNA, 1157 bp, Homo sapiens
ctcattttcttcatttttgtgactgggtactgtacatgtttctaatgtggagagatcacattagaagaatactcttcccttccacttactgttttggaactgctgtttagctttggtaaatggaggccagaaagatcatgggaaagccaattaccacacggctgtgattccaaaggcaaagggaagacatgagggtggggagcagtgtgggtgaagggaggaaggtcatttggtgtaaagcaagacatagaaagaagcctgcctgcaaagtatcaggtggttcaaaacataaggtactcacttagaagggcagaaaaagttagctaaacaagaaacactatttggcaaaattcacagatataaacaaaatatgattgggttagactcctaaagaaaagatgcctaggagcaaaatattactgtcattttaatattattgatgatgatctcctgccacatatgacacaaattttttctggggtcagtaaaagttttatttaaaaaaaattaagtttctacctatagactaaaagaggctcgagagagatagtacccaattcactatgtatgaagctcattcagagaacaatttaaatttaaacaaagtttcaaaaaatttccagatatatacaaaaacatggaaatgtgaccatatttgatagcagatgataagaaatgtttgtaaatttgttataggcatcataacggtttcctgcctatgactatgggtggttgttcttgtaaaagtgctgtcttttcaagatacatgctgaaataaatacagatgacatgatgtttgaaatctgcttcaaaatcatctgaggatggaagaatggggggtgcaaagatgaaacaagaatgaccatgacttgttaggtgataaaagctggatgatacctacatggggcttattatactattctctttattttagcacatgtgaggyatttagccaggactagaggtgcccaccaccactcccagctaattttatatttccggtagagatgaggttttgccatgttggccagccctatctatctatctatctacctatctatctatctatctatctatctgtattatatataaatatatatttatatatatttttgctggggaattaaacattatattacatttgcttgagtcacaaa

SEQ ID NO: 690252 - DNA, 1157 bp, Homo sapiens
ctcattttcttcatttttgtgactgggtactgtacatgtttctaatgtggagagatcacattagaagaatactcttcccttccacttactgttttggaactgctgtttagctttggtaaatggaggccagaaagatcatgggaaagccaattaccacacggctgtgattccaaaggcaaagggaagacatgagggtggggagcagtgtgggtgaagggaggaaggtcatttggtgtaaagcaagacatagaaagaagcctgcctgcaaagtatcaggtggttcaaaacataaggtactcacttagaagggcagaaaaagttagctaaacaagaaacactatttggcaaaattcacagatataaacaaaatatgattgggttagactcctaaagaaaagatgcctaggagcaaaatattactgtcattttaatattattgatgatgatctcctgccacatatgacacaaattttttctggggtcagtaaaagttttatttaaaaaaaattaagtttctacctatagactaaaagaggctcgagagagatagtacccaattcactatgtatgaagctcattcagagaacaatttaaatttaaacaaagtttcaaaaaatttccagatatatacaaaaacatggaaatgtgaccatatttgatagcagatgataagaaatgtttgtaaatttgttataggcatcataacggtttcctgcctatgactatgggtggttgttcttgtaaaagtgctgtcttttcaagatacatgctgaaataaatacagatgacatgatgtttgaaatctgcttcaaaatcatctgaggatggaagaatggggggtgcaaagatgaaacaagaatgaccatgacttgttaggtgataaaagctggatgatacctacatggggcttattatactattctctttattttagcacatgtgaggtatttagccaggactagaggtgcccaccaccactcccagctaattttatatttccggtagagatgaggttttgccatgttggccagccctatctatctatctatctayctatctatctatctatctatctatctgtattatatataaatatatatttatatatatttttgctggggaattaaacattatattacatttgcttgagtcacaaa

SEQ ID NO: 690253 - DNA, 1154 bp, Homo sapiens
caagcattagtcttccctctaatctttatagaaccgtatagctatgacattctcttctttttgaggatgtagaaattcagtcacaaaatagttaagagactgtgttcacctattggtctgaaaatgcattgccttttctgggtgtcagttttttttctatatgagcataaaaaacrtataagacctcactgaatccaaaattaacaataacaaggaacagctaccacttattctacccatcttataagtaggcatatgctaagtgctttatatagcatgccattttatcttcacatcaaccaggagagttaattattactttatgctacagatgagaaaattgaggtgcaaaggggttaaataatgtgtccagggtcacatagctagtaaaaaatggcagagctggactgtaaattcatgtctgtctgaattcagaccaatgctctaaaaacataacttagtgtagaaaagagattagtgaatatttctgtaaatggccaaatagtaaatactttagcctttgccggtctgcaagctacctatgatctctcttgcattttcttcttctgtttttttttttttaaatgctttaaaaatgtaaaaaccattctttgttcacaggccatataaaactaaccataggctgaatttggcttataccatcatagtttgcagattcctggtctagagtataccaggagtaccagtatacacagaggcctttcagaatctatcagtggtgaaaggatcatgtagggagtgctaaagggaaaggagaaaaatggagaaaatgcttagctctagatttcctggggaaagggaaatccagctggaatagaatatccatggtaaacacagggagaccacaaaagagtgagtcataacccggccatagtctgaatatgatcactcagccaacaaacgatcctcagatggcttcaaaacacttgtgttgggcggaagagggggagattgattagaagagatgtgctctccagagagaacacaggctctgtccttctggaagagtagacatggtagagtggatgaaggaggtatctttctaggcaccaactcttgcagcagaggagaaggtgagggacagccagatggtgggagtggagggtacctctgtgggtgtgtatgaaattctc

SEQ ID NO: 690254 - DNA, 644 bp, Homo sapiens
ctcttcttcattctctagctacaaattggagtcatagagtagcctgcacaggtccccacatgctcccaggagggaccctcagccctactttcttgacctcattaagcaaaagcaagatgaagtttgtttcaaaggaaaaattacagaatctcacatttaggagactttttcttcccagtctagcagagtaaagactgacaaaaccaatgaagtccaagccaatacaatatacttggtgaaactcttgagtttgtgcaacattgagattttataattttggatgtacatgagatagaaacaaacatgytataactgttgtttattcatcaaagccacattcttggaaagaacagagggaccagtacatgaatatgatttatgaaattattcaacactaaactgaactatgatagcccatggattagaaaaatcagatcaaatgttgtaactcaaaagatggtggtagtgtggaagccaaacatttggaccacatcatcttaaaactgtaaaaatcattttctcaaatggcttccatcatatatatttactaaatttaaaactgtttaagcaccttaccttgtacttaatctgagttttgagacaaggtaaattgagggaggatatttcattaattgtattcctgc

SEQ ID NO: 690255 - DNA, 1149 bp, Homo sapiens
caacctaacttatattattgtgaacattaaactgagagatacagctgaagtcctgaataagattattgtttctctttgcctttgcacatgtaatttcctcagcctggaatgccctatcttctccacctgcaaatccttattcattctttttatttaatttcaactttgcgaagaacatttttattgaaatataaatcacataccataaaaatcacccattaaagtgtccaattcaatggctttggtatactcacagagttatacagtcatcactatagtctaagtccaaaacatttttgtcactctccatcccccttccccctccccaatcctaggcatcacgaatctactttttttttttgcttttattattattgatacataatagttgtatgtatttatggggtgcagtgtgaaatttagatacatgtatgcaatgtgtaatgatcgaatcaggataattagcatatccatccatcacctcaaacatttatcacttctttgtgttgagaactttcaaaatctgctcttctagctacttaaacatatacaataaatagttgttaattatactcaccctatattgctattagaacactagaacttattcctcctatctagctgtatttttgtatccattaaccaatctttggctgtcttccctcccatccttcccttccccttattcattctttaagatcttgtccaaatgtcgcctcctctgtgaagcctaccaccttccttcttaggaagcatcaggtgttcctggctctggaccaactcctaattttgttcagacctctctaacagggcttcttaccttgctttgtgattgtttccctacctgtcttccaggatgaatctggaagggattgctgtatctcattcaaagatacagaatttccactttttaatgtctctgaaatcagggtgcatttatgttacaattggcagtgttttttttctttttttttttcattgcttggtgagamcaaactaaaaaagtaatggcacaatgagagcatgtggcatagattggatgcgtgttggtatttgtctttgtgttcccagtcactgagctcaataaatgtaataaatgtgttgaatgtactgacaacactagtaaaagtttactgcaattaccacacg

SEQ ID NO: 690256 - DNA, 646 bp, Homo sapiens
atatcttctatgaaatattaaatacacacaggagctgagaatgtgagctcctgaaaaagcgatcttgaagttgaaccccaaggctaacatttcctagccttgtgatcttacataagttatttaatctctcttagtctcagccrattcatggctaatatggagttactaacatgtaggtatgcagaaattttagctgttattactgtaactaactgctactttttattactagtatgtaattataatattcaatgtataattgaatatatcatggcatatcatatattattataagcaatgcatatttttataagtataatgatacagccacatgtcacttaatgaagaggaccttccaacaaatgtcttagtgattttgtcattgtgtgaacatcatagagtgtacttacacacatctaaatggtatagcctatgtattagtcagggttctctagggggacgggactaataggatagatgtatatatgaaatggagtttattaaggagaattgatgcacatgatcacaaggtgacatcccacaacaggccttctgcaagctgaagagcatgaaaaccagtccaagtcccaaaacctcaaaagtagggaagctgacagtgcagcctttagtctgtggcgaaggccca

SEQ ID NO: 690257 - DNA, 646 bp, Homo sapiens
atatcttctatgaaatattaaatacacacaggagctgagaatgtgagctcctgaaaaagcgatcttgaagttgaaccccaaggctaacatttcctagccttgtgatcttacataagttatttaatctctcttagtctcagccaattcatggctaatatggagttactaayatgtaggtatgcagaaattttagctgttattactgtaactaactgctactttttattactagtatgtaattataatattcaatgtataattgaatatatcatggcatatcatatattattataagcaatgcatatttttataagtataatgatacagccacatgtcacttaatgaagaggaccttccaacaaatgtcttagtgattttgtcattgtgtgaacatcatagagtgtacttacacacatctaaatggtatagcctatgtattagtcagggttctctagggggacgggactaataggatagatgtatatatgaaatggagtttattaaggagaattgatgcacatgatcacaaggtgacatcccacaacaggccttctgcaagctgaagagcatgaaaaccagtccaagtcccaaaacctcaaaagtagggaagctgacagtgcagcctttagtctgtggcgaaggccca

SEQ ID NO: 690258 - DNA, 646 bp, Homo sapiens
atatcttctatgaaatattaaatacacacaggagctgagaatgtgagctcctgaaaaagcgatcttgaagttgaaccccaaggctaacatttcctagccttgtgatcttacataagttatttaatctctcttagtctcagccaattcatggctaatatggagttactaacatgtaggtatgcagaaattttagctgttattactgtaactaactgctactttttattactagtatgtaattataatattcaatgtataattgaatatatcatggcatatcatatattattataagcaatgcatatttttataagtataatgatacagccacatgtcacttaatgaagaggaccttccaacaaatgtcttagtgattttgtcattgtgtgaacatcatagagtgtacttacacacatctaaatggtatagcctatgtattagtcagggttctctagggggacgggactaataggatagatgtatatatgaaatggagtttattaaggagaattgaygcacatgatcacaaggtgacatcccacaacaggccttctgcaagctgaagagcatgaaaaccagtccaagtcccaaaacctcaaaagtagggaagctgacagtgcagcctttagtctgtggcgaaggccca

SEQ ID NO: 690259 - DNA, 2244 bp, Homo sapiens
gtttattaaggacgtggtggcaatgagccatcttacagacttttttcctcctctgtagcctgtttagaattctcagtttattttcaaacttctggttcagtcagtttatcttaaaaaaaaaatgacagaaataagaagaggtgataataggaagtgtgatttaatctctgctgtgcaggtcacctgaggtgtatcacctaatgacagtgcagcagtaactttattttctccctatccagcatggtgtccacattaaaattgtgaatctctaaattagcattttgtgtctgccactttctacctttgtaccactcagcaggatattcacctctttaaatctcagctttctatctattcagtggtgttagtgtcatgcctgtcactcagaaagagtgaaacgctgcaaccacagcacagatatgcccaatgagtagtaaatttttgttgttattgctgtawctgttactattgtgaccggtattgttgttatgtatctgttacatcaactgttgattctagtgtatggtttttggtgattagaagtatagacaccttataaaaactccattaatttggataatatagcttgcagttccccttttgtggatgtaagtaaagactgagagggctgtgctgtgacagagtgtgcagatagttcctcctaaccacagccgtcccctacttaccttttctaaattccaaatgagttttaattcgaaagaaaataaattttgttttcatgaacatattttgcgctatcagtatatcaattagaaagaagaaaatgaaaaataaaaaatgggaaatatgagctattatatattagaaaactagaagtaaatagccaaatatatgcaagggtgggctttgctaaagagtcccatgtcaaagtaataatttctttatatttgatgattgagaatcatttggatgtaaatacattttcatttcatgtttgggtaattgactttttaacagttcatggaactaccaacaaagtgtacattatttggattttacatttcccaaataatatgcaactttagattgctttctgacatttaaatcagaaaaatgttgcagggattttcagtgagtttttctccctctcattggcaaccctaaactatttgggggtatttcgttctatacctctttgtcaaagctttctagggtttctagaaagctcaggctgtctttataacaatttcttagtatgtttcaacatgctaataagaaaacactaggcaaatatcatttcagttggggaaatgaagaaattgtaagttaaaggatcatgcgtcaaaacaatataatattgattggcctcaaatacgcctttattcttttgtacactataaagaaacttaaaccatttttagataggagctaatatttcagcttctgttttaagcaatgaatgaactcagcagtaactctgggagataggtgttctttggatatccatgtaatagatgagaagattgagacatagaaaggcttacagagcttgcccagggtcatagacttaggctgtccacagcctggagttcttggttctaaggccatgacccttccattaaaatattactcaaggccaggcagtctggttccagagcccagtgtcttatgaggcagggaaggtggccataaaccattgattaaaatactcttgaataggaatttctcctaatattctccactaatgctttgaaacaggtttctaattgacacccatgtttataagcatcaaattattccctcaacatcatgcaacctgtaaagaaggcatgctacaggtagtgaagttagtgaggtgaagtaaaaattagaatgtttgaagagctagttaatatttttaaagtgaatacatagtttttattttcttttgtcttcccccacatgaccatgtttcaaaagtttagctttagaagttgctttcaagtactgtgttagagatattggaatcattttaaaacaatcttgaaatccttctaatgcccctcaatgaaattcagataatttacataagacctcagttcctgttggtcctccagtgaaggatgaaccccagaattattttcttcttcttccttccacctctttcttcaaaattctcatcaaatagtatttattgtataacacataaaaataacaaaatattattacctcacaaatcttgtctgaaattttactttttttttttcctagttagaagaattttggcatgcaagtgctgaatta

SEQ ID NO: 690260 - DNA, 624 bp, Homo sapiens
gtgtatcaaatctccccctccctctctcttataaagacacttgtgattgggttaagggaccatcagctaatccaaaataatctctctacgccaagatccttaattacatctgcaaaccctccttctttataaagtaacatttatagattcctggaattgtgccctatgtctttgggaggccattattcatcctactacaaaacattaagtttgggattcttcttacacatccaagtggagattgggaagaatttattaatgagtgattaagaaatagagcagtaargaaaggaaagaatgtttccaaagcctccatatgtaacaataaaattctccttatgatcagggaaacttttaggacagaagaaaatgaaaatagggaaaagttggagcacatggaaaatctaaaagtcatttaaattgtgtttgtttaattatagataaatgcatcatgctgcctttcaaagtaagttagtagaggacagagattaggtcaaataaacaaattctgtagaagatctgatattccatagggataataaatactgagtggcattaaaagtcaagggaagtaaagataaaagaatcctaatgagatgtatcttactttcagattttcttatt

SEQ ID NO: 690261 - DNA, 652 bp, Homo sapiens
tttcaaaaaaaaaaaaagaagatgttaagtctttgtaattcatctttacttattttaaataagcctttcactttgtcttgtcattcctagtagtctagaaacaggtctctaactgctgacctaaagctttatgggatatcatctctcaactaccactttttaatgctttgcctaatattagcaaaactgataactgagtgacctttaaatgcttaaacatcataaaaagcaaatataaatctttgttaaacccatgtctgggtttctgtaagtcgaaattttgcattttacataatatttcatttcctagccagaagatgattaattctgacttgtctgagctaactttgtgttattagttctatatattagttcactgtaataaagtgaagtaaattttttaatcaaataaaaagatgtttcacataatcagtatgttatatttatgggactattgcagaattacttctctctccttccagattcagtgctcaagagtgaagaaaattctactgtctttagccacttaatgaagtacccgtgtaatacttttggaaaacctcatacagaagtcaagatcaacagraaaactgcatttggaactacaactcttgtcttgactgattttagcaataaatccagtactttggaa

SEQ ID NO: 690262 - DNA, 1474 bp, Homo sapiens
attatttattatcttttgttgactttggcaccaaaaacttctttaaaatttaaaaaagtgtatgaagtatcttacaaaacctgaagagaatacaggcaggcttcaaggagaactaaagcaagcaaagactaaaagctgttaggattcctcttcatttcttcactctgctcctcactgaaatcttctatagtcttcctctttgcagggagaccttcctttgctttgctggtgctcacatcgggaatcattcccatagacagctctcatatgagatctcttaatgctarcaggatctccttgggtcctacgtctttaaattcatcagaaaaattgacgaacccagcttggatactgatggatctagcttgggacaggtgtccatttctgaatcaactgtatcaaaggcacaggatctgagaaaacgacagagacctgttcaggttaagcctgaacaggttaatgcccacccttggaccaggcaactgtggttggcaggtagacttctattatgcagagtgaattgtcttgggtaaccttttgggttggtagaaggagcttgagatagaaataaggatctgataaaagtttcctaaactaattaattatgaggaatcctgaaaagcaaatgaaaccctaaaaatgtcttttctttatgtaatatgggcctatgtcctggtttaaaaaaaaaaaaaatcagtatcaattgttgtcgcagtatagatgtttactgtgcctcaaatattttcatgatactgatacattttttatagtttaagatcaaaggtacttagtaataaacccacgcacgatgtgttggtttattggggctcaattataatatctatttaataaaacaaaataaataaaaatttaaaaaaacattttatgcacttttttcctaaaaatgaattgatttataagtcagagccatacttatttgatctaaggttcttgctggggctactcctgcatttgaattgggtcttaacctttgagattttttatgtggatgtggtttcattatagaaagtgatttagaatccactttatgagccatgcagctgaaaagattttagatatgatggcttctgggcatgacagttgtacacctttcactggggttgcacttccataagttaaattatggagtacttacaggcacacatttttcctgtcaagaactatggggcatgtaaaatgcatttatgattgatagtagggcacacagagtttaaaacccacatttttaaagttagactggttaaccttgtacaatactataacatggtgctccgcaattagaagcacagagcagtagcattcgctgccaaaagagccatatttatgaactcaacaaagctatgaggagaaggatttgaaaggcggatcacagtatttcatcttgagaatcatttttgatcttcatcatcagaggtcttacagaactactttttttaaaaactggacatgctaa

SEQ ID NO: 690263 - DNA, 1474 bp, Homo sapiens
attatttattatcttttgttgactttggcaccaaaaacttctttaaaatttaaaaaagtgtatgaagtatcttacaaaacctgaagagaatacaggcaggcttcaaggagaactaaagcaagcaaagactaaaagctgttaggattcctcttcatttcttcactctgctcctcactgaaatcttctatagtcttcctctttgcagggagaccttcctttgctttgctggtgctcacatcgggaatcattcccatagacagctctcatatgagatctcttaatgctagcaggatctccttgggtcctacgtctttaaattcatcagaaaaattgacgaacccagcttggatactgatggatctagcttgggacaggtgtccatttctgaatcaactgtatcaaaggcacaggatctgagaaaacgacagagacctgttcaggttaagcctgaacaggttaatgcccacccttggaccaggcaactgtggttggcaggtagacttctattatgcagagtgaattgtcttgggtaaccttttgggttggtagaaggagcttgagatagaaataaggatctgataaaagtttcctaaactaattaattatgaggaatcctgaaaagcaaatgaaaccctaaaaatgtcttttctttatgtaatatgggcctatgtcctggtttaaaaaaaaaaaaaatcagtatcaattgttgtcgcagtatagatgtttactgtgcctcaaatattttcatgatactgatacattttttatagtttaagatcaaaggtacttagtaataaacccacgcacgatgtgttggtttattggggctcaattataatatctatttaataaaacaaaataaataaaaatttaaaaaaacattttatgcacttttttcctaaaaatgaattgatttataagtcagagccatacttatttgatctaaggttcttgctggggctactcctgcatttgaattgggtcttaacctttgagattttttatgtggatgtggtttcattatagaaagtgatttagaatccactttatgagccatgcagctgaaaagattttagatatgatggcttctgggcatgacagttgtacacctttcactggggttgcacttccrtaagttaaattatggagtacttacaggcacacatttttcctgtcaagaactatggggcatgtaaaatgcatttatgattgatagtagggcacacagagtttaaaacccacatttttaaagttagactggttaaccttgtacaatactataacatggtgctccgcaattagaagcacagagcagtagcattcgctgccaaaagagccatatttatgaactcaacaaagctatgaggagaaggatttgaaaggcggatcacagtatttcatcttgagaatcatttttgatcttcatcatcagaggtcttacagaactactttttttaaaaactggacatgctaa

SEQ ID NO: 690264 - DNA, 1474 bp, Homo sapiens
attatttattatcttttgttgactttggcaccaaaaacttctttaaaatttaaaaaagtgtatgaagtatcttacaaaacctgaagagaatacaggcaggcttcaaggagaactaaagcaagcaaagactaaaagctgttaggattcctcttcatttcttcactctgctcctcactgaaatcttctatagtcttcctctttgcagggagaccttcctttgctttgctggtgctcacatcgggaatcattcccatagacagctctcatatgagatctcttaatgctagcaggatctccttgggtcctacgtctttaaattcatcagaaaaattgacgaacccagcttggatactgatggatctagcttgggacaggtgtccatttctgaatcaactgtatcaaaggcacaggatctgagaaaacgacagagacctgttcaggttaagcctgaacaggttaatgcccacccttggaccaggcaactgtggttggcaggtagacttctattatgcagagtgaattgtcttgggtaaccttttgggttggtagaaggagcttgagatagaaataaggatctgataaaagtttcctaaactaattaattatgaggaatcctgaaaagcaaatgaaaccctaaaaatgtcttttctttatgtaatatgggcctatgtcctggtttaaaaaaaaaaaaaatcagtatcaattgttgtcgcagtatagatgtttactgtgcctcaaatattttcatgatactgatacattttttatagtttaagatcaaaggtacttagtaataaacccacgcacgatgtgttggtttattggggctcaattataatatctatttaataaaacaaaataaataaaaatttaaaaaaacattttatgcacttttttcctaaaaatgaattgatttataagtcagagccatacttatttgatctaaggttcttgctggggctactcctgcatttgaattgggtcttaacctttgagattttttatgtggatgtggtttcattatagaaagtgatttagaatccactttatgagccatgcagctgaaaagattttagatatgatggcttctgggcatgacagttgtacacctttcactggggttgcacttccataagttaaattatggagtacttacaggcacacatttttcctgtcaagaactatggggcatgtaaaatgcatttatgattgatagtagggcacacagagtttaaaacccacatttttaaagttagactggttaaccttgtacaatactataacatggtgctccrcaattagaagcacagagcagtagcattcgctgccaaaagagccatatttatgaactcaacaaagctatgaggagaaggatttgaaaggcggatcacagtatttcatcttgagaatcatttttgatcttcatcatcagaggtcttacagaactactttttttaaaaactggacatgctaa

SEQ ID NO: 690265 - DNA, 686 bp, Homo sapiens
tgatgcgaatttgctaaggctacctacattacttgaagatctccaaaagaaacagcaagtgtcacttagactatcatggaagaagaggcagaattaaaaactttggctgaacctgcaaatgtatggaataagaaacacaaggattaacttcttagcataagaatccagtacttttaaagataaaccctagaagtttggcttaatcaaatgtcactttgacaacagcagtgataatccggttgcccagatgtcttaccaagcttcrtctgtaagaggaaaagatagagagcatcaatgaaatgaagtgtgaaaaggggaatttacctcttttctttttaattcctgagaatcttcaatttcattaatacattcattttggagaataggggctgtgggaatttaaacactgtcagtcaagatgatcattatctgtgtctcagatatatgatgccttagatttttttaagcctagacttatcataaaaccactagaaagtgaccaagagatattgacagtaaattaaaaactgtctttatatagtaaaaggaagacaattgttttaaaatcatgtcctttaactcacctgtggtgttacagagattaatgttatgttacagctgcttttgtatccaaaatgaatgtttctatttagacaactggggacagcagcattttgtatgtgtgt

SEQ ID NO: 690266 - DNA, 686 bp, Homo sapiens
tgatgcgaatttgctaaggctacctacattacttgaagatctccaaaagaaacagcaagtgtcacttagactatcatggaagaagaggcagaattaaaaactttggctgaacctgcaaatgtatggaataagaaacacaaggattaacttcttagcataagaatccagtacttttaaagataaaccctagaagtttggcttaatcaaatgtcactttgacaacagcagtgataatccggttgcccagatgtcttaccaagcttcgtctgtaagaggaaaagatagagagcatcaatgaaatgaagtgtgaaaaggggaatttacctcttttctttttaattcctgagaatcttcaatttcattaatacattcattttggagaataggggctgtgggaatttaaacactgtcagtcaagatgatcattatctgtgtctcagatatatgatgccttagatttttttaagcctagacttatcataaaaccactagaaagtgamcaagagatattgacagtaaattaaaaactgtctttatatagtaaaaggaagacaattgttttaaaatcatgtcctttaactcacctgtggtgttacagagattaatgttatgttacagctgcttttgtatccaaaatgaatgtttctatttagacaactggggacagcagcattttgtatgtgtgt

SEQ ID NO: 690267 - DNA, 589 bp, Homo sapiens
agaaaaaaataaagcataaaactaagatacctaaagtgttcatatgaattgagattaaaaactggattatagatagatgtagtgagcatattatccctattttacagatgaagaaactgatgctgaagaaaattaataacctgtccaaggtcacttacctataaagcaattcttcaaagactagaacccaaggctctctcactcacaagcctattctctgaatcgcaatgtcatactgcctcctggtgttctctccacaaaggataagtatgtgtttaagtcaaatattatacacctaaaagagcatgtccttattacttttaataactaagaatagaattttaattataaaatactttcacgcatataaaaacttcacagcaattaaaaaacaatgatccacatgatgaagtatgaggatttgctaattacmtaattaattgtattgatttaaaaatccaaatcacttaactatttagatctcacagtttggcagtttctattgaccaaaatagttggaagactgccaaattctcactcccttttgaaacccagcaagagattttgagggttgcttttcagtttgttt

SEQ ID NO: 690268 - DNA, 701 bp, Homo sapiens
ataaacatactccattccctagtaaaaagactataaggaatacaggaaaacttacttagggtcctggtggctttgggagtgagtggaggtgggctcaagggtgttgactgaggaggtgaagaaccgtgaaatggtgatagccgattatccatcaactggagactctttggcctttgtgcttttctggttgggctctaggaccagagagaaaaagcaaaacattttcacggtgaggaaggctgagctcaacaatgctctcaacagccttgtcttctgagaagacacttggaaaaggacttaactgaaggagcgatttttaagcattgtcatatgatgggcaacaccgaacaggcactgactagaaccactgaaccacagattattttctgaatggccacagacttgattcttctgatcacagttgggctgtgtcatttatgttggaaataagccaccctgattctcaggaaaaggtggtcttgccacatttaacaacttgatatggaaggaaaagtaccttttaaaaaaattaaagaagagaaatgacaatgtttggattgactcaggggacagagtggcaagaacracagctctaagcatcaacccacatgtttacattgtgggtacaagatcttcaccaatgttgatttatagactcgaacttctcatgaggtatgtgctttccttaccacaatctgcga

SEQ ID NO: 690269 - DNA, 591 bp, Homo sapiens
atggggtggatgacagggcaggaaaaagaccaacctggctggagacagaactgctttggttatatgtcctttatgggtcctaaggtattttttacatacacagcagaccttgaaatattttttcctttaaattgttactttgcagttataattagaagtgctaatacttttgttgaagttcaaaaattcaaacactgggcaaaatgccaccactctgcacctcctccttgcctccatctgctgtgttctctagggccaggctggccaggaaaataccagcatttgactcccacsagataaacaatgtcagctgtggacagtatacaccccataaccatactgaagaccacagtgggggtggccctagtgactctaagactactcaattgctctattggtgaaaaaggacccctgtttttctctattactaaatgacaccactgacttcaggtttcgttcctgaaatactcacagtttttccagaagaaccttgtattgttcgtctcctctgcccccttctacctcctggtccagctttgtgatcagctcattctcaaactgaaagtagaggcagaatttcacaggataatg

SEQ ID NO: 690270 - DNA, 591 bp, Homo sapiens
atggggtggatgacagggcaggaaaaagaccaacctggctggagacagaactgctttggttatatgtcctttatgggtcctaaggtattttttacatacacagcagaccttgaaatattttttcctttaaattgttactttgcagttataattagaagtgctaatacttttgttgaagttcaaaaattcaaacactgggcaaaatgccaccactctgcacctcctccttgcctccatctgctgtgttctctagggccaggctggccaggaaaataccagcatttgactcccacgagataaacaatgtcagctgtggacagtatacaccccataaccatactgaagaccacagtgggggtggccctagtgactctaagactactcaattgctctatyggtgaaaaaggacccctgtttttctctattactaaatgacaccactgacttcaggtttcgttcctgaaatactcacagtttttccagaagaaccttgtattgttcgtctcctctgcccccttctacctcctggtccagctttgtgatcagctcattctcaaactgaaagtagaggcagaatttcacaggataatg

SEQ ID NO: 690271 - DNA, 591 bp, Homo sapiens
atggggtggatgacagggcaggaaaaagaccaacctggctggagacagaactgctttggttatatgtcctttatgggtcctaaggtattttttacatacacagcagaccttgaaatattttttcctttaaattgttactttgcagttataattagaagtgctaatacttttgttgaagttcaaaaattcaaacactgggcaaaatgccaccactctgcacctcctccttgcctccatctgctgtgttctctagggccaggctggccaggaaaataccagcatttgactcccacgagataaacaatgtcagctgtggacagtatacaccccataaccatactgaagaccacagtgggggtggccctagtgactctaagactactcaattgctctattggtgmaaaaggacccctgtttttctctattactaaatgacaccactgacttcaggtttcgttcctgaaatactcacagtttttccagaagaaccttgtattgttcgtctcctctgcccccttctacctcctggtccagctttgtgatcagctcattctcaaactgaaagtagaggcagaatttcacaggataatg

SEQ ID NO: 690272 - DNA, 591 bp, Homo sapiens
atggggtggatgacagggcaggaaaaagaccaacctggctggagacagaactgctttggttatatgtcctttatgggtcctaaggtattttttacatacacagcagaccttgaaatattttttcctttaaattgttactttgcagttataattagaagtgctaatacttttgttgaagttcaaaaattcaaacactgggcaaaatgccaccactctgcacctcctccttgcctccatctgctgtgttctctagggccaggctggccaggaaaataccagcatttgactcccacgagataaacaatgtcagctgtggacagtatacaccccataaccatactgaagaccacagtgggggtggccctagtgactctaagactactcaattgctctattggtgaaamaggacccctgtttttctctattactaaatgacaccactgacttcaggtttcgttcctgaaatactcacagtttttccagaagaaccttgtattgttcgtctcctctgcccccttctacctcctggtccagctttgtgatcagctcattctcaaactgaaagtagaggcagaatttcacaggataatg

SEQ ID NO: 690273 - DNA, 953 bp, Homo sapiens
cctcctggattcacgccattctcctgcctcagcttcccgagtagctgggactacaggcacctgccaccacgcctggctaattttttgtatttttagtagagacagggtttcaccatgtgttggccaggctggtctcgaactcctgacctcaagtgatctacccacctcagcctcccaaagtgctgggattacaggtgtgagcccggcctgtcttttgtatttctatggcttctctggatgttttaaaggtttaattctaaacctagaattggaaacgtatcctggctgcattccctaagagttctgctttacttagaccttggcaaattgagagcgtggcccacaggaacctcttttataatatgttgagtttccaccagggatatatatccgaacggaatggcataatctttggatgcctcttgaaggggaaatgtggaccctgtatgccagagtggtagcccgatgctgtaccttggatgacgtttgttttacaattggattgttgaccatagagtttggtcttcacagaaaagattgtattattcttcccaaataactgcttctggttttctgtatctacttacccttattagcttgtaagtgtttgaagggagggattatgtctgatactttctttgtaattccagagttctaagtagttttttactgagtcaacagccaactgattgaggtcttctcatttgaaagataatggaacccaaatgtattcccacacattctgatgatgtttattaacagattagaataartaaatataccaagtcatgtaaaggatgtacatttttttttaccaagttaaagtaaatgataaatgaaagctcttttagtatttacaaatattttaaaatttattctcctataagacagatttctgaattatacttttgacttttttgtactttttaaacttttattcatttctatcattt

SEQ ID NO: 690274 - DNA, 953 bp, Homo sapiens
cctcctggattcacgccattctcctgcctcagcttcccgagtagctgggactacaggcacctgccaccacgcctggctaattttttgtatttttagtagagacagggtttcaccatgtgttggccaggctggtctcgaactcctgacctcaagtgatctacccacctcagcctcccaaagtgctgggattacaggtgtgagcccggcctgtcttttgtatttctatggcttctctggatgttttaaaggtttaattctaaacctagaattggaaacgtatcctggctgcattccctaagagttctgctttacttagaccttggcaaattgagagcgtggcccacaggaacctcttttataatatgttgagtttccaccagggatatatatccgaacggaatggcataatctttggatgcctcttgaaggggaaatgtggaccctgtatgccagagtggtagcccgatgctgtaccttggatgacgtttgttttacaattggattgttgaccatagagtttggtcttcacagaaaagattgtattattcttcccaaataactgcttctggttttctgtatctacttacccttattagcttgtaagtgtttgaagggagggattatgtctgatactttctttgtaattccagagttctaagtagttttttactgagtcaacagccaactgattgaggtcttctcatttgaaagataatggaacccaaatgtattcccacacattctgatgatgtttattaacagattagaataagtaaayataccaagtcatgtaaaggatgtacatttttttttaccaagttaaagtaaatgataaatgaaagctcttttagtatttacaaatattttaaaatttattctcctataagacagatttctgaattatacttttgacttttttgtactttttaaacttttattcatttctatcattt

SEQ ID NO: 690275 - DNA, 596 bp, Homo sapiens
cctaatgtctagaaacagataaaaagaaagctattaaggagtagggggctgctctctttgctcttttatgcctggatggtaaaggggttccttggagcccagtttacaracaagtgatatggatgatcacatagaaagcatttcagaatgatagactattgacttcattttagtagtacagacaaaaataaaaagttcataaaaatattcttaaatatcaaaatcacaaacagctggctgagtttagagccccttggaaatctgtggatttgagaaagacttaattttggtcctttgttgtaatgatatgttttctcttggaaatgatggtatctggctgacatttatctcagtctttcattatccagatgagtatatatgtccatctggacatgtgtgttgtaaggtcatgttaataattcttcatcactcctcattattcccctagggacattccaattttggaatgattaagcaggtcttatatttagtctcttccctggaagtgagcatgggataagcaaaattttcaaattgaagtaatctatatatgtgctctgttaggtgggggcacactatagcaaaactttgcaatt

SEQ ID NO: 690276 - DNA, 981 bp, Homo sapiens
gggactggccaggtataaggctaagtggtgggcatctgtcccctgtgtcatccacacatacactggctgtgactatggttttgataatggatgaagcttttcaagcctgtctccttctctctgaatgagtgctcatccagtacctgtagtgatcaaaaaaggcttcgttgcagcagtgctccaccagtttgacagacaagcttatacatgtttatattccataatagtcattgtttgggcttaagctgcaatttaccagccttatcccaccacttttcattttgtctttactggacttcaaattaagaagcacatcatttttgatacatactcaatactggtcagaatgtttgagataaaatcttatcttggaacatgtacatatctttaaacatttcaaaaaggaaattctgcaagtgttcaagtcacattaacaataaatactaagaaagacaacaggccatttattcaatattaaccgcatttaaatgtgagaaaaatcaaagattgttaaaggaaacacactacttgtcagaaatggtatgtgttaataattctgagagaaaaattctaattcatctacaacttcaaagggtaacatttcccaggggaacttaaattaatcatagaaaaggaaratgcaatggcattacatgcattttttaggctcttgatattttccttctacctatttaaatgaatttccaaaatgatggactctctctggagtaaacctccagaacaatccgagatgaggctttctgattgtccatatttcatacttagggcagttcagatgcctctgtgataagagaggcttgcagctgacacaaagtttctgatagagaaactgaatttattaaaatacaatatctatcgatgtgctaacacgtaagatgtcttcagggcttcagttaaggtcgatgatttctagtctacataaatttccctggaactgactgtaaactagttaaatggctg

SEQ ID NO: 690277 - DNA, 1622 bp, Homo sapiens
gatagagaaagatacacaaccaacattttttttatgtgagattttctactttaatttttttcacatggaaagtgcacataccggacatactagtttattccgcctctactgttatagttcctctagtaaatgattgattatagaacagctaacagcaaactggtatttttcttttgtcttttactacctattttatttttcgaagtttacttttgattctctctaagaatagtgtttctcttccatttccaagaactatgtagatgtaatgtgaaaatcaggacaatttaaaacgtctcttccttccttctctgctttgagctcttttttttttctttttttaaaatctgttttttttctttccttgtaccatttatgtttagccctttcacctccctagtactcattttctcattcccttttcccttggctctctctcagctttgcttgaaggtttttagtgggttccttgccattcatacccaattatcttagtgatagcagcactcccaggaattgaagtctcataagtggttgggatggaattgacaccacagccccacaaacaactctataactgtatggattttagtggtttctgtacaaacgttcagcaactgggcagaagctggtcatcatacaatgttgttaaagaaaaagaaagatacatgagaaggaaggtcatgttatttaaatctagattggttcattgccctctcactgatagaggggttaagcaacaaggtaaagataaataaatatctagggaaacgtgattatatacagaaaacattctgaatatgaaaggaaatagtttgtaatgtgaaaacacaatgggccacagacttaggaaagctagttgagaaaaaaatctctatttgtaaaggatctaatggatctcagaggaaaacctggcagagactggggcgtcagaattagtggctctttttcccagagttaaggctagttcaggataaaagtctacaagagaaaagtttgctctctataataccatttcatcaataacattgtgttacagcctagatcccccaggtatcacattatagcaagaatacaatatagaaaaggttaaaggattaaamtagacgtcctttctcccttccttctgcaaaattcatggaatcatatggacctggaaatcattgatttcaacctcaccctcaaagcaggaaacccttagacaatatttttaacaggtggtcatccagtttctgcttcattacttcccgtgccagagaagtgagtcactgccttgcaaagcagtaattctacatttaacatccttttaaagacaaatactatcccataaagagctgacagtcatgcatcactcgctaggtaccaggtgaaggcctcagtgctttactgggtgtgttattttggaagttcccagatgaccccctgcaacaggcttgtggcttagagtggttaggtagccagacttgcagaagggacagagtctggatttgggcccagtctttttgactccagacgaggccttcacatcacgctgaatcacacttgcctccctgtagcttccacacgttcactctggtctggatcccagaggacaaagcaaaactcccgttcttccacttcaa

SEQ ID NO: 690278 - DNA, 1622 bp, Homo sapiens
gatagagaaagatacacaaccaacattttttttatgtgagattttctactttaatttttttcacatggaaagtgcacataccggacatactagtttattccgcctctactgttatagttcctctagtaaatgattgattatagaacagctaacagcaaactggtatttttcttttgtcttttactacctattttatttttcgaagtttacttttgattctctctaagaatagtgtttctcttccatttccaagaactatgtagatgtaatgtgaaaatcaggacaatttaaaacgtctcttccttccttctctgctttgagctcttttttttttctttttttaaaatctgttttttttctttccttgtaccatttatgtttagccctttcacctccctagtactcattttctcattcccttttcccttggctctctctcagctttgcttgaaggtttttagtgggttccttgccattcatacccaattatcttagtgatagcagcactcccaggaattgaagtctcataagtggttgggatggaattgacaccacagccccacaaacaactctataactgtatggattttagtggtttctgtacaaacgttcagcaactgggcagaagctggtcatcatacaatgttgttaaagaaaaagaaagatacatgagaaggaaggtcatgttatttaaatctagattggttcattgccctctcactgatagaggggttaagcaacaaggtaaagataaataaatatctagggaaacgtgattatatacagaaaacattctgaatatgaaaggaaatagtttgtaatgtgaaaacacaatgggccacagacttaggaaagctagttgagaaaaaaatctctatttgtaaaggatctaatggatctcagaggaaaacctggcagagactggggcgtcagaattagtggctctttttcccagagttaaggctagttcaggataaaagtctacaagagaaaagtttgctctctataataccatttcatcaataacattgtgttacagcctagatcccccaggtatcacattatagcaagaatacaatatagaaaaggttaaaggattaaactagacgtcctttctcccttccttctgcaaaattcatggaatcatatggacctggaaatcattgatttcaacctcaccctcaaagcaggaaacccttagacaatatttttaacaggtggtcatccagtttctgcttcattacttcccgtgccagagaagtgagtcactgccttgcaaagcagtaattctacatttaacatccttttaaagacaaatactatcccataaagagctgacagtcatgcatcactcgctaggtaccaggtgaaggcctcagtgctttactsggtgtgttattttggaagttcccagatgaccccctgcaacaggcttgtggcttagagtggttaggtagccagacttgcagaagggacagagtctggatttgggcccagtctttttgactccagacgaggccttcacatcacgctgaatcacacttgcctccctgtagcttccacacgttcactctggtctggatcccagaggacaaagcaaaactcccgttcttccacttcaa

SEQ ID NO: 690279 - DNA, 1622 bp, Homo sapiens
gatagagaaagatacacaaccaacattttttttatgtgagattttctactttaatttttttcacatggaaagtgcacataccggacatactagtttattccgcctctactgttatagttcctctagtaaatgattgattatagaacagctaacagcaaactggtatttttcttttgtcttttactacctattttatttttcgaagtttacttttgattctctctaagaatagtgtttctcttccatttccaagaactatgtagatgtaatgtgaaaatcaggacaatttaaaacgtctcttccttccttctctgctttgagctcttttttttttctttttttaaaatctgttttttttctttccttgtaccatttatgtttagccctttcacctccctagtactcattttctcattcccttttcccttggctctctctcagctttgcttgaaggtttttagtgggttccttgccattcatacccaattatcttagtgatagcagcactcccaggaattgaagtctcataagtggttgggatggaattgacaccacagccccacaaacaactctataactgtatggattttagtggtttctgtacaaacgttcagcaactgggcagaagctggtcatcatacaatgttgttaaagaaaaagaaagatacatgagaaggaaggtcatgttatttaaatctagattggttcattgccctctcactgatagaggggttaagcaacaaggtaaagataaataaatatctagggaaacgtgattatatacagaaaacattctgaatatgaaaggaaatagtttgtaatgtgaaaacacaatgggccacagacttaggaaagctagttgagaaaaaaatctctatttgtaaaggatctaatggatctcagaggaaaacctggcagagactggggcgtcagaattagtggctctttttcccagagttaaggctagttcaggataaaagtctacaagagaaaagtttgctctctataataccatttcatcaataacattgtgttacagcctagatcccccaggtatcacattatagcaagaatacaatatagaaaaggttaaaggattaaactagacgtcctttctcccttccttctgcaaaattcatggaatcatatggacctggaaatcattgatttcaacctcaccctcaaagcaggaaacccttagacaatatttttaacaggtggtcatccagtttctgcttcattacttcccgtgccagagaagtgagtcactgccttgcaaagcagtaattctacatttaacatccttttaaagacaaatactatcccataaagagctgacagtcatgcatcactcgctaggtaccaggtgaaggcctcagtgctttactgggtgtgttattttggaagttcccagatgaccccctgcaacaggcttgtggcttagagtggttaggtagccagacttgcagaagggacrgagtctggatttgggcccagtctttttgactccagacgaggccttcacatcacgctgaatcacacttgcctccctgtagcttccacacgttcactctggtctggatcccagaggacaaagcaaaactcccgttcttccacttcaa

SEQ ID NO: 690280 - DNA, 1622 bp, Homo sapiens
gatagagaaagatacacaaccaacattttttttatgtgagattttctactttaatttttttcacatggaaagtgcacataccggacatactagtttattccgcctctactgttatagttcctctagtaaatgattgattatagaacagctaacagcaaactggtatttttcttttgtcttttactacctattttatttttcgaagtttacttttgattctctctaagaatagtgtttctcttccatttccaagaactatgtagatgtaatgtgaaaatcaggacaatttaaaacgtctcttccttccttctctgctttgagctcttttttttttctttttttaaaatctgttttttttctttccttgtaccatttatgtttagccctttcacctccctagtactcattttctcattcccttttcccttggctctctctcagctttgcttgaaggtttttagtgggttccttgccattcatacccaattatcttagtgatagcagcactcccaggaattgaagtctcataagtggttgggatggaattgacaccacagccccacaaacaactctataactgtatggattttagtggtttctgtacaaacgttcagcaactgggcagaagctggtcatcatacaatgttgttaaagaaaaagaaagatacatgagaaggaaggtcatgttatttaaatctagattggttcattgccctctcactgatagaggggttaagcaacaaggtaaagataaataaatatctagggaaacgtgattatatacagaaaacattctgaatatgaaaggaaatagtttgtaatgtgaaaacacaatgggccacagacttaggaaagctagttgagaaaaaaatctctatttgtaaaggatctaatggatctcagaggaaaacctggcagagactggggcgtcagaattagtggctctttttcccagagttaaggctagttcaggataaaagtctacaagagaaaagtttgctctctataataccatttcatcaataacattgtgttacagcctagatcccccaggtatcacattatagcaagaatacaatatagaaaaggttaaaggattaaactagacgtcctttctcccttccttctgcaaaattcatggaatcatatggacctggaaatcattgatttcaacctcaccctcaaagcaggaaacccttagacaatatttttaacaggtggtcatccagtttctgcttcattacttcccgtgccagagaagtgagtcactgccttgcaaagcagtaattctacatttaacatccttttaaagacaaatactatcccataaagagctgacagtcatgcatcactcgctaggtaccaggtgaaggcctcagtgctttactgggtgtgttattttggaagttcccagatgaccccctgcaacaggcttgtggcttagagtggttaggtagccagacttgcagaagggacagagtctggatttgggcccagtctttttgactccagacgaggccttcacatcacgctgaatcacacttgcctccctgtagcttccacaygttcactctggtctggatcccagaggacaaagcaaaactcccgttcttccacttcaa

SEQ ID NO: 690281 - DNA, 585 bp, Homo sapiens
atcaattccatgtttagcatcaggccatatcttgccaaatatgatagactggcaaataggatatttggccaaaatggctgtggtaaaaatttgtacatgcagaatgactccatataaacagattttggaacagttttagtggtagttcaaggtcaaaaacctttccatacatactatgatactcagctgaacagagctcacaaacaactctctcgtctgttagtgtttttggagggctgatgtgctgcagtttctgtacagttgtcaatatccccttgaacttaacaaattctggctgggaaagaaactagtagattggggtccaatctattgcttttgcaggttacctttaggtttagagttgttgggggaaataacatgaccacatattgtatgaaatcttgaataggcatttctatggtttgagygtttgtcccatccaaaacttatgctgaagttaaattgccgatggaatggtattgggagatggggtttttaagaggtggttaagcactaagagctccacactcatgagtgggcttaatgccttaataaaagggcttttgagagtaggctccttctttt

SEQ ID NO: 690282 - DNA, 1160 bp, Homo sapiens
gacagggaaccagaaactaaaatcttcagtgaataaagaggagtggtggggagacggtgggaacaaaggagacggtgtatccaagtcacacaaacccaaaagggcaaagtttctgcaggaaaagggggacaatggtctggtggtgacagaggaaaggaaggaaaacacccaccttacatggttacttggagtatgggaaataaaacagcctttggtggccatgggagaagtggtttcagaaaaccaccgcatttcagaatggagatgaagagaatgttacaaggggaggctgtgagatggaaacattttatggtggaagagaaggagaacttggtcgaagaggagtaaacagagatgtgtgagagtgagagctctgttgacagtggatgatgggatgctgggacctcttccatggttgaggcaaacggagatttgcacagtgagatttggcttgatggcctcttacaggagtcttggttctggtggtctgggaccacagtcctgcccatgtggcccagggtggcagctcccctgggacaccctgcatgaacgtcttcctgctggatccgtggcctcgcagacctccaacacattctagattttcccctttctgagcttggcccccagtgctcctccatgtaagatgctcttacctgctagtgatacctmacttagtctcatctgtctttaatgcctgacatgaatgtcactctttctgcaacatcctgcaagatcctttcaatcaagagaccactgctcccgcttctgaatttatgtaagtggagtgggatatgcaattcaaaatgggatgttttaagacatttttttccctcttcagaaagctttttttatgtgcatttttgaggcaggaggtatatgctgaagggaggtccctgtagttctaaggacccccaaacctcccttccaggaaggctaaacaggatttgtgttgtattgccaagggtttgggctctaatttttgtctttcttttctttctctttctttctttctttctttctttctttctttctttctttctttcttccttccttttccttccttctttccttctttctttcttttctttctttcttctttctttctttctttctttctttctttctttctttctttctttcttcctttcttctttctttct

SEQ ID NO: 690283 - DNA, 660 bp, Homo sapiens
ggggaagagcactaccacctaaggaaatgagatgtgggatatggtgaagataacacatttttttatagaggttgttgagatatctaggtggttggtttggtttgaagctcaggggaaggtctgaaatggacagctttgggagttgctggcatgaatgagaatcaaagtcctagagaggtaagccttcccagagagtatgtaattatcagtttttcaggaatcaaaacctttgccccatcccacctccagctcaatgaccattgccccttcctcaaagggacgatcatggcttctcccccttgcactgggcctgccgagagggccgctctgctgtggttgagatgttgatcatgcggggggcacggatcaatgtaatgaaccgtggggatgacacccccctgcatctggcagccagtcatggacaccgtgatattgtacagaaggtacgtacaaactccttcgtcatccacatcacatacatgccatgagggtcagtcacaggcactgtaacatacagtagaaagcatgtgtrctcttcccccttttcccatgccctgacaccagtatctcatttggaactgactgtactttctgcctcttctttttgtctggccatggggtccagctattgcagtacaaggcagacatcaatgcagtgaa

SEQ ID NO: 690284 - DNA, 656 bp, Homo sapiens
attttaattttaattttaaatgttttgcatgacaagaataacattgtaaagaaacctgatgattcagctaggaatgcgctccactgaaagaaacagaaaacctaacaaaagtggcttacacaatatggatgttgtttattgtatcattcaacaagaaaatgaaagataagcatctgttggcattggttcagcagcagaaggatggtaggccagatatatctgctatttttatgacctttcccttatggtcacaagatgactgctacagctctgggcatgacatcctagtgtaataaaagcaggaagaaacagagaaggggcagctaagtctgtccttttgtgagaaaggcagatactttactggatgtaaccaaaactgactcaacttagttttcattggcaaaaactagctgatatggctatctcagggagcaattaagtgtgggggcaaaacacaygaccgttgaaattaatttcaacttatcacctgagactggtctcgctgctgcttcatcgtggtactcttatcaagatagacatgctagcagatgtaagtgcctgccacatgtgattcacaatttttcctactgctttcttaatttcatccttagagaatacaattagaaataagctgctactactgctaaccaaagatc

SEQ ID NO: 690285 - DNA, 1499 bp, Homo sapiens
ctttttttaaaaaaagggactttattattcatacttcaagaccattattgaagcaccttcgtttttggaaggactgtggatgattatgaatgacaggcttactgaatatcctcttataattaatgcaataaaacgcttccatctttatccagaggtgagtcataatttgagacaaataatatttgtagagtgatcctctttgtcagataaaaatagtaagcacaatcttgttaagaaagggaggggacgtttcaggtttattaattgtgtgtatccttatagttgagtagaatatcataagttcctctcttaaaatttaaagaccccagaaactgttctctcatgaactcgaagaatgaaccttagtgtgtaaataatggccagggtaatagacaagccaaatggaaaagagagtcatgggagccaaaaagttctaaatagggatgggcttttggctttggacacctcgtgggtgagcatgatgaccacgtgaagggacagtaagagtgatgagcttgaatagtgatcttggagttaagttagtaaagtaagatttatttagtcacacagccagaaatctattactattttccaacacttagcctaaaagagtatggttgttatagtagtctataaatgctagaaatttgaaaaacggagacaaaattagtgaactcagtttgtgaactcaagataaatgctaaatttgacaccatggtaaatactactgttgagtttaaaattgtctcagaatccagcatattaatgaaaacttactgctttctagtcctttattcatatttttatagcttttaaaaattattattctttagattttgaaatgcttaaaactacagacttagaaaataatattcaaatatgtgtgatcaaccatctaaaataaataaatgctaatctttgtcatttttgcatcagctattttaaaataattaaaatattataaatacagttaaaatcacctttgttctgcttctagtccaacttatacctttattaaaatttgatgtgtgtatccatccaatctctgttttcagagattgttttattatatgctttaagtccacataaatgatctcatactgaatgtgtcactstaggattttttcttcaaaattgtatttttgaactttctgtatatatatatttctttaattttaaccgttttatgaattgtaaagtttatgtatttccccatcttaatatattatttccaattttttgattacaagcaatgtaatctaaaaggtacacttttgtatggtttccttctgtatatgtgcaatattttgtctaggatatatacctagaagtggaattgttgttatagagtgtgagctttttcagctttaccagatattgctaaattgctgtctgaagcaaatgtagcagttcacactgctgtctagaattttctcatatccttattagattttgaattgtcagaccctgtgatttttactcttacgatggctgtgata

SEQ ID NO: 690286 - DNA, 674 bp, Homo sapiens
cggccaccacagcaactctttaaacactgaggacacacaatagagccaatgattaactaaaataggcaactgatgcctttctctgaagcttacgtgtagaatacggtaagccccaggataacttcccctgtagctagaataactgatcccaggaagagcccctggaagcccgattcgatccactgaaagtcagttttgggtaaagtcgttagtgcgtcttctgttgttctcagcaaatcttcagacaattttttcaccaggctcagcagagggagaactaagtctaatgtatttarccgggggaatgacaggtttccttttcacagtaagggttcctaggataggagactatccactcgtagcagaagaaaatcctaatgagcaggatccaggttttagggggcccttaattctaacacacagttcaccctgggctgctcaaacgtcttgacttgccccgctatgtgtgtgtgtggctttaggaagccctgcgattttccttctttagctcgaatgtcaagcgctgcaggctttctgagaaatcagtgtcctgacactggggctgagcccttggtaatgacactgtagacacgaggtaattacagctctgttaactcccaagtcaggctaagtggacctctgattattattctgagtataataggagcataact

SEQ ID NO: 690287 - DNA, 631 bp, Homo sapiens
ctctgccacttgacagctggatgctctcaaagcaacctctctgaggctcagtttttctcagaaaaaaagaggaaaaggatgctgactcatgtatgcctgttttattccttcacacatcacaactgctgaagtagcatcaccagcccctgacatccctgaatttgcagtgctttgcaaaaatgcctagcacatagtcaacactcaatagacatttacaggacgaatgaatgagcaacagcatagcactgccattaagagtgtgggctctggagttgctgcagcaattaaagggacaatgccaggtaccacattgttgattttttcttaatggacaagagcaaaccaatggagacttaaaacagatatttgtacacaaatgttcacagcagcatcatttacacaatgatcaaaagggggaaamcacccacgtgtccatcaacagatgaacagataaatgaaaggtgatggagtcatacaatgacgtattcttcagctttaaagaggagtgaggcacctggcacctgccacgacacggctgaacctggaagacattgtgtccagtgaaacgagccagagacaaaaggacaactattgtatgattccttttctatgaggtacctagaatggtcaa

SEQ ID NO: 690288 - DNA, 640 bp, Homo sapiens
ggatggatggatggatgaacaaaccaatgaacctcttctcttccatcatagttttaacttaggacctactaaccctttcctggtcctcccctaaggggaccttctccgggatcacaacagtacactggtcctcccactcattcatttattcattcaacaatgacactgaacacccactctgttgcccaggctggagtgcagcagtacaatctcggctcactgcaacctccacctcctgggttcargtgattctcctgcctcagcctcctgagtagctgggattacaggcacccgccaccacgcctggctaatttttatatttttagtagagacagggtttcgccatgttggccaagctggtctcaaactcctgacctcaggtgatccaaccttttcagcctcccaaagtgctgggatgacaggcgtgagccaccgcgtccagcctaaaattttttaaaatgtgccctttcttgcatgttcatcacatctcaatcaagctggaagaaaaagtgccagcctccaagcctggtactcagcacgtggcctggtttatagtaaatgcccaacaaaagttactatttgccatgattccatgtcttcctttattgagacttttcaagaccctacagagcaggtgtca

SEQ ID NO: 690289 - DNA, 640 bp, Homo sapiens
ggatggatggatggatgaacaaaccaatgaacctcttctcttccatcatagttttaacttaggacctactaaccctttcctggtcctcccctaaggggaccttctccgggatcacaacagtacactggtcctcccactcattcatttattcattcaacaatgacactgaacacccactctgttgcccaggctggagtgcagcagtacaatctcggctcactgcaacctccacctcctgggttcaagtgattctcctgcctcagcctcctgagtagctgggattacaggcacccgccaccacgcctggctaatttttatatttttagtagagacagggtttcrccatgttggccaagctggtctcaaactcctgacctcaggtgatccaaccttttcagcctcccaaagtgctgggatgacaggcgtgagccaccgcgtccagcctaaaattttttaaaatgtgccctttcttgcatgttcatcacatctcaatcaagctggaagaaaaagtgccagcctccaagcctggtactcagcacgtggcctggtttatagtaaatgcccaacaaaagttactatttgccatgattccatgtcttcctttattgagacttttcaagaccctacagagcaggtgtca

SEQ ID NO: 690290 - DNA, 640 bp, Homo sapiens
ggatggatggatggatgaacaaaccaatgaacctcttctcttccatcatagttttaacttaggacctactaaccctttcctggtcctcccctaaggggaccttctccgggatcacaacagtacactggtcctcccactcattcatttattcattcaacaatgacactgaacacccactctgttgcccaggctggagtgcagcagtacaatctcggctcactgcaacctccacctcctgggttcaagtgattctcctgcctcagcctcctgagtagctgggattacaggcacccgccaccacgcctggctaatttttatatttttagtagagacagggtttcgccatgttggccaagctggtctcaaactcctgacctcaggtgatccaaccttttcagcctcccaaagtgctgggatgacaggcgtgagccaccgygtccagcctaaaattttttaaaatgtgccctttcttgcatgttcatcacatctcaatcaagctggaagaaaaagtgccagcctccaagcctggtactcagcacgtggcctggtttatagtaaatgcccaacaaaagttactatttgccatgattccatgtcttcctttattgagacttttcaagaccctacagagcaggtgtca

SEQ ID NO: 690291 - DNA, 656 bp, Homo sapiens
tgactgctccagctaagtgatcaggcacgttgagagtatacggtgtcctcagcacatacacctgtgggaaaacggaccgctcttggctcctgactcccagggtacagcgcccagtaactcatccttcattcagaggtttgctggccttcccggtttcccaaggagcaagacctctgtccgccctttggcccggcctctgctctgwctcctttttttacataagaaccaatccgtgtttcacattgggctaagtggattccttatccctttgttatatatattttttgcaacttggatttccagtttgtttacagagtagtcttaggtagtagcaaaagagccaaagaagagatttgtattgctgagctcaaagccaagcagaggccggcagtggaggctgagcagggactctccaggcttctctgcccataaacacccgggtcccaggccctccttcctttccctttggtgctccctcctccccacgtaccattgcgcgtgcagctggagcagaataccctcatttttaggaatctagtgatgcctcttgcctcagggaaacgtttctttgatggggagtttgagatttcttttccttgtttatgctttatttgtggtaatgaaagagcgaatgactgaacagccatggcaaggca

SEQ ID NO: 690292 - DNA, 656 bp, Homo sapiens
tgactgctccagctaagtgatcaggcacgttgagagtatacggtgtcctcagcacatacacctgtgggaaaacggaccgctcttggctcctgactcccagggtacagcgcccagtaactcatccttcattcagaggtttgctggccttcccggtttcccaaggagcaagacctctgtccgccctttggcccggcctctgctctgtctcctttttttacataagaaccaatcygtgtttcacattgggctaagtggattccttatccctttgttatatatattttttgcaacttggatttccagtttgtttacagagtagtcttaggtagtagcaaaagagccaaagaagagatttgtattgctgagctcaaagccaagcagaggccggcagtggaggctgagcagggactctccaggcttctctgcccataaacacccgggtcccaggccctccttcctttccctttggtgctccctcctccccacgtaccattgcgcgtgcagctggagcagaataccctcatttttaggaatctagtgatgcctcttgcctcagggaaacgtttctttgatggggagtttgagatttcttttccttgtttatgctttatttgtggtaatgaaagagcgaatgactgaacagccatggcaaggca

SEQ ID NO: 690293 - DNA, 1700 bp, Homo sapiens
aaataaataaataaataataaaactggggaagctcaggagtttgagaccagcctggccaatgtggcaaagccccgtctctataaaaatacaaaatattagccaggtatgatggcgtgcacctgtaattccagctacttgggaggctgaggtgggaggatcacctaagcctgggaagttgacgctgcagtgagccatgatcatgccactgcactctagtctgcgcgacagagtgagaccttgtctcaaaaataaataaataaataaataaataaataaataaataaaactggggaagctaaggcttgaacccgggacacctagctgcagtggctgtgtgcttctctgtggtgagcacccaggaaagggagcgacaggccagaagcctggccgcttccgccccagcctgcccacaaaatgtcaccaagaccccaacatgccagggttggaaagtgggacccaggagcagcagcgaggtgtggctgacaggggacagagtccgaatctccaccgcttgagctgtgtgaccctgacttcgtgctgcacttctctgagcctcactcttctcatgggcacactggaaaaccatcaggaccacgactgtctccctggtaagacccgggatgcccattacatgggtaggctctccctgcacacgcacagccccctccccagctgaaaccctggagccagcggccccgtccaggccataccagcttctcctccaccagtgccgcccagttgacctgtggatccacttccttcaccgccagcctgtagatctgcttgtgtttcccgcgcaggttggtcacacgctccttcagctggcggatactgatgggagagaggctcccacttagtggggctggttggcactgcctgcaccccaggaggggccccccacscagaccccggcctcagtgtcctggaaggacacagtgaccatatggccttgggttccagacaatcacagcatcctctcacccctcctcccatgcactttttttttttttttgagacagagtcttgctctgtcacccaggctggagtacagtgacgtcatctcagctcatggcagcctccgcctcccaggttcaagcaattctcctgcctcaacctcccgagtagctgggattacaggcatgtgccacctcgcctgggtaattttgtattttcagtagagacggggtttcaccatgttggtcaggctggtctcgaactcctgacctcaggtgatccgtccgcttcggcctcccgaagtgctgggatcacaggcgtgagccaccgtgcctggccccacccactttccctcaaccttccttcccccatcagtttcctgagggcctactatgtgccagaatgatagaaagttctggaataagcaggaaagatcttgttttctggagtctgccatccagcagggcccacagtgtggtgcatgccatgccaaggacaagtgccaagggtcgtggggcaccgagagagccctgcccttgccggggtggagatagggcatgggacaaggcaggagtcaggggggctgattcatccacgataaaatgaactgggagtcgtgagccaaggaagccagggacagggcaccaggcagcggaagagctcgctcaaaagctcacaggtcaggctggtggctccagaacaagggatatcaactccctaagcctccatttccccaactgcaaaa

SEQ ID NO: 690294 - DNA, 1476 bp, Homo sapiens
ttatgaagtgaactgagaaataccacttagcaacaaagagcaggaactacggaccgtgctccatctgaacaagcctggaagacgttattcaaaggcaaagaagccagacagagcccacatggtgtgggatccattgatgtgaagtgtcccgaacaggcaagtccagagagatrgaaagtcactgtctcttaagtggttgcctggggcagggctgggaagaggcattaacagtaaataggcacaagagatcttgcacgggatgaaaatattctgaaactgattcatgggcgtggttctgccccttgctaaagttactcaaaatcattgacttgtacacttgcagtgggagccttttttaagtgaaatatgtctccatacagttgttttttaaaaagaaaaagcaaaaggaagaaaaacgagaaatacacaggggtgacgtggtgcctggtacgaagtaaagacttggcttcttcttggaggaagaaaatgtgtcaagagtgcctttgcctgactaagtctggaagggctgaagggtgaacaggcctgactccccagggggttggagatgaggctgatgtcccgaaaagccgctggaggccaggcacagtggctcatatctgtaatcttaacactttggggggctgtggcaggaggatggcttgagcccaggagtgcaagaccagcctgggcaatatagtgagaccccatttattaaaaaatatttttaaaaggtagctgggtgtgatggcatgcacctatagtcctagctactcaggacgctggggcaggagaatcatttgagtccaggagttcaaggctgcaatgagctaagattgcaccactgcactccagccttggcgacagagcgagaccctacctcaaaccaaccaatccaaaaagccaatggaaccaggcatcccccaaccctggggtaggctggcccgttaattacaacaaaacatcagcttcttgacttggagtggaatttttaaattttttttgtttttttatttttgagatggagtctcactctgttgcccaggctggagtgcagtggcacgatctcggctcactgcaagctctgcctcccggattcacaccattatcctgcctcagcctcccaagtaactgggactgcaggcgcccaccaccatgcctggataatttttttgtatttttagtagagacggggtttcaccgtgttagccaggatggtctcgatctcctgacctcgtgatccacccgcctcggcctcccaaagttctgggattacaggcgtgagccaccgcgcccggcctgcttggagtagaattttattcactccattatcaccagcttccctgagctgcagatcaaagattaattttgcaaaaggaggaagtccattaatcattgcctaattcgtgaaggtgcccggtgggaatgcaagttctctcaaaacactggctgagagagaaagagaacatctagctgagg

SEQ ID NO: 690295 - DNA, 1380 bp, Homo sapiens
ttaaaagtaagtttacattaggccgggcacagtggctcatgcctgtaatcccagcactttgggaggctgaggcaggcagatcacaagttcaggagatcgagaccatcctggctaacacagtgaaaccttgtctctgctaaaaatacaaaaaaattagccaggtgtggtggcaggcacctgtagtcccagctactcgggaggctgaggcaggagaatcacttgaacccagagyggcagaagttacagtgagccgaaatcatgtcactgactctgtctcaaaaacaaaaaacaaaacaaaaaaaaaaatgtaagtttacattcttaacatgctttcaagaaacaattctttaaaaagtgggagttttcataaatcttatattttgggttgtaccaaaattttaattctgagccattgtttagctcatggatatatgccaatagaatagctggaactgacaatgaggatgcaaaaaagttatattatctaccacaaaagtggtacctgtctaataaaaaatgtatatttgtgagaggcctgtagtttgctagttcaaccattgtggaagacagtgtggcaattcctcaaggatctagaaccagaaataccatttgacccagcaatcccattactgggtatatacccaaaggattacaaatcattctactataaagacacatgcatacctgtgtgtattgcaacactatttacaatagcaaagacttggaaccaacccaaatacccatcaatgatagactggataaagaaaatgtggcatatatacaccatggtatactatgcagccataaaaaagaatgagttcatgtcctttgcagggacatggatgaagctggaagacatcatcctcagcaaactaacacaggaacagaaaaccaaacgccgcatgttctcactcataagtgggagttgaacaacgagaacacatggacacagggaggggaacagcacacactgtggcctgtcaggggttaggaggcaaggggagggatagcattaggacaaatacctaatgcatggggagcttaaaacctagatgatgagttgataggcgcagcaaaccaccacggcatatgtatacttatgtaacaaacctgcacattctgcacatgtatcccgtgacttaaagtaaaataaaattaaaaaaaaaatacctcggcagaggcagtgtgacatatgactgtgttagttcattattatgtatactctagggacatatatatgactatgttagttccttattatctatactctggggacagtgagtttcccctcatcagaaacaaactccagggagtggttcgccagcctttcctacaaaaaaacacacttcagaggaggctttggccatctttgattagcac

SEQ ID NO: 690296 - DNA, 648 bp, Homo sapiens
cgggtgtgagccactgtgcctggcaaaagtaacctcttttttttttttgagacagagtttcactcttgttgcccacgctggaatgcaatgatgcaatctcggctcactgcaacactgcaacctccgcctcccgggttcaagcaattctcttgcctcagcctcccgagtcgctagattacaggcacgcaccaccatgcckggctagttttttgtatttttagtagagacggggtttcaccatgttggtcaggctggtctcgaactcctgacctccagtgatccacccacctcggcctcccaaagtgctgggattacaggcataagtcactgtgccccgccaaaataaccttttttattcaccatttctaatccttgtccacctgagacaagtaacagcatgtcatgaatcctctagaattgttttagggataatgagaaatacataatattgttttttgtgaaatgcatataaaagaatgttttgcacacatggcatcaaatcatcagattttgcaccttgatttttataatttttatgacttcatgtcagtacatatagatccttcccatctttctaaatactacatagtcttccataacgtgcttaactaaaatgtatttgtggtcctcccacacagggtcatgcac

SEQ ID NO: 690297 - DNA, 618 bp, Homo sapiens
tggaatataacatacaatgcaaagtaggcatgcacaatataattttttttttttactttaaggtctaaggtacatatgcagaacgagcagatttgttacataggtatacatgtgccatgttggtttgccacacccatcaactcgccatttacattaggtatttctcctaatgctgtccctcccccaacccccaaccccacaacagaccctggtgtgtgatgttccctgccctgtgtccaagtgttctcactgttcatttcccacttatgagtgagaacatgcagtgtttggttttctgtccttgtgatagtttgctgagaatgatggtttccagtttcatccatgtccctccaaaggacatgaactcatcmttttttatggctgcatagtatcccatggtgtatatgtgccacgttttcttaatccagtctatcactgatggacatttgggttggttccaagtctttgctattgtgaatagtgccacaataaatgtatgtatccatgcgtctttatagtagcatgatttataatcctttgggtatatacccagtaatgggatcactgggtcaaatggcatttctagttctagatccttgaggaatcaccacactgtct

SEQ ID NO: 690298 - DNA, 608 bp, Homo sapiens
agctggagcacccttcttctcctgcccttcaacatcagaactccaggttctctggccttgggactctaggacttacacaggcagcaccccaagttctcaggcctgtggctttagactgaaatttacaccattgactttcctggttctgagaccttcatacatggactgagacatgctatcggcttccctagctctccartgtgcaggtcacctatggtgggacttctcagcctccataaccacataagccaatttccctgagacatctattcccctctcatacatctacctctatgaatatatcctattgtttctctttctttggagatcctgtcaactaacacaaaattcaacccacatgtcaagtggttggcctcagctaggagtagacctagttaagcattgtaaaaagaggcaggcggatcacgaagtcaggagatcgagaccatcctggctaacacagtgaaaccccgtctctactaaaaatacaaaaaattagccaggcatggtggcgggtgcctgtagtcccagctactcaggaggctgaggcaggagagtggcatgaacccgggaggcggaggttgcagtgagccgagatggagccactg

SEQ ID NO: 690299 - DNA, 2097 bp, Homo sapiens
  misc_feature 1616, 1617, 1618, 1619, 1620, 1621, 1622, 1623, 1624, 1625,1626, 1627, 1628, 1629, 1630, 1631, 1632, 1633, 1634, 1635,1636, 1637, 1638, 1639, 1640, 1641, 1642, 1643, 1644, 1645,1646, 1647, 1648, 1649, 1650, 1651, 1652, 1653, 1654: n = A,T,C or G
  misc_feature 1655, 1656, 1657, 1658, 1659, 1660, 1661, 1662, 1663, 1664,1665, 1666, 1667, 1668, 1669, 1670, 1671, 1672, 1673, 1674,1675, 1676, 1677, 1678, 1679, 1680, 1681, 1682, 1683, 1684,1685, 1686, 1687, 1688, 1689, 1690, 1691, 1692, 1693: n = A,T,C or G
  misc_feature 1694, 1695, 1696, 1697, 1698, 1699, 1700, 1701, 1702, 1703,1704, 1705, 1706, 1707, 1708, 1709, 1710, 1711, 1712, 1713,1714, 1715: n = A,T,C or G
ttgagccagtttcttagattcatgtgctccttggaaactttgttcaaacgaagacttctggagagcaccacagcagggccagggaaacgatcagcagaactggtgggaaagatctgggctaatggtcctggcctcaggctaaagactccaatgagacaccccaagtcaggggactacgtcagccagggaggaactgccctctataaactatgaacactttaaaatataaatgtatttataatatttttattatgcaagtaacccatagtagcataaaaaactggtaagataaaagaaaatatataatttctctataattttcactatacatgtaggtaaagatgttgctaatttttgtctatcctctcattgcactataaaatcacaggcagggctatgtcttcatcactatgctaatttcaagacctagcactctccctgcctcataataagcataataataaacacatatagtgagtgaataaatgaatgaatttgaacctaaggcatcaaagctcagctgcatggtgactttccctagcccttgtcctgggaccatggagtgtccttggtgtgtgaacttgagactggtaagcccacagacctgaagtgggatacatatccctctcaatggagcatcctcatatttagaaattggatccatttttgaaacctggtttagaaattggatgcaacaaaaaatgagtgatcgaattttatttttattttagaataagatataattatagaataaatgatacattgatcattctcaagcagttttttcaaaaatgtatcttgggaaccattctgaaaacagagccagaatattttaagaaataacacctctgtgagaatgagtatatcatctcccatagtaactactctgaggggaagcctcatttagatatatgagtttcagcaagtttattgaaaagcatatgtctttatagcaatgctgtacaactgcaatcactttagaaaccctggtcatctcagtgtgggaatatataaagtattatttgtatttgggtgtgcccctcggactgccacattgatttattgtctaaaagaacatcagtagtacatatttaatcaatttgtggttcaccttgcccctgacctacacagtctcaagtgttgatgggactatgaggaacaattttcaggtatctacttttatgaaaacccaacaacaattagcagcaatgagaaataagcttattccttaatttttgtatttgctggcctttagaaatcattatctgagcctaagtttgagttgtggctcttaaaattcttttcttttaatttgagacagagtctcacttcatcacccaggctggagtgcagaggtgtgctgtcggctcactgcatgcaacctcygcctcccgggttcaagcaattctcctgcctcagcctccggagtagcggggattgcaggcacctgccaccatgccagattaattttttgtatttttagtagagacggggttttaccaggttggtcaggctggtcttcaactcctgagctcagatggtccacctgcctcggcctcccaaatttctgggattacaggcaccatgcctgccttaaaattcttttttgaaagaannnnnnnnnnnnnnnnnnnnnnnnnnnnnnnnnnnnnnnnnnnnnnnnnnnnnnnnnnnnnnnnnnnnnnnnnnnnnnnnnnnnnnnnnnnnnnnnnnnnttttagtgaaatatttttgcaacattaaagttttttgttgttgttgttgtccttttcattttaaaagaaggcccaccgggattctccatcagcaaacagccaacccactgcattatacatagcaagttttagtgacagttctagtctcttgggcatgagaaatacagtcttgtttgctcgtttaagtcaacaagctgtgggatttattgtgtgttttgtagtatgcatgcataatgttttgatttttaaaagtctaaaataattgaaactgtcttgtgtcattcaaccctgtaataagtacctatagtttaaaacctcaaaattggttggttttgaaagatgtttgtataatgcataataataagcgcctctggattatttt

SEQ ID NO: 690300 - DNA, 2097 bp, Homo sapiens
  misc_feature 1616, 1617, 1618, 1619, 1620, 1621, 1622, 1623, 1624, 1625,1626, 1627, 1628, 1629, 1630, 1631, 1632, 1633, 1634, 1635,1636, 1637, 1638, 1639, 1640, 1641, 1642, 1643, 1644, 1645,1646, 1647, 1648, 1649, 1650, 1651, 1652, 1653, 1654: n = A,T,C or G
  misc_feature 1655, 1656, 1657, 1658, 1659, 1660, 1661, 1662, 1663, 1664,1665, 1666, 1667, 1668, 1669, 1670, 1671, 1672, 1673, 1674,1675, 1676, 1677, 1678, 1679, 1680, 1681, 1682, 1683, 1684,1685, 1686, 1687, 1688, 1689, 1690, 1691, 1692, 1693: n = A,T,C or G
  misc_feature 1694, 1695, 1696, 1697, 1698, 1699, 1700, 1701, 1702, 1703,1704, 1705, 1706, 1707, 1708, 1709, 1710, 1711, 1712, 1713,1714, 1715: n = A,T,C or G
ttgagccagtttcttagattcatgtgctccttggaaactttgttcaaacgaagacttctggagagcaccacagcagggccagggaaacgatcagcagaactggtgggaaagatctgggctaatggtcctggcctcaggctaaagactccaatgagacaccccaagtcaggggactacgtcagccagggaggaactgccctctataaactatgaacactttaaaatataaatgtatttataatatttttattatgcaagtaacccatagtagcataaaaaactggtaagataaaagaaaatatataatttctctataattttcactatacatgtaggtaaagatgttgctaatttttgtctatcctctcattgcactataaaatcacaggcagggctatgtcttcatcactatgctaatttcaagacctagcactctccctgcctcataataagcataataataaacacatatagtgagtgaataaatgaatgaatttgaacctaaggcatcaaagctcagctgcatggtgactttccctagcccttgtcctgggaccatggagtgtccttggtgtgtgaacttgagactggtaagcccacagacctgaagtgggatacatatccctctcaatggagcatcctcatatttagaaattggatccatttttgaaacctggtttagaaattggatgcaacaaaaaatgagtgatcgaattttatttttattttagaataagatataattatagaataaatgatacattgatcattctcaagcagttttttcaaaaatgtatcttgggaaccattctgaaaacagagccagaatattttaagaaataacacctctgtgagaatgagtatatcatctcccatagtaactactctgaggggaagcctcatttagatatatgagtttcagcaagtttattgaaaagcatatgtctttatagcaatgctgtacaactgcaatcactttagaaaccctggtcatctcagtgtgggaatatataaagtattatttgtatttgggtgtgcccctcggactgccacattgatttattgtctaaaagaacatcagtagtacatatttaatcaatttgtggttcaccttgcccctgacctacacagtctcaagtgttgatgggactatgaggaacaattttcaggtatctacttttatgaaaacccaacaacaattagcagcaatgagaaataagcttattccttaatttttgtatttgctggcctttagaaatcattatctgagcctaagtttgagttgtggctcttaaaattcttttcttttaatttgagacagagtctcacttcatcacccaggctggagtgcagaggtgtgctgtcggctcactgcatgcaacctctgcctcccgggttcaagcaattctcctgcctcagcctccggagtagyggggattgcaggcacctgccaccatgccagattaattttttgtatttttagtagagacggggttttaccaggttggtcaggctggtcttcaactcctgagctcagatggtccacctgcctcggcctcccaaatttctgggattacaggcaccatgcctgccttaaaattcttttttgaaagaannnnnnnnnnnnnnnnnnnnnnnnnnnnnnnnnnnnnnnnnnnnnnnnnnnnnnnnnnnnnnnnnnnnnnnnnnnnnnnnnnnnnnnnnnnnnnnnnnnnttttagtgaaatatttttgcaacattaaagttttttgttgttgttgttgtccttttcattttaaaagaaggcccaccgggattctccatcagcaaacagccaacccactgcattatacatagcaagttttagtgacagttctagtctcttgggcatgagaaatacagtcttgtttgctcgtttaagtcaacaagctgtgggatttattgtgtgttttgtagtatgcatgcataatgttttgatttttaaaagtctaaaataattgaaactgtcttgtgtcattcaaccctgtaataagtacctatagtttaaaacctcaaaattggttggttttgaaagatgtttgtataatgcataataataagcgcctctggattatttt

SEQ ID NO: 690301 - DNA, 2097 bp, Homo sapiens
  misc_feature 1616, 1617, 1618, 1619, 1620, 1621, 1622, 1623, 1624, 1625,1626, 1627, 1628, 1629, 1630, 1631, 1632, 1633, 1634, 1635,1636, 1637, 1638, 1639, 1640, 1641, 1642, 1643, 1644, 1645,1646, 1647, 1648, 1649, 1650, 1651, 1652, 1653, 1654: n = A,T,C or G
  misc_feature 1655, 1656, 1657, 1658, 1659, 1660, 1661, 1662, 1663, 1664,1665, 1666, 1667, 1668, 1669, 1670, 1671, 1672, 1673, 1674,1675, 1676, 1677, 1678, 1679, 1680, 1681, 1682, 1683, 1684,1685, 1686, 1687, 1688, 1689, 1690, 1691, 1692, 1693: n = A,T,C or G
  misc_feature 1694, 1695, 1696, 1697, 1698, 1699, 1700, 1701, 1702, 1703,1704, 1705, 1706, 1707, 1708, 1709, 1710, 1711, 1712, 1713,1714, 1715: n = A,T,C or G
ttgagccagtttcttagattcatgtgctccttggaaactttgttcaaacgaagacttctggagagcaccacagcagggccagggaaacgatcagcagaactggtgggaaagatctgggctaatggtcctggcctcaggctaaagactccaatgagacaccccaagtcaggggactacgtcagccagggaggaactgccctctataaactatgaacactttaaaatataaatgtatttataatatttttattatgcaagtaacccatagtagcataaaaaactggtaagataaaagaaaatatataatttctctataattttcactatacatgtaggtaaagatgttgctaatttttgtctatcctctcattgcactataaaatcacaggcagggctatgtcttcatcactatgctaatttcaagacctagcactctccctgcctcataataagcataataataaacacatatagtgagtgaataaatgaatgaatttgaacctaaggcatcaaagctcagctgcatggtgactttccctagcccttgtcctgggaccatggagtgtccttggtgtgtgaacttgagactggtaagcccacagacctgaagtgggatacatatccctctcaatggagcatcctcatatttagaaattggatccatttttgaaacctggtttagaaattggatgcaacaaaaaatgagtgatcgaattttatttttattttagaataagatataattatagaataaatgatacattgatcattctcaagcagttttttcaaaaatgtatcttgggaaccattctgaaaacagagccagaatattttaagaaataacacctctgtgagaatgagtatatcatctcccatagtaactactctgaggggaagcctcatttagatatatgagtttcagcaagtttattgaaaagcatatgtctttatagcaatgctgtacaactgcaatcactttagaaaccctggtcatctcagtgtgggaatatataaagtattatttgtatttgggtgtgcccctcggactgccacattgatttattgtctaaaagaacatcagtagtacatatttaatcaatttgtggttcaccttgcccctgacctacacagtctcaagtgttgatgggactatgaggaacaattttcaggtatctacttttatgaaaacccaacaacaattagcagcaatgagaaataagcttattccttaatttttgtatttgctggcctttagaaatcattatctgagcctaagtttgagttgtggctcttaaaattcttttcttttaatttgagacagagtctcacttcatcacccaggctggagtgcagaggtgtgctgtcggctcactgcatgcaacctctgcctcccgggttcaagcaattctcctgcctcagcctccggagtagcggggattgcaggcaccygccaccatgccagattaattttttgtatttttagtagagacggggttttaccaggttggtcaggctggtcttcaactcctgagctcagatggtccacctgcctcggcctcccaaatttctgggattacaggcaccatgcctgccttaaaattcttttttgaaagaannnnnnnnnnnnnnnnnnnnnnnnnnnnnnnnnnnnnnnnnnnnnnnnnnnnnnnnnnnnnnnnnnnnnnnnnnnnnnnnnnnnnnnnnnnnnnnnnnnnttttagtgaaatatttttgcaacattaaagttttttgttgttgttgttgtccttttcattttaaaagaaggcccaccgggattctccatcagcaaacagccaacccactgcattatacatagcaagttttagtgacagttctagtctcttgggcatgagaaatacagtcttgtttgctcgtttaagtcaacaagctgtgggatttattgtgtgttttgtagtatgcatgcataatgttttgatttttaaaagtctaaaataattgaaactgtcttgtgtcattcaaccctgtaataagtacctatagtttaaaacctcaaaattggttggttttgaaagatgtttgtataatgcataataataagcgcctctggattatttt

SEQ ID NO: 690302 - DNA, 594 bp, Homo sapiens
catcttgaattgtaatccccaagtgttgagggagatacctggtgggaggtgattggatcatggggtyggtttcccctgtgctgttctcatgatagtgagtgagtgtactcatgagttttgatggctttataaggggctgctcccccttagcttctttcagacactctttctcacctgttgacatgtaagacgtgcctcttccccttctgtcatgattataagtttcctgaggcttccccagccatgcagaactgtgagtcaattaaacctattttctttataaattacccagtctcaggtatgtctttatagcagtgtgaaggttttaattaaggttttaattttggagagagaggttgaagacaaatatctctgctctgtcttatctctttcaatcaattctccacatgttttgcctctagacccagcaaactcaaatgcttggatgagctgctaagtagaaataaaaatgataattctcttttatttcttctttttctatgcagtcataataggtggattttcattaaacacgggaagtaaaaaatgggaaatgcactttccctgaactctctcaatgttctataaaatgtt

SEQ ID NO: 690303 - DNA, 628 bp, Homo sapiens
taattaattatttaagtgagttctgtgtcttctcctctgcatccaaaattgcagatataaaatgtcagagaaactttcttgcaagggaagaataattttccagcttaacagtaagctgttttgatatatactcattgatgaacaagaaaaaagtattaaaagaaggagatgtgaataggtaatagagataatttgttgttagtatgtttcctagctgtgatccaagagtggtaatctaagactctctttctgattagtttaagcagccaattcagggatgatagacaatcagtgttgagagaaaggaaaaaaaaagtctgtctatctatctatctatctatctatctatctatctaatctctctcactctctctcatctctctcatctaccrtatctatcatcaatataatctaacatctatctcatggatctgccagggtcttgtcgagaaaacaaaaactacatttagaatttcaaatacagatgacctaatttatggaattgtgtacaaatatattatagggctcaaagagtatagagagaaagctgtggtatcccataaatttgtaactgtaggaaggaacaactacccttagaaaagagggtatgctacgagaaactgggaga

SEQ ID NO: 690304 - DNA, 542 bp, Homo sapiens
gaggattgcgtgagcccagggggtcaaggctgcagtgagattacagcactgcactccagcctgagtgacatagcaagaccctgtctcaaaaaaaacgtgtatcattcagttcttcttagtatattcagtgttatactaagaaagaaaccctatgcccatcactagtcacccctatcctccctcctcccagccctggcacccactcatctcctttctgtccccgatggattggcccgttctggacttttcacagaaacggaatctacactagaggccttctgcgactagcttgtttcacgcgcatcgtgtcttcagggtccacccacgtcatagcccgtgtcagagcctcatgccttttgatggccaygtgttccatcgtgcggacagggcacgctttgtctcctcattcgtctcttggtggatgtcgggttgtctctgccttctggctgttgtgcgctgggcggtgctgcagtggtgggcacgtgcaggtttctgcatagacatttgctctcatttgcctggtgtgtgcctaggagtggcag

SEQ ID NO: 690305 - DNA, 542 bp, Homo sapiens
gaggattgcgtgagcccagggggtcaaggctgcagtgagattacagcactgcactccagcctgagtgacatagcaagaccctgtctcaaaaaaaacgtgtatcattcagttcttcttagtatattcagtgttatactaagaaagaaaccctatgcccatcactagtcacccctatcctccctcctcccagccctggcacccactcatctcctttctgtccccgatggattggcccgttctggacttttcacagaaacggaatctacactagaggccttctgcgactagcttgtttcacgcgcatcgtgtcttcagggtccacccacgtcatagcccgtgtcagagcctcatgccttttgatggccatgtgttccatcgtgcggacagggcacgctttgtctcctcattcgtctcttggtggatgtcgggttgtctctgccttctggctgttgtgcgctgggcggtgctgcagtggtgggcacgtgcaggtttctgcrtagacatttgctctcatttgcctggtgtgtgcctaggagtggcag

SEQ ID NO: 690306 - DNA, 671 bp, Homo sapiens
gcaaatgacctggatgctgatgaactttgagtcataattatattccaataaaagtttacttcatgataataaatagcactgccacctgtagttcacccaaatctgaagttcccatcaaataattttgaataccaatcaactgctgatttatatttgatttcaggaacttcctgtagaaaagttttaaaaataactgcctagatataaatattaaatgaaccaaatgatgttgtataatccactaatctttctttagaaaaactctgtttttactaatttagatttggtttatttcattgcttttttagactagttgtatatattgctgttcaaaatacataaaaataagtgaaaataagctggtcttggtaggatgtgcctgtgttccagctacttgtgaggatgaggtgaaaaaattgcttsagcttgacagttcaagaccagcatggggaacatagtgagacatcatctgaaaaaaaaattatcaaaaatattttgtggtttaggtatttatatgtaatggtaatgtatgcattctaaatatgctctgtttttttcgtattttaataaaggattcatgaagtcagtagttacttctcagtttttcataaggttatatgaaagtatgtataacagaaatttttcatgtatggcttaataaacattaaggc

SEQ ID NO: 690307 - DNA, 671 bp, Homo sapiens
gcaaatgacctggatgctgatgaactttgagtcataattatattccaataaaagtttacttcatgataataaatagcactgccacctgtagttcacccaaatctgaagttcccatcaaataattttgaataccaatcaactgctgatttatatttgatttcaggaacttcctgtagaaaagttttaaaaataactgcctagatataaatattaaatgaaccaaatgatgttgtataatccactaatctttctttagaaaaactctgtttttactaatttagatttggtttatttcattgcttttttagactagttgtatatattgctgttcaaaatacataaaaataagtgaaaataagctggtcttggtaggatgtgcctgtgttccagctacttgtgaggatgaggtgaaaaaattgcttcagcttgacrgttcaagaccagcatggggaacatagtgagacatcatctgaaaaaaaaattatcaaaaatattttgtggtttaggtatttatatgtaatggtaatgtatgcattctaaatatgctctgtttttttcgtattttaataaaggattcatgaagtcagtagttacttctcagtttttcataaggttatatgaaagtatgtataacagaaatttttcatgtatggcttaataaacattaaggc

SEQ ID NO: 690308 - DNA, 1236 bp, Homo sapiens
gatcctaatccttgttttgctcatttatttctggcatcactttttctccttaaataactgtattttccctctgtttttgcttatcctaatttcagctcactttcaatactcacttcacctgctacatgatcccctgctggatagtttttctaaatacacttgtcttatactctttttgacataaaagtttttatagcaatgtaatatgtatctttctgtagatctagtcacttcaagtatattataagcctttctgaaaggcaaggatcaaacaataaaatcgtagtgctatctgtatttttttttcttttggtattgttatcataagtattaaatacccactttttagacttgtgagagttttttttatggtcatctattccaataattccaagtataaagactgtattttaccacggagagctccaaacttaagctccaaacttaagttatctacccatattatgagccttactagtttaaaccaagcaccttgtttcctttcttttgattaggattacaccacttgaatgcttttatgctatttgtctcatggtaattacaaatactgattattaattagttgtcttttattaatacatgaattattagtctagaaatatgatatagacaaaacattttaaaagataaaactgacaaagatagataaataaaggaatattggttatatgtgacccacacagatactcaggccaaactgggttggggtgagaacacccacaaaagaaactcaaagatagaagtgtccttggaatcaagtttgaggagacatgacaagaatggatatttcccagtggattccatgaacactctagccctgaaacagtgagaaaaccagaaaagacctaagggatatgagagtataatttcaatgagagaggacaagctgtggaatgaattagaaaaagaaactgaagtaggatagttcaggaaattaaatcckagggcacagagaaattctcagagcaattctagaatgtacactgtaaagaatactactcttttttgtaaagaatactactttttttcctccctaataatgaaaaaaatgagatatagaaaaagtaagaaatttgcctgtgtttcaatctcaggtcttggtatttctaaaggttaagcttctaaacactactctatttccttgtgtccctttttttggcaagtaaatgagtaaagattatactgtttgttcaatcaagttattgtccaagaaat

SEQ ID NO: 690309 - DNA, 1157 bp, Homo sapiens
attcgagggttgaaaactcaaaatgtttcagaggcttggtaagttgtacaaataaatgcatgaagtggctgggtgtgaaaatgatggcaatgaagggaaaaataactgttcgaagagcccatccctgcaaaaggtattcacatcgatcaaaagcagatttccacaagcaaagcaggagcaacaacaggaaactactggcctaaccaaaaaaaaggaaaaaaaaaaaaaaaactagcagaacagacatagcggtggcctacttggctagataacggtggctcctattctgatgttactaccagagttaaaatctaaattgatctgtttgctaaatgctaacactggcctagtctgtcagtaacctgaactacctaatggagaagggctgacatgaattggcaacctgaatagaaagaaacatagtgaaagcactttcttgtttctaggcaggcccatttcatcataagttgaaaccgtaagcatatttaggagactttattttgcttatgtgtacacattttaatgcagagttgacactactcttcccagtatttacttagtaacctgttaacaattaaagaaagtggccsggctcggtggctcacgcctgtaatctcaccactttgggaggccgaggcgggcacatcacgaggtcaggagatggagaccatcctggttaacacggtgaaaccccgtgtctactaaaaatacaaaaaattagccaggcatggtggcgggcgcctgtagtcccagctactccggaggctgaggcaggagaatggcgtgaacccgggaggcggagcttgcagtgagcagagatcacgccactgcactccagcctgggtaacagagcgagactccatctcaaaaaaaaaaaaaaaaaaaaaagtgaacagggtatctccaatttcggtaagctttccctagctctagcctttttcactcttatttcagccaaatttgcagttcattagtagcagaaataacaacaacaacaacaaaaagccactcattataatagatatatctgcttcatgtagcacgttttttatattttacatactgattgggggaaataaataaataaataaaatgcaccttacaaaatatgccttaaaattaacctctggttaaatgaactggttattatgcacaaa

SEQ ID NO: 690310 - DNA, 805 bp, Homo sapiens
taaagatataaatgacccaaggaacttgtatcagttttatgaattgaggttctaagataatgttttatttgatacttttctttctgctcaaamgttaaaacctcacaccatcatactgccttgatttgggaagatttctacctgccatggtttgaaattaattttggcatagactattaaaaaataataaaactacaatcacaagtatgaaaattcatgcacaaagacaatatttaaaataagacttgaagggagtacatgttattctgctatctcttttcattgccctatatgactttggaatgaattgtgctgtggttgtctcacgtgctgttcacacagctctcaaaatagtgacaattgcttttaaaaaaacttgttaatcttttgctctaagtgctgcaactttgaacatttaagcaattaccttggctttaagtaaatcccaaaacttaagagggctccttacaatttttacaatctttgtaagtctgcatgaaacctttacaattatttccacttatttagttttcaattcataatgaacacatttctgttgcaagttctgtatgtgtggtagagtgctctgtgttaggactaataaaagctaaatttagtgagcacatgagagtataaactctccagaggcaatatcatttaaccaccagaacaagactacaatatctatgttccattttacagatgagcaaaccaagattcttagagtttattaagtttagtaactctcccaaggtgaaatattttataagtgaccaagctctctgaaaccaagtttgtttcatac

SEQ ID NO: 690311 - DNA, 1667 bp, Homo sapiens
caaatgttttcgttttactcacaccatagttaagaaaattatttaaacttgtttaaaatgcttcccagggcaatgatatctaagaaaagatcatttgtaaaggatccattttaaaatgcacagtctcagtataatgtccactatagagaaagaccttagcttaaattataccacagctattttaaatggatttttaaattatctacctttgcatttcatcatgaatgtttcagggaaattatcctgagataatgccaacaaatggctgcagactttaggtttataattgctcttgttcatttaaggttcccagcagaccatatcaggaaattcaatgcctggcaagtcggggttgataatataccgtaactggcattttcttattagatgagcacccaaatcggttttcatttgtagcaatgaccctaattaagagagttatgatttaaagcaagtctttgcattttaagagtcagatttggatatgggagagttagccaaagggttgtatttttttaaaaaaaaaacattggcataatctggccttaattttaatttttcaaatgtatatcaaatacatttttttcagtgactccctctctcaaaatgagagactcccttctagctactgagaaaatatatgaataagcaaagttgttcatatacacatacattcacatgtacctaagtatactcacctcagtcttcactaaattatttggtttttgatctgcaggaggtcttagaaaaaagaacatctaattcagctagctcccgacacccccactatctgaagtggaagaacccacggcatggcaggtaaagcattttgctttagatcataagctgttaagaggtagagcccaaactacatgagtctctgggatcctaatccagggattttgatggtaaatgtacaaaaagatccccctccaaaaaatacctatttaaagatgctatctgtgccatatattgaagtgtctgacttcctaaaaactcattgagttgacagaaattattaattgctgtgtaccacaaaaatgtcctcactgaaactttatgacaacattgctgtaaggggtcattaccaaaaagtaattttattgtaaggaactttaagtattccatctgaatgtatagccaaaatttgataacttacggagctggatgcaaagtaaattcacctcacctaacatatcagtaaaaggaggtacagcaagaacaataagcaacttttggagatcattttacaatttatgaagaatatttacctagattatttctttacttacagttgtcttcacggccacactgtaaaggggcagggcaagacaaacatcagacattggaccattatcgttcacatttcatcgtttggaagataagactcatcaggctttcaaacaacagatccttttactttccactatactattctaacttcctgagagcacaaaatattattggtaatctattataaattgaaaaaagcaatatgattgatgaattgttgttataattacagaagtgataacaatagccatgattatttagcactttgcttcagatgaygccctgagcagcctcttggacatccacagacgtgaacatccctatggtagatgttatcacgccaattcacagagaagcaaacggaggtcagaagc

SEQ ID NO: 690312 - DNA, 628 bp, Homo sapiens
gttaattcttttgaaaccttaaatattgtggcatcttagtgtcatggtaatctatttttttctcttatagatgaggacatagaaagatgaacttaaagctgaaaagtgaacttaaarctggaaaaaatgaagcaatctcagctatgatagctgtaatagaaaaatggagttttcctcagtttttcttcctcagaataaatgggatgatcctgatggctgtttaagtggagaggatttgtttggtaagcacttcaggatgaagatgcatactttaatagattcccagatgaggaagcacctatatctatgctttccatctgctacttctttgggaaaaaatggaagacagaaatagcaaaacttgtagtcgctccaaatacatcctcagatagagcacaaaatataatagacaaaagccctactaaaccaagtttatgtttaatgaaagcaagggcataaaagaaatacataatgtctaaagtagatacatcaagaaatagcagtacctgtgcaaacaacatctttagagattatagaagtaactgctgaaagggaaaaatcaatggagttaagagttctagggaaaaaccgggtgtggtaaagcaggaagctcaggtctttctttctt

SEQ ID NO: 690313 - DNA, 628 bp, Homo sapiens
gttaattcttttgaaaccttaaatattgtggcatcttagtgtcatggtaatctatttttttctcttatagatgaggacatagaaagatgaacttaaagctgaaaagtgaacttaaagctggaaaaaatgaagcaatctcagctatgatagctgtaatagaaaaatggagttttcctcagtttttcttcctcagaataaatgggatgatcctgatggctgtttaagtggagaggatttgtttggtaagcacttcaggatgaagatgcatactttaatagattcccagatgaggaagcacctatatctatgctttccatctgctacttctttgggaaaaaatggaagacagaaayagcaaaacttgtagtcgctccaaatacatcctcagatagagcacaaaatataatagacaaaagccctactaaaccaagtttatgtttaatgaaagcaagggcataaaagaaatacataatgtctaaagtagatacatcaagaaatagcagtacctgtgcaaacaacatctttagagattatagaagtaactgctgaaagggaaaaatcaatggagttaagagttctagggaaaaaccgggtgtggtaaagcaggaagctcaggtctttctttctt

SEQ ID NO: 690314 - DNA, 554 bp, Homo sapiens
caaagggtggagccagcagcagacagaggtcctggctcagctcagtggctccaaaagttgctgcagagcttgggcggaagacgcaggctctttctcttctcttctgcttccaccttctctttgattcagaatgtggcttcctcctcaataggaagaatgtctcttaggagaagatctgaagccaagatgggggcagtgggaagggacattttgcaagaggattcctaattgtccaaaagcacygagactcctgctaagatgatgtcctctgggagctgagggtcctgctggaggagaggatctcctttgcctacgtgaagagcagaaagggcagaagatgagcttcagttgcaaatgacaattgattgaatgattgtattattagaactgatacttgtttcgtggttatttatgtcatagatttaatttgtatcatatatttgtactaattatttttattgatgataatcataggaagagctgtcacatcaaggttttgtcatgtgctaggcactgcacaaagcacttgaatgacatccttgaaacttttccca

SEQ ID NO: 690315 - DNA, 1375 bp, Homo sapiens
ttagaggaaagcagtccctggagaagtgattataattaaacctcttttttttctttttttttttcccctcttacacttgcaggctgagcaaacactgttggaaaggcaggaggatgatcttggtacccctaagcttaggttgccagaaaagtacaaaaatctgactgctgataattgcggagcagggacaagtacagcactagatttggaatatggtagtaataaaccaaagggaagggcttatccagaggtcgactagatttaaatcaataagagaatggaattttcattttaaaaatgtattatttatttattattttttgagacggagtcttgctctcttgcccaggctggaatgcaatggtgcgatctctgcttactgcaacctctgccttccaggttcaagtgatcctcctgtctcagcctcctaagtagctgagattacaggcatgcaccaccatgcccgactaatttttgtatttttagtagagactgggtttcaccatgatggccaggctggtctcgaactcctgactttaggtgatccaccctccttggcctcccagagttctgggattacaggtgtgagccaccgcgcctggccagatggaatcttctaactcgttcttggagagggaaacagaagagacatagcccagcctcaatgtgtttagtcaagatccmagaaataacacacagtggccacttgtttgttttttgagacgcagtcttgctctgtctcaggctggagtgcagtggcacaatcttggctcactgcaacctccacctcccaggttcaagcaattctcctgtctcagccttctgagtagctgggattacaggcacatgccaccacatctggctaatttttgtatttttagcagaaacagggtttcaccatgatggccaggctggtccccaactcctgacctcaagcaatccaccagcctcggcctcccaaagtgctgggattacaggtgtgagccaccgtgcccggccacattgaccatttgattgtaaaatgtaccatacatataaaatacagtatgaatgtatttgtgcaattaaaagaatgaaataaaacgtatgtttatatcctcgcagctacattaaaaattagaatcttagtattcacaggaacctcttcatgccctcttagatggtgtctcccctccccaccaacacacaccagagataatcaccactctgagctgtgttttattcatttgcttgccttctttataattttacaacttctacatatacatccctaaaatcatgtgaagttttgcttttttttttttttgaatgttacataaacagaagcatacattatatagcttcagtgatttgggtttttccccaacactctgtt

SEQ ID NO: 690316 - DNA, 1933 bp, Homo sapiens
ccagaactatttcatccggccatttctagctacaaaggaagctgagaaaatgagtatttagttcagcatagtcactgtgacaaaattaagaagttacagagaagaacagatagtggaaagaaacaatgtctgccaaaagaatgagatcaatattggtctataattaagaatttgggtccagagagtgggctaagcagtagcaggaagcctccctccctttctaaacatataataatgctaggtaaaatatgagggaaaatacatagccaagcttaaagcaaggaaggaaatcttcaagtgccatagacaaagagaaccaataataatgcttagaagctgaagtccaaactttacagaggtaactggaatgaatgcacccaagaggcagaaaggaagatgcctgatgacatgtgcaggcaagagctggcactgacctggaagctgggaatggaaggtctaactgggaggacatcccctaccaatgcaaagacatggcacagatacaaacagtgtacctcaggcctgggccaaactagaatcttttgtaagaagtaagtttctggcctgcgtagtacgcagatgtggagtctgaatccttacacaattcacacagaatggaaacctcaaaaagtaaaaccaatggaaatggtctacaacaggttctgtaggacactgtaactgacaagcataaaacctccccaaagggacaccttcataaccatgggcacatagaagataattgctataaaagattaagttgctggaaaagcaaatgccatgagtggcacatcaaatggaaaaaatcatccccagggatccacagataatagagcaatctcaaagtaactctataataagggtgtttaaaatatttaaagaaattgtaactatcaaggcaagattgggtcattatgaaaaagaacaggcagattttaaagtgaatcaaatatgttttacaaatgagaaatatctcataatataaataattccttaagaatctcaactttagcattgtagagtggttagcaggtttttaggatatcatttggagaattttccacagattaatatttgatatattttataggaatacacatatttttaaaagaattagtcattggtcttttcaaatctggtctttgtcagactctatcacctttaaaaaataaaagccataaacataatccatacaaggttctggggagttatgggaggagaccaagaaaaagtattaaagaaaaacaagacttgagttgtcccttttctcccatgaccctaaaatgagcttacatgtcattcagagaaaacaaatgaaagggctaaaggacacagagtcatttacaagaacaaatcaatataaaaccaattgtattttaaggagctaagggatataggacagcggtcatataatcaaaaattgcaaagatatacaccttgaccctgaaggtctccaaaacatggccacaaggataaatgtagtagaccagatgagggcctcaatccaagaaaagcatcatagagagatgaattttcagctaaattttgaaagatctgtggggttgtgggagatacacaaataactatcagagtactgctgactcgcctttcaacattcctaggcttgtgtctagtcctaatcacacaaatttaaatgagttttagagaaactggaaagatccaagagatgttaaaatttgtccagtagatggaatatcagcattatgaacaaaaattaaatggagttgcttcatttcacataaaaaatacacgtgtgctatgttcaagttcttctttgaaagtacgtaaaatatttcggaaggaaattaagttactgttcccagtgaggaaaaaagatccaaattggaacagaattgatacacaaaaggcagactctatgactttcaagatcataaacgctgaaatwggctatcag

SEQ ID NO: 690317 - DNA, 2659 bp, Homo sapiens
ggacctacaacccattgatccaaatacttctctagcattcgattcccctcctcccaccagccccccaccgcacacttatttacttacttctcacttaagaagattccatttcatggtgaagcctatggtattcccttgagtacaccctcaactttcttaccttgacttctcatctttgtactcactcggcaaaatccttactctggttaaatccaactctttgcctgactcataactctttgatacaggtgaagatagttagaggaaaaatgtataaatatctaatatattaattagcaatctcccctttttttttctatttcattcaccagtatagtcctagcacctcgaacagtacctgacatacaataactgtttgataaatatttgttgaatgaataaatgaagtatatgtgctcataattcacacagaattccattgactcaacctgtgaatacatatcccttttcttccactgtaaaaagctcatatactttagaggaggtctaactttcaaaaggatacattagcaaatgctttgtgtttatcttcaaggcagccctaagcatatttgcgattattgattccacagttaatattttcactttggctgtggagcttttatataaaatatgtgatgatttgcggaaaccatggcattttcctgccttgaagctttgaaataattatatctttaactaattcattattgtaacaggggaagttgagactagaatgttacagtattggggttttaatgatgagaaaaagccaggaagactcaagtatccatagcaacaaaaatttctttttatcttttaagtgaccaaaggtgattatttcttttccttacattattatatcagagtttatcacagaggtaaaaagcatgtattagctttcaagtgaggtgtagatatttaaggcagaagtacattcaactaccactacaccccataggaggcttctcccttccccaaataaaggagtgcacagctctaacaattcaaaagtaaaagggttataaacaagacttgaggtatgacttgtcaattaaaacttctggctaggtggggaagaaaaacaactatgatatgcaatctgaatcattaaaatgataccataaaatcttgagaaagtggaatgagcatcaagaagatctctatgagtatttagaaattcggcctcactaaaataagacagaatttctttaggtggcagaatttatgagacagagaataatatagatagaaacgaacctaaagacaatatagcaaaatgttaataggtgagtaatagagaaaaaaagggaggaggtattttctccatttttctgtacatttgaaatatttcataattaaaataactttaagattaaaaaagagatttcatgagatagatttaaggagatgagatgattaattgtaagattaaggtgttcgaaaaccatgttctgcttcaaactgtctttgcagtatttgactcattttgttaattacaagtgactgggaaagagttcatcaaataatctgtcctcaaaagctattttcatctaaatgttctttttatctatttataaaacgttttcacttatctatgattcaactggttctttgatgttattggatgcctcgtaccgtggacatctgtctctgattttgtaggaaccagtagtagattgattttttattttatttccttaagactcattgaacttgcagtttcattttgtcaaaataataatagtaacaacatttacaacaataataacatcaacaacaacacatatcatccaagtgctattttaattatatcatactcaatttatttaatcctcatatcaaactcataaagtgaatactgttaacatcctcttgatacaaataagaaaactgagttacaaagaggtaagaaatttgtccaggatcatagctagcttcagagcttgtaccctctttttattttttaattaggaagtttttcctaatttttatttttattttaagtcctagggtacatgcgcaagatgtgcaggtctttacacaggtaaacatatgccatggcggtttgctgcacctatcaacccatcaccaaggtattgagcccagcatgcattagctatttttcctaatgctctctcccccaactccacctctgacaggcccccacgtgtgytgttcccctccttgtgtccatgtgttctcattgttcagttcccacttataagtgagaatatgcggtgctcagtttccccaacccccaggccatggaccggtacctgtccagtggcctgttagtaatgggccacacagcaggaggtgagcagcaggtgagcagcaggtgagcaagcagtaccacctgagctccacctcctgtcagatcagcagcggtattagattctcataggagcctgaaccctattgtggactgtgcatgccagggttctaggatgtgtgatccttgtaagaatccaaataatgcctgatgatctgaggtggaacagtttcatcctgaaaccatccccgacttcccgtggaaaaattgtctcccacggaacccgcccctggtgccaaaaaggttggggagcatcgttcttaaacattactctttattgcctcttgattatggctctagaaagttaaggagttttttttttaa

SEQ ID NO: 690318 - DNA, 2659 bp, Homo sapiens
ggacctacaacccattgatccaaatacttctctagcattcgattcccctcctcccaccagccccccaccgcacacttatttacttacttctcacttaagaagattccatttcatggtgaagcctatggtattcccttgagtacaccctcaactttcttaccttgacttctcatctttgtactcactcggcaaaatccttactctggttaaatccaactctttgcctgactcataactctttgatacaggtgaagatagttagaggaaaaatgtataaatatctaatatattaattagcaatctcccctttttttttctatttcattcaccagtatagtcctagcacctcgaacagtacctgacatacaataactgtttgataaatatttgttgaatgaataaatgaagtatatgtgctcataattcacacagaattccattgactcaacctgtgaatacatatcccttttcttccactgtaaaaagctcatatactttagaggaggtctaactttcaaaaggatacattagcaaatgctttgtgtttatcttcaaggcagccctaagcatatttgcgattattgattccacagttaatattttcactttggctgtggagcttttatataaaatatgtgatgatttgcggaaaccatggcattttcctgccttgaagctttgaaataattatatctttaactaattcattattgtaacaggggaagttgagactagaatgttacagtattggggttttaatgatgagaaaaagccaggaagactcaagtatccatagcaacaaaaatttctttttatcttttaagtgaccaaaggtgattatttcttttccttacattattatatcagagtttatcacagaggtaaaaagcatgtattagctttcaagtgaggtgtagatatttaaggcagaagtacattcaactaccactacaccccataggaggcttctcccttccccaaataaaggagtgcacagctctaacaattcaaaagtaaaagggttataaacaagacttgaggtatgacttgtcaattaaaacttctggctaggtggggaagaaaaacaactatgatatgcaatctgaatcattaaaatgataccataaaatcttgagaaagtggaatgagcatcaagaagatctctatgagtatttagaaattcggcctcactaaaataagacagaatttctttaggtggcagaatttatgagacagagaataatatagatagaaacgaacctaaagacaatatagcaaaatgttaataggtgagtaatagagaaaaaaagggaggaggtattttctccatttttctgtacatttgaaatatttcataattaaaataactttaagattaaaaaagagatttcatgagatagatttaaggagatgagatgattaattgtaagattaaggtgttcgaaaaccatgttctgcttcaaactgtctttgcagtatttgactcattttgttaattacaagtgactgggaaagagttcatcaaataatctgtcctcaaaagctattttcatctaaatgttctttttatctatttataaaacgttttcacttatctatgattcaactggttctttgatgttattggatgcctcgtaccgtggacatctgtctctgattttgtaggaaccagtagtagattgattttttattttatttccttaagactcattgaacttgcagtttcattttgtcaaaataataatagtaacaacatttacaacaataataacatcaacaacaacacatatcatccaagtgctattttaattatatcatactcaatttatttaatcctcatatcaaactcataaagtgaatactgttaacatcctcttgatacaaataagaaaactgagttacaaagaggtaagaaatttgtccaggatcatagctagcttcagagcttgtaccctctttttattttttaattaggaagtttttcctaatttttatttttattttaagtcctagggtacatgcgcaagatgtgcaggtctttacacaggtaaacatatgccatggcggtttgctgcacctatcaacccatcaccaaggtattgagcccagcatgcattagctatttttcctaatgctctctcccccaactccacctctgacaggcccccacgtgtgctgttcccctccttgtgtccatgtgttctcattgttcagttcccacttataagtgagaatatgcggtgctcagtttccccaacccccaggccatggaccggtacctgtccagtggcctgttagtaatgggccacacagcaggaggtgagcagcaggtgagcagcaggtgagcaagcagtaccacctgagctccacctyctgtcagatcagcagcggtattagattctcataggagcctgaaccctattgtggactgtgcatgccagggttctaggatgtgtgatccttgtaagaatccaaataatgcctgatgatctgaggtggaacagtttcatcctgaaaccatccccgacttcccgtggaaaaattgtctcccacggaacccgcccctggtgccaaaaaggttggggagcatcgttcttaaacattactctttattgcctcttgattatggctctagaaagttaaggagttttttttttaa

SEQ ID NO: 690319 - DNA, 647 bp, Homo sapiens
atactagttgaatttcttttgtaaatatagttatatataattatatataaatataaatatatagttatatataatttatatattttatatatacatatatatatttatttatttttctttttttgagacagagtcttgctctgtcatccagcctggagagcagtggtgccatcttggctcactgcaacctctgccccccgggttcaagcaattcttctgcctcagcctctccagtagctgggattacaggcgtacaccaycacacctggctaatttttgtatttttattagaggcggggttttgccatgttggccaggctggtctcaaactcctgacatcaggtgatccacccacctcagcctcccaaagtgctgggattacaggtgtgagccactgcacctggcctataagttttctgttaactctttgaattattttcattgtatatatttaaggatatgatatattgacctacttatacatcgtgaaataataactatagtcaagaaaattaacgtattcaattgttatcttatttgttataaatctacacctaaaatctactcttttagcaaaagtcccaaatacagtacaatattattaggcatagtcttcaggtggtatataagatttctagacttattca

SEQ ID NO: 690320 - DNA, 632 bp, Homo sapiens
tgctatttaaacttccccttgatttctttattttatatatgtgttatttggatatgttatttggtttccaaatatttgaaaatgttccattgtttctgttatctatttccatttaattctattgtraatttgaatatttaaaaatgtaagacatattgtatgtacgagatatgatatggcctatgatggtaagttctatgggaactttacactattctgctattgctgtgtggaaggatataaatataaatcaggtcaatttggtttttagtgttgttcaagccttttatatctttattgattttctgtctacttgttctgtcaattaataaaatagtagtgtcaaaaactaaaaggcatttatggatacacctaatttcggtactctctgcttttgcttactttaggcaatccttactttgcacatttcctgaaggttcaaatcatgatttagttaaataatgccagtcacttgacaactaagatttagattagttttttcatatgccattgtatcctgctgtgttaaatttttttgccagctctgaattatttatagctattatttcttcacaaattttttattctcttcattctcttcttctgacattctgaccagatgtataaatatt

SEQ ID NO: 690321 - DNA, 632 bp, Homo sapiens
tgctatttaaacttccccttgatttctttattttatatatgtgttatttggatatgttatttggtttccaaatatttgaaaatgttccattgtttctgttatctatttccatttaattctattgtaaatttgaatatttaaaaatgtaagacatattgtatgtacgagatatgatatggcctatgatggtaagttctatgggaactttacactattctgctattgctgtgtggaagkatataaatataaatcaggtcaatttggtttttagtgttgttcaagccttttatatctttattgattttctgtctacttgttctgtcaattaataaaatagtagtgtcaaaaactaaaaggcatttatggatacacctaatttcggtactctctgcttttgcttactttaggcaatccttactttgcacatttcctgaaggttcaaatcatgatttagttaaataatgccagtcacttgacaactaagatttagattagttttttcatatgccattgtatcctgctgtgttaaatttttttgccagctctgaattatttatagctattatttcttcacaaattttttattctcttcattctcttcttctgacattctgaccagatgtataaatatt

SEQ ID NO: 690322 - DNA, 666 bp, Homo sapiens
ctttatcatgtaccttaatttacttatttgttgtgaatattgcttatttcctgcctgtatcaatgtgagtgtaagtgtcaaggggttgcaatgccttagttgctttattcatttgtctagcatacagattgtgttttatgctcaatatttattgaattaataaaagcattagtgctccttaaaccttcatcaactatgcctctgatgatcaaccccataatgtgcctgtcatacctattcacgtatgaatttaaaaatgagcaatattcagtctcaagctagggatctattaaacaatacagaattagttgtagcttaactaccacacacrttaattgagtcaattacagaccaaactgaactaataaaaatttttaaactcatagataaatgctgatacttcaaaataaaattagagaggaaaatgttactgttatttatggagcttatatcaaatatgtaaacaaattttaaaagtaattaaaatttaaccaaaaacaacagggttttatggagtactgtgctggagaaaggggagtccactaagagggaaggttgacactcaatacctctcagagagggacatgtaatcaggcaattaaaatggcatagtgtaaccatttgagatcacatatgtaagtagggccaagtttataatctgttata

SEQ ID NO: 690323 - DNA, 678 bp, Homo sapiens
cagctttattcataatcgccaaaacttggaagcaaccaagatgtcattcagtaggtgagtggataataaactgtgctacaactagaaaataggatattattcagtgctaaaatgaagtgaactaggaagccatgaaaagaggtggagaaaagttaagtgcatattattaagtgaaagaagtcaatatgaaaaaattcacatactatattgttccaatttaatgwcattctagaaaaggcaaaactatttagacagtaagatcgctagttgtcatgggttggtgggaggcagagatgaataggcaaagcacagattttagggcagtgaaactatagtttatcatactacaatagtggatacatgtaattatacgtttgtcaaaacttatagattatgaaacaccaagagtgaaccctaatgtaaactacgggcattgagtgacaatgtcaatgtagactcattgatggtgacaaatatacctctctggtgcagaattttgatagcaggaaatgttgtgcatgtatggggttgaggtatgtgggaactctgtactttctgctcagttttgctgttaacctatgactactctaaaaataaattttattaattaaaaaaagaaagtaacaattcctaaacactaaatgaagaatgacaaagcgagattattaaaatgttaag

SEQ ID NO: 690324 - DNA, 605 bp, Homo sapiens
ttacctcccagaagcacaacctataaaagccattctctttctstcttttccttaggtgtttttcctctgtgctatcaaatgttcatgtgaaaacatttatgggattttgtttccaccaaagtaatattttcctctaaagtattaagctagtcacatttgctttgtcttcaaaatttttgtttagatgacatttattcaattattcaacatatattcattgaaaaattactatgtaccaagcacttttccaaattctggggctacgatagtgaacaaaaccaatgctgtccatgttttcatggagcttattatccagtgggagagacaaacatttaaaaagggaaatatacaaataaccttgctcttttttgtgtgttatattttctaagtttgctagtttgaaccataatttttgtcctttattccctgccaagaaggaagggtccttttatccaaagttagaaatcaccattttgccaagcagaacaaggcaatgaagactcacttaaccatagatttttttttttttttttttttgaggcagggtctcattctgttgccctgactggagtgcagtggctcaaactcagctcactgcagcctca

SEQ ID NO: 690325 - DNA, 562 bp, Homo sapiens
ttttataacaaaataagcaatagatattaaagaatagttacatgaagggacaacayagtttggctagaatctgctcgggacacctacaagcatctggtagcagctccttttgcatctgaagcacctatacagaccagagagcaggagagcagattcacttttgtccctgtttacttggcaaccttcagaaacaggaaacaggatctgtgatggatgaaaagcattatttccctcataacaacttctagtacagtgaaaatggtagggagaggagagaatatggagaaaacaatgagcttcacacatgctacctataataatctcattatctttctaagagaaggatgtggtgatgatttcacacatgaaaaatgaacatggtgctgtgcacggtggctcatccctataatcccagcactttgggaggccaaggcagaaggatcacttgagcccacggttcaagatgagcccagtcaacatagtgagaccccatctctacaaaaaagacaaaagttagctgggtgtggtggtgtgcacctgtagtcccagctacttggaaggc

SEQ ID NO: 690326 - DNA, 616 bp, Homo sapiens
taaagtacagcttaataagcttgacattaacctaaaatataaacatatgtggtagattattaaacatattattaatatttaaaactgtaggaagtcataygtagggtgtaagacacatttaataagaacaatcaaaagtactggaagaaaacaagactgtgcctggtaatccagaaaattctcctggatcatatccaagaccatcagggtgatacctccacaagtcaactagaaccacagcattactgaaatgaaagtgtcccctaaagcagttacagcacagataataacaagtaagtcctttcaaacatagggaaagcccctctaagaaggatggataccaacaagcacagacagggaagactgtaataaataactaactcttcaatgtccagacaccgaagaaaatctactagcatcaacaccatccaggaaaagttaacgttaccaaatgaactaaataaggtaccaaggaccaatcctggagaaatagggatctgtgacctttcagaaaaagaattcaaaaatagctgtgttgaggacactccaagacattcaagataacacagataaagaatgcaaaattctatcatatacatttaacaaagagattgaa

SEQ ID NO: 690327 - DNA, 748 bp, Homo sapiens
agctgtcccatagtgaagtggtcatcatgagaaggttgtgtaaggcagatatcaggatcagtcacatggagaaactgggaggaggtgaacgggaaactgctgcgggtgactgaaccccgcttctgatatcagaaaatccaatttataattaaaagggatgctgaggcaacraaaaaattacaagaattcactacaatgtagttgggtatatatagacataggtccttagtagagtctgtttggcactatctaaaccagattcaaatagcagcatttaaattaaatacctatcatgggaaaaatactattccttgaaaattttgatagaaacagcaagagaatgcagtagcattttcttaaagcctcctcctttgtgtcttgagtgtattgttatagattgcagagtgccacatatttaatggttataattgtttgataaatataaaaaagaataaagaaaggaacttcaatttctttggaatgattagttcttggtatcagttttactttgaaatttttttttctttttagaatcttcctacatactatgacaattgctcattttacttctggttgcacacatcttttattgaaaataacaggtatgaatataatagaaacccatagaaacagcctaatcttcaatgtctatgtataaggtgtaatggcaagtcttttgctggttgtcataaacttaatttatagaaagcaaaaaatccttgaaccaccattgttccttgccttactc

SEQ ID NO: 690328 - DNA, 581 bp, Homo sapiens
agaaaatgtgatatcacacacacacacacacaccgcagaatactatgcagccataaaaaagaatgaaatcatatccataagagctaaacattgagcacacgtggacataaatgtgggaacaatacacactgaggattactagagtggggaagggggcaggaagaaggggagtatggatygaaatattagtatctatcaggtactatgcttactacctgcgtgaggggatctgtacctcaaacctcagaatcatgcaatattcccatgtaataagcctgtacatgtatccccatatctaaaataaaagttgaaaaatttaaaagttatgtattaattttatctgtgctatctaatgataatcacaaaataggtagtagctatattttaaaaagatggcatccaattttgagcaagaatgaaaaataaaaaactactatacacaatcaaaacttttcctactaattttcaaccattactgatcattgctttgaatagccctccaacatttctgtctagcattgaacataccgttcttagtattagagccagcatttgtctgtagcttggagacctctctgagc

SEQ ID NO: 690329 - DNA, 614 bp, Homo sapiens
tgatgaatctactgtacctaattttttttttaaactttgttattttgtctgccttaaaatcttcctcctccattatgttgatatttgacaaagtatttataatagtactagcgtatgggtgtctaatagagaagaatgggctaaataattcatttattcaaaaaattttaatttgtttttcaagacattggaatacagatatgagcaaagaatgatcctgtcacctattgaaatgaatattgtgacaagggtcagcaaatttttctgtgaaaagatatagagtaaatattttcagccttgcaggtcaagaattgctgctgccactactcaatttggccactgtatcacaaaatcagccatagwtaatgtattattgaatgagcatgtccttgttccagtaagattttgtttacaaagaaaaagaagaaaaaggagttgggctgaagttggcctacaggatgtaatttgccaatctcagttctagcagaatatctctcagttctagcacagtatgctagaaggtgacaagtcataaaggaaaaatggaaaaggacaagatgaggggaatggaggagagtgagtagattaaaattgtaaatgcaatgatgagtgtg

SEQ ID NO: 690330 - DNA, 631 bp, Homo sapiens
tgacataataagttcttactaaagtaattctgtagatgtatcttgaagcaaaattttcctcttttcccagctctatgccaaatgtcgggctaaataaataaaatcgttaataaatatataccatgattattgtgtatacatttttacagataacttatcaaaaggcaaatgtctgcattatcgatatgtgaaggcaaatgtrggattcaaaaatgctaatcagaaaagtttaagtcaacatttacattcacagcattgaaatgctgggtttcccccttgtctgaaagtaagaaagaaaaatagaaatagttgcagttacttctcacaggcttaaaaattggcattataaactttctagtgaagatagtttaggtttaacatgctttttattggttttatattatatataatctacatacatgtaccttttgaatgagaagaagagaagaaagagaaggaaggtaattgatgaagaaaaaattaaggaagcaaaggaaaaacagaataagttactgcatgttttttgaaaccctaatacactttaagtgtttgatgcatattaaattgcagaccatgttttatgaattaacaaaaatgcatgttgaacaactggttaatcttctcttccaaa

SEQ ID NO: 690331 - DNA, 631 bp, Homo sapiens
tgacataataagttcttactaaagtaattctgtagatgtatcttgaagcaaaattttcctcttttcccagctctatgccaaatgtcgggctaaataaataaaatcgttaataaatatataccatgattattgtgtatacatttttacagataacttatcaaaaggcaaatgtctgcattatcgatatgtgaaggcaaatgtaggattcaaaaatgctaatcagaaaagtttaagtcaacatttacattcacagcattgaaatgctgggtttcccccttgtctgaaagtaagaaagaaaaatagaaatagttgcagttacttctcacaggcttaaaaattggcattataaactttctagtgaagatagtttaggtttaacatgctttttattggttttatattatatataatctacatacatgtaccttttgaatgagaagaagaraagaaagagaaggaaggtaattgatgaagaaaaaattaaggaagcaaaggaaaaacagaataagttactgcatgttttttgaaaccctaatacactttaagtgtttgatgcatattaaattgcagaccatgttttatgaattaacaaaaatgcatgttgaacaactggttaatcttctcttccaaa

SEQ ID NO: 690332 - DNA, 929 bp, Homo sapiens
  misc_feature 3, 4, 5, 6, 7, 8, 9, 10, 11, 12, 13, 14, 15, 16, 17, 18,19, 20, 21, 22, 23, 24, 25, 26, 27, 28, 29, 30, 31, 32,33, 34, 35, 36, 37, 38, 39, 40, 41, 42, 43, 44, 45, 46,47, 48, 49, 50, 51, 52, 53, 54, 55, 56, 57, 58, 59, 60,61, 62: n = A,T,C or G
  misc_feature 63, 64, 65, 66, 67, 68, 69, 70, 71, 72, 73, 74, 75, 76, 77,78, 79, 80, 81, 82, 83, 84, 85, 86, 87, 88, 89, 90, 91,92, 93, 94, 95, 96, 97, 98, 99, 100, 101, 102: n = A,T,C or G
agnnnnnnnnnnnnnnnnnnnnnnnnnnnnnnnnnnnnnnnnnnnnnnnnnnnnnnnnnnnnnnnnnnnnnnnnnnnnnnnnnnnnnnnnnnnnnnnnnnnncactatttctctgttcttgatttttccccattatactctgaacttctttagaggaaagaaatatccctttgtctctttgacggaataaaagcaatgcttaaacccttctctctacctttttctgttttggaagagctctaccattatttactttactcaaaaggaagctgagcacacaattcagcaggtacaacatatgtaacaataagaaaaataccatagggaagtatttccctggaacaaaaaataaaagaaaaataaagagtcaataaaaccagctacaaagttcactttcactttgaagacacaaaatggaggaggcttgaatcttattccttgtgtaagttacgttgcatttgtatttaaaaccacactatggaagaaatataatcagctacatttatcttctagaattggaatatttttattcaaatctaccttgcaagtatcttgctacaaagtccttttaatttttaaaaaggcattcggtggcttatagcattaaagtattcctaataattctgtggcccagtaggtaggctagctcttttctttcttcctttctttctttctttctttctctttctttcttctttcttttcaagaaatgtggaaaacattagtgaaaattgtgttggtctgtacaattttattctgttaaagacaggttttatgatacatttagccttttaaatgacactaatagtctctggagacacacgatttttcctctrgtgcaacaattaagtccatttcaatgctatttagagaagttgaaacaattcagttactgtatgtctgctcctaggtatgtactgtaagcccca

SEQ ID NO: 690333 - DNA, 2376 bp, Homo sapiens
tacaaaaattagctgggtgtggtggcaggtgcctgcaatcctagatactcgggaggctgaggcaggagaattgccagagcccaggaggcggaggttgaagtgagctgacattgcaccactgcattccagcctgggtgacagagtgagacactctgtctcacaaaaagaaaaagaaaagaaaagaaaagaaaaaaggaatattcaatgcacacaatgggaaacaagagagggtgcaaggctctgggcccagaatgtcagggaatccaggatcctcctggtgagaaggcaaaatgagaatgtgcagcctctgtcctcatggaggccatgggtgcagagtaaagggacaaactggccacttggcatcgcatggacagtctaaggatttcactttctagcagctcattgtggtatcttatctctgctgcctggacatggggacccacagcttgatggagtcactctttttgggttgtgattccaatgtgtcacctaagctggcacccagggggatcagggtccaccagcaacacaattactcaacaggagaaaatacaatcctgttgtaccatctgacaccaactcctccctgacacctcagcaatagtcaggacacatttaggatattttctttttgaactgtatcacttttggacttttctttatcaattacgataatttttacccttgtcatttagtaaaactctgcggtccctggttatagataagatataaactttgtataatattaaatatatatatgtaaacatgcatatatatctatatgtgtatgtatgcatacatgcatgtaatatttgtttaatttcaaattaattatattttgataattgtaacactctagatttgttttgaaaataccaattttaaaaaagatgccatttggcctatcattgatgggcatttaggttgattccatgtctttgctattgtgaatagtgttgcaatgaatgtaccgtgcatgtckttttataataaaatgattttttttcctttgggtatatacccagttatgggattgctgagtcaaatggtatttctggttctaggtggtacatgtacaccatagaatactacgcagccataaaaaggaatgagatcatgtcctttccaggaacatggatggagctggaagctgttaacctctgcaaacaaacacaggaacagaaaaccaaacaccgcatgttatcacttataactaggagtcgaacaatgagaacacatggacacaggcaggagaacaatacacattgggctggtttggggcacagtgggagggagaaatagctaacgcatgtggggcttagtacctaggtgatgggttggtaggtgcagcaaaccaccatggcacaatggcacacgtttacctatgtaacaaacctgcatgtctggaacttaaaataaaattaaataaaaaaagatgcaatttggtaatcattattttttcaattgttatatttttttatttccctggactttgatttgtaaaatcttttatatattaaggaaataattcaatttgtcaaaagttttcacaacctttgggtttgccatttacattctatttttgttcatattgggattttttttggggggagctaattaaaaacattgcaaccaaatgtttgtaatgtttgtattcctttattaattctttttattttttttttgagacagacttttgcttttttcacccaggctggagtgcaatggtgtgatctcgactcactgcaacctccgcctcctgggttcaagcgattctcctgcctcagcctcccgagtagttgggattacaagtgcccaccaccacacccagctaatttttgtatttttagtagaaacggagtttcactgtgttggtcaggctggtctcgaactcctgacttcaggtgatccacccgcctcggcctcccaaagtgctgggattgcagagccaccgcgcctggcctcctttattaattcttcctttaatcttatgctgaaaagccctttttctcctctaaactcttctagctgttttaaattgttatatctttgttttcttggtttacagtgaactatttggtccttcttttgtttattatggaatatggtacacagtacatttattgtccttaattaactgacagtctcttccatgatgagaaatgcatgccttgttaagtgctaaagtatacagagaatttgacctgctcatggccttccgttctgttccattattatgcctgccccgccttaagactatcaattgatgtttggcaaagtcagttgcatgcctccctcatacttttgttcccaaaatattctttatattttcacctgtttattattccctaggtaatttataattttgatttcaat

SEQ ID NO: 690334 - DNA, 2376 bp, Homo sapiens
tacaaaaattagctgggtgtggtggcaggtgcctgcaatcctagatactcgggaggctgaggcaggagaattgccagagcccaggaggcggaggttgaagtgagctgacattgcaccactgcattccagcctgggtgacagagtgagacactctgtctcacaaaaagaaaaagaaaagaaaagaaaagaaaaaaggaatattcaatgcacacaatgggaaacaagagagggtgcaaggctctgggcccagaatgtcagggaatccaggatcctcctggtgagaaggcaaaatgagaatgtgcagcctctgtcctcatggaggccatgggtgcagagtaaagggacaaactggccacttggcatcgcatggacagtctaaggatttcactttctagcagctcattgtggtatcttatctctgctgcctggacatggggacccacagcttgatggagtcactctttttgggttgtgattccaatgtgtcacctaagctggcacccagggggatcagggtccaccagcaacacaattactcaacaggagaaaatacaatcctgttgtaccatctgacaccaactcctccctgacacctcagcaatagtcaggacacatttaggatattttctttttgaactgtatcacttttggacttttctttatcaattacgataatttttacccttgtcatttagtaaaactctgcggtccctggttatagataagatataaactttgtataatattaaatatatatatgtaaacatgcatatatatctatatgtgtatgtatgcatacatgcatgtaatatttgtttaatttcaaattaattatattttgataattgtaacactctagatttgttttgaaaataccaattttaaaaaagatgccatttggcctatcattgatgggcatttaggttgattccatgtctttgctattgtgaatagtgttgcaatgaatgtaccgtgcatgtctttttataataaaatgatttttwttcctttgggtatatacccagttatgggattgctgagtcaaatggtatttctggttctaggtggtacatgtacaccatagaatactacgcagccataaaaaggaatgagatcatgtcctttccaggaacatggatggagctggaagctgttaacctctgcaaacaaacacaggaacagaaaaccaaacaccgcatgttatcacttataactaggagtcgaacaatgagaacacatggacacaggcaggagaacaatacacattgggctggtttggggcacagtgggagggagaaatagctaacgcatgtggggcttagtacctaggtgatgggttggtaggtgcagcaaaccaccatggcacaatggcacacgtttacctatgtaacaaacctgcatgtctggaacttaaaataaaattaaataaaaaaagatgcaatttggtaatcattattttttcaattgttatatttttttatttccctggactttgatttgtaaaatcttttatatattaaggaaataattcaatttgtcaaaagttttcacaacctttgggtttgccatttacattctatttttgttcatattgggattttttttggggggagctaattaaaaacattgcaaccaaatgtttgtaatgtttgtattcctttattaattctttttattttttttttgagacagacttttgcttttttcacccaggctggagtgcaatggtgtgatctcgactcactgcaacctccgcctcctgggttcaagcgattctcctgcctcagcctcccgagtagttgggattacaagtgcccaccaccacacccagctaatttttgtatttttagtagaaacggagtttcactgtgttggtcaggctggtctcgaactcctgacttcaggtgatccacccgcctcggcctcccaaagtgctgggattgcagagccaccgcgcctggcctcctttattaattcttcctttaatcttatgctgaaaagccctttttctcctctaaactcttctagctgttttaaattgttatatctttgttttcttggtttacagtgaactatttggtccttcttttgtttattatggaatatggtacacagtacatttattgtccttaattaactgacagtctcttccatgatgagaaatgcatgccttgttaagtgctaaagtatacagagaatttgacctgctcatggccttccgttctgttccattattatgcctgccccgccttaagactatcaattgatgtttggcaaagtcagttgcatgcctccctcatacttttgttcccaaaatattctttatattttcacctgtttattattccctaggtaatttataattttgatttcaat

SEQ ID NO: 690335 - DNA, 939 bp, Homo sapiens
ttataatttgataaattataaaatatagtgaatccattaattagccatcacctctttctttttatttttagtgaaaataaagaatgaacccactaattagccatcaactctttcttttctattcatttttagtggctatcttggattttatttattgagtatatatttattagctatctcaataaatggatatttatattgattttcataataacaattgtatttgatcaaatctagttctatctcattagatcaattgcatttgatcaaatccgctagttatacatcattatatctttcttttcattgtgttaaaccattaacaacatttccataacactgttaaataagcagacattctagtccagtgtctcattttatttatttattttttcttttttttttttttaattgatcattcttgggtgtttctcgcagagggggatttggcagggtcacaggacaatagtggagggaaggtcagcagataaacaagtgaacaaaggtctctggttttcctaggcagaggaccctgcggccttccgcagtgtttgtgtccctgggtacttgagattagggagtggtgatgactcttaacgagcatgctgccttcaagcatctgtttaacaaagcacatcttgcaccgcccttaatccatttaaccctgagtggacacagcacatgtttcagagagcacagggttgggggtaaggtcacagatcaacaggatcccaaggcagaagaatttttcttagtacagaacaaaatgaaaagtctcccatgtctacctctttctacacagacacgacaaccatctgatttctcaatcttttccccctttcccccctttctattccayaaaaccgccattgtcatcatggcccgttctcaatgagctgttgggtacacctcccagacggggtggtggccgggcagagg

SEQ ID NO: 690336 - DNA, 1069 bp, Homo sapiens
agtgagaggggctcctggctcctcacttccccctgaccaccccaagggatgggccgaacatcagtggtcagccctggggagtgagaacaggtggccagggtgggttcagagtaccagctccctgtctggtgcagcgtgaggcagggaggctcatggctgcactccagcccactcactcccaatcaaggcaactccctgtgtaccaaaatgacaaactcctgtcctccgcacctgaccacctgccagtggccctcaagagatgtcaaaaatacaggagtctgaagaaggtgtggtcaacaacagtgaaattcagcacaagatttttgcttgtgcgagttactagttkccttagtttaaggtattttaaagaagagaacaaaagaaaataacatttttaaatcatgcctttgcaccccaggaatatatttgcattaatgccgccgatgtgtccagcaccatgctcgtaacaggaaactctggtgaacctggcaggtggggacctgcccttgcggagggtaaatccttgagagaaaggcagcatgttagaccgaatgatgttccctgccccccaggaaatgagatccatgccctaactcctggagcctgtgaatcttttcttatatggcaaaaaagaactttgcaggtgtgattaagttaaggctcttgagatgggggtttatcctacatgatccaggtgggctcagtgtcgtcacaagtgcccttgtacaagaggcagaggatatttaactacagaagaggaggaggaggcaatgcgaccccagaggcagagactggagagatgggatcatgagccaaggaacacctgggtccaccagaagctggaagagacaggaacagattctcccccttgagtttgaggattgacactgatttagaacctctggcttccagaactggaagataaccaacttttatttttttaagccactaagcgtgaggtcatttgttacggcagctctaatacagacagaattttacaagtattaatgatcaattccttgaagcagacaagcgaggtgtggtgagagagagtaacgaggacagtgca

SEQ ID NO: 690337 - DNA, 1069 bp, Homo sapiens
agtgagaggggctcctggctcctcacttccccctgaccaccccaagggatgggccgaacatcagtggtcagccctggggagtgagaacaggtggccagggtgggttcagagtaccagctccctgtctggtgcagcgtgaggcagggaggctcatggctgcactccagcccactcactcccaatcaaggcaactccctgtgtaccaaaatgacaaactcctgtcctccgcacctgaccacctgccagtggccctcaagagatgtcaaaaatacaggagtctgaagaaggtgtggtcaacaacagtgaaattcagcacaagatttttgcttgtgcgagttactagttgccttagtttaaggtattttaaagaagagaacaaaagaaaataacatttttaaatcatgcctttgcaccccaggaatatatwtgcattaatgccgccgatgtgtccagcaccatgctcgtaacaggaaactctggtgaacctggcaggtggggacctgcccttgcggagggtaaatccttgagagaaaggcagcatgttagaccgaatgatgttccctgccccccaggaaatgagatccatgccctaactcctggagcctgtgaatcttttcttatatggcaaaaaagaactttgcaggtgtgattaagttaaggctcttgagatgggggtttatcctacatgatccaggtgggctcagtgtcgtcacaagtgcccttgtacaagaggcagaggatatttaactacagaagaggaggaggaggcaatgcgaccccagaggcagagactggagagatgggatcatgagccaaggaacacctgggtccaccagaagctggaagagacaggaacagattctcccccttgagtttgaggattgacactgatttagaacctctggcttccagaactggaagataaccaacttttatttttttaagccactaagcgtgaggtcatttgttacggcagctctaatacagacagaattttacaagtattaatgatcaattccttgaagcagacaagcgaggtgtggtgagagagagtaacgaggacagtgca

SEQ ID NO: 690338 - DNA, 679 bp, Homo sapiens
aaatgaacaataattcctaataccataaaatacagggtttatgttcatattccctctgttgtactaatgatgtcctataagcttttcaaacactttacgttccaaccaaggttttgtattggatataattagatatgtccctttagtctttttaatctagaacaggtcccgagctctgtctttattttccttcatgacgtattttttagtgttaagtctcacacaatgtttcatattctggtttatttaagaatgttttttattctgtatttatctaaagatgtggtctaacgtgtttttctcccatatattctttatacactcaaaaattaggtgtaaagacctgttcagatttaggttcaacatttttggagagaatacatcataggtgttgagacatctcatatttcaatacacaaggaggaacatgacatcaggtgttcacctttcagtgwtgcaaagtttaatgatttctcacggtacatttttcagttagaaaataatctgtcatggtgggaggggtaatctatggcactagcatctaattatgattcttgcctgaataaattatttcaactggagttataaaatgatgtaagcgtcgctgtcagtggtggcaattgattaaactatcttcctttctctccctccctctctcgccccttcctccctctctatg

SEQ ID NO: 690339 - DNA, 679 bp, Homo sapiens
aaatgaacaataattcctaataccataaaatacagggtttatgttcatattccctctgttgtactaatgatgtcctataagcttttcaaacactttacgttccaaccaaggttttgtattggatataattagatatgtccctttagtctttttaatctagaacaggtcccgagctctgtctttattttccttcatgacgtattttttagtgttaagtctcacacaatgtttcatattctggtttatttaagaatgttttttattctgtatttatctaaagatgtggtctaacgtgtttttctcccatatattctttatacactcaaaaattaggtgtaaagacctgttcagatttaggttcaacatttttggagagaatacatcataggtgttgagacatctcatatttcaatacacaaggaggaacatgacatcaggtgttcacctttcagtgttgcaaagtttaatgatttctcacggtacatttttcagttagaaaataatctgtcatggtgggaggggtaatctatggcactarcatctaattatgattcttgcctgaataaattatttcaactggagttataaaatgatgtaagcgtcgctgtcagtggtggcaattgattaaactatcttcctttctctccctccctctctcgccccttcctccctctctatg

SEQ ID NO: 690340 - DNA, 917 bp, Homo sapiens
tggccaacatggtgaaamcccgtctctactaaaaatataaaaattagctaggcatggtggcaggcgcctgtaatcccagctactctggaggctgagacaggagaattgcctgaacccaagaggtggaggttgcagtgagtgagatggtgccattgcactccagtctgggcaacaagagtgaaactccatcaaaaagagagagagagaaggaaggaagggagtaagggagggagagaggaagaaaggaagaaaggaagagaaaaaaacgcaattacttttgcaccaacctaatatttttttattaacccatgagttaagtattatcgcctttattctttattatacagaaggacaactgagggctccaagaggtttaagtgacttaagagactccaaccacagagtgtgcaagctgggatttgagcccggcatgttctattatgctaatctactcaacttcatgtgtgtggggatttgaggcagttacagcgagtcatattacgactgaggggagttttggtgcgggctatggattaaacctccagttaagtcttgcttacacctaggaagtctaatatccagtgaatgttcccaactgtctctaacacataaggatttcgctggatttgggcagttaacatgccacttcaaggatgagaatgtttcttgggaaatccaacagtgacaggaaagcttgagtacactctttaatagcatgcaaatgatggggctggaaattcccagaaccgttttccactgtcctgcactctctctatttttggtattgctattcaatagctctcatgtcctaggaaaatcatatcactgctgagaaactctttctttaaaggcatctataacttccatgctctcatcatcttctttcatttgttttgggacagaactttagaaagtta

SEQ ID NO: 690341 - DNA, 628 bp, Homo sapiens
tgcttatgtagtatatatgattacttttttacccaagaatatcacacttcccacattgagcatatggaacttcstcatatgtaatagttacagaatattccattatatggttgaatcctaatttatttaacgagcatcgcccgcccccctccccagcattggtcattgaagcagcagagatatgcttccacatgcatcttagcatgattttctcaatatagccgtaaagtacattcatagctatggaattactaggtcatagaataattacatgtttaattttggtggattccaccaaatagatatgtacactcactcctaccaagagtatatgagagtgctgcatcttacaaccttgtctgccagcatattctctgtgtgtgtgtgtgtgtgtgtgtgtgtgtgtgtgtgtgtgtgtgtgtctcagtctcagaaggggtttaccagttctacaggtggatattgtatgtttgttttttattcattaatttctgctgtcttattatttcttttctcctattatggggtttatttgcattctttttccactttcttgggctaggtacttagatggtttacttctagcccttcttttttttctaatatatgctcttaaggttatgatttt

SEQ ID NO: 690342 - DNA, 628 bp, Homo sapiens
tgcttatgtagtatatatgattacttttttacccaagaatatcacacttcccacattgagcatatggaacttcgtcatatgtaatagttacagaatattccattatatggttgaatcctaatttatttaacgagcatcgcccgcccccctccccagcattggtcattgaagcagcagagatatgcttccacatgcatcttagcatgattttctcaatatagccgtaaagtacattcatagctatggaattactaggtcatagaataattacatgtttaattttggtggattccaccaaatagatatgtacactcactcctaccaagagtatatgagagtgctgcrtcttacaaccttgtctgccagcatattctctgtgtgtgtgtgtgtgtgtgtgtgtgtgtgtgtgtgtgtgtgtgtgtctcagtctcagaaggggtttaccagttctacaggtggatattgtatgtttgttttttattcattaatttctgctgtcttattatttcttttctcctattatggggtttatttgcattctttttccactttcttgggctaggtacttagatggtttacttctagcccttcttttttttctaatatatgctcttaaggttatgatttt

SEQ ID NO: 690343 - DNA, 628 bp, Homo sapiens
tgcttatgtagtatatatgattacttttttacccaagaatatcacacttcccacattgagcatatggaacttcgtcatatgtaatagttacagaatattccattatatggttgaatcctaatttatttaacgagcatcgcccgcccccctccccagcattggtcattgaagcagcagagatatgcttccacatgcatcttagcatgattttctcaatatagccgtaaagtacattcatagctatggaattactaggtcatagaataattacatgtttaattttggtggattccaccaaatagatatgtacactcactcctaccaagagtatatgagagtgctgcatcttacaaccttgtctgccagcatattctctstgtgtgtgtgtgtgtgtgtgtgtgtgtgtgtgtgtgtgtgtgtgtctcagtctcagaaggggtttaccagttctacaggtggatattgtatgtttgttttttattcattaatttctgctgtcttattatttcttttctcctattatggggtttatttgcattctttttccactttcttgggctaggtacttagatggtttacttctagcccttcttttttttctaatatatgctcttaaggttatgatttt

SEQ ID NO: 690344 - DNA, 628 bp, Homo sapiens
tgcttatgtagtatatatgattacttttttacccaagaatatcacacttcccacattgagcatatggaacttcgtcatatgtaatagttacagaatattccattatatggttgaatcctaatttatttaacgagcatcgcccgcccccctccccagcattggtcattgaagcagcagagatatgcttccacatgcatcttagcatgattttctcaatatagccgtaaagtacattcatagctatggaattactaggtcatagaataattacatgtttaattttggtggattccaccaaatagatatgtacactcactcctaccaagagtatatgagagtgctgcatcttacaaccttgtctgccagcatattctctgtstgtgtgtgtgtgtgtgtgtgtgtgtgtgtgtgtgtgtgtgtgtctcagtctcagaaggggtttaccagttctacaggtggatattgtatgtttgttttttattcattaatttctgctgtcttattatttcttttctcctattatggggtttatttgcattctttttccactttcttgggctaggtacttagatggtttacttctagcccttcttttttttctaatatatgctcttaaggttatgatttt

SEQ ID NO: 690345 - DNA, 606 bp, Homo sapiens
caaagattttgcggtcattttttcacaaccaaggaagataatggggattagcatggtgggaagcaggcagggccagagaagcactgggggttttcctctggtcaccagcccatcctgctggacactggctacgctgacactgagtcactggacaagctcccaggagcagctcttgtcactggctccaaagctttgtcaaaaacccctacaccatgaaccttttatcaaagcactctgagtkttctctgagccagtaggaaactgagatcagggtgtctgcatttgactctctttccacttccttcctccttctctccaattaaaccccatccatccttcccagcaattgataactgggctctcacttgctcctctaacctcacctacctctgggcacctaagcacttcattgcaagtccttttattattggcttgagcaggggaatgtgccattaatgatttaatctccacaagacatttctccctaattgctagtcatggatgataattagcgactgttaattcctgataattaacaagctaatacttagaggtaatggcgcctgggtaatcatcttaaaaagctcctgtttctactaaaaatac

SEQ ID NO: 690346 - DNA, 315 bp, Homo sapiens
gtgtttatctgctgaccttctctccactttatcctatgaccctgccacatccccctctatgagaaacacccaagaatgatcaataaatactaaaaaaaaaaaaaaaaaaaaaaaaaaaaagaggatgtgatctctgggaagagtcttgaaggaccagcagaatatagacaggtaaagaaagggagaaagacattctaggtttaagtaacacaccacgaatgaaggcatgcgsttataaaacagtgctggtctcttctaggatttctaattaccaaagaccatttggcaactggtagcaacttggaaaatctacta

SEQ ID NO: 690347 - DNA, 1121 bp, Homo sapiens
aagtaactaacttgctttttattttacaggcttataggtgttttctaattcatcaaaaagagactttaatattccttccagatatataaaagataaaacagaaaagcaatgaatttatagcattttagataggaaagaacccttacaaaaggttaagaaatcatgatataatttatatattttttaacaaaaaagtccataaaccctatgataacaaaaatattttaaccagctctattaaacatgtaaaaaatgatcaatttaattaccaccagttatttttaaaagttaaagtaaaatattaaaaatataacccaaaacagtgatatataattaaatatgaagtaatacaccaaaacataattgttcacacaataggtaaaagttgcaagcagagatgtcattagtagtgtagtctgaattataaagtaaaatagaattaatggaaatttatacaaatataaaaataatactttaataattaaaattgtaagtaaggttgttaagatatgtaatttcccacaaagtcttaattatatatttaaaatgtatgcaactataacaagaaactttgatttgttgagaaagcttactaatctcagtagatctactaggtactggaggtggctgtgtgccattgcgagtaggcatcgaagactggtgtgatattggagaaaatggaatcatatcaaagatgtcagtggagggcgacttaggtgtcatactgcctgcctgcaatgaaaataaatgaattagggtaatatttcatatagacacattgtaatgctaaatatttcatatgcatataaaatatatgtaaacaacaawttcagttgcatcataagaatttgccattttgtagaccaaaaatagttaagtattcgcaatttcatatggttccactaattatgataaatgctcatttagaagaaagcaatagaaaatttctgtaaaaatgctctcaaagatgatggcaaaaacggtgacaatattattccagatgaatataaaagatacagtgaatttttgggatatatagaaatgactgctacttgtaacagagaattagatatattagaaactattcatgtaaaaatatgatttcagtaagatacgctgca

SEQ ID NO: 690348 - DNA, 678 bp, Homo sapiens
tgattcaggtaacaattatctctcactcacaattttgcaagagctttctatatttggtattcttttcttaccatccttcaactcattttcattccactctcacagaaagtttcctgaaaaagaaatgtgatcctaaaactgtgcygctcagaatttctccagtgtacccccttggccttcagcagagaggaagaagggaggtgaggtctcagagacattaattttcactttcagtcatcctcttccttcctccaatcacaccaatactcatagcattctagaccaaccttggcagaaggaggaagaggttaaattggacaacttcctctactcaaaactgctacctttcatttcagtttaatagcatttataggtacctgctatttgcaatgctttgtgctttttcaccaatcctcacaaaaatcaggtggtgttacagggggaaggaatgagacgcagcatgaaggagctacctaaggttataccaagctagttagataaatgtgcctgtacaggttgcttgccattgaacatcacaacagttggtttgtttttcaaatatatgatttaggcagtagaggttaagaacagaagccctaacttcaggcactcttgactggaaaactgattctgccatgaggtaaccatgagtaagttacttatccttctaataatccc

SEQ ID NO: 690349 - DNA, 659 bp, Homo sapiens
tatgagacagctattgatgcacaagtacaaaagctcttcgaggaactggccagggcccaaactacaagatctgaggaaaggcttgtttctactgtttgtgtttataatgctggctgtgagggttggtagagattgtggggtgtataatttgtgaatagaaaatagcatgggtggggtgagagtttctatttgatgccacacacagttgaaatgcagcgtctccccgaaatagtgaaactgacttccctggtacagttcacataaaaagaatggaacttacatacctcagcctttctakctgggacttagagtacagcagtctttggagcactacagaaagttctggctgacattgactgctgcaagcctaatagaagaatggctaaaagcaaatggctgtgtctgttcttgatgtatacattggaaaccctgcaggagtagagggtgtatgctcttgtattggctcgtcttctcaccagtactaccacacttgcaggaccttatgatagttgcagggtgcttaaacctgcatgcatcctcccagttcatatcccaggcagtctctgctggagaaccaccacatcatcagaagatgttaaagtcagaagggactttagggctcatcccctgcagttgtgtttatgctggttcccttgctt

SEQ ID NO: 690350 - DNA, 1884 bp, Homo sapiens
gttcaaacctaaagaaggaccacttggttctaggtagactccaccgtaggagaccaatgatattgactcaatgggttggatggtacgcagcaaaaggaactttataggttatgaaagtatatataaatatttcaaaataatattgtcattacagtaaatttatcatagcacaagctttagagtatgctgacgtggttcatcctattgattagctaatgagaaaaaatactccaatagatatgctttgattttgcaaattcagacaaatttttagaaagtcagggctagatccaatatctcctgttggctcccatttaaccttttaaatgtatcttttgaatataatccttcaagaaattatgaattaacagaacaacacagatattaacatctttggctttttatagaatttcaactgggaagggatatggaaaggaatacaaaaggtgagaaatctctttaataatagctagtaattttaaagtacttgtgtgcaggtgttgttttgtgctctgcttctataaattcaatcatttctcacaagaatccagtgaagtaagaactattattaccccaactttgcagataagaaaattgaggcacagaaagtttgaataacttgccttctatcacatagcaagagcatgataaagctgtaatggaacctgtaaacaatcctgccctagaacccatgctttgcccactacatgtactgctttttatagacctctggaggagcgatcttaggcttcctcttggcagaattttatatttcttggggatctttttattaaaacaaaacgtttaaataaacaatgactataattagtccctttattcaattttggaagtgcttctaacaactcaggtggggaaccagtgagttctaggttcaatatcacagagatttcctttaattttayggctcatgattcaagctgtttttaataaaactggatttgggaagtagaagctaaaattaaagggaaagctcaactgctaaaaataaattatctctttttgtattagtttgtgatgtcttgaaagtccaatatcattgcgaaaacctcaccccaccttcagcacctggggtttcccagccccagtatttctatatgggtaacatgcaatgtaatacaaggaataaaggcagtcgagattcatcatttgagttattttggcttgttaactaactctgataacaacctctaagtaagtgcttatctgcaaacttcctgaatgctgaatttcagttgtggttagggcttaaaaagtttaggaatgcaagtcaaatatggttcttacacatttcgagataaataaagtcaatcatatttcaagtcataagctcattacctaagatgcaataaaggaagctcagctgtcttacagatattcaatcctttccttttttttcaacttctattttagaagagccctccaacaatggagttagggatcatttcatagcagattattgaatcttatatgagaaatttttttgtgatagtgttaagaggaccaaccttaggtctgaacagacttggtacaaattctagcaccacattttatttcctgtgttatggtgctgaatctcactctctttatctgtaaaatggaaataacacctatctccctaggtttttctgagaattaaatgtagcgatattgagaaaatgcctgccatatattaatttttgttttttgttgtaagatttaccttgatttgggattgtcagaattttcttttattaaagctagagtgacaggactgtttattccattcacatcttcaacattttaggctgttactaacatagttaataggactaacatagacttttatatgagaaaaatgactgcagattttgccactgactaatc

SEQ ID NO: 690351 - DNA, 654 bp, Homo sapiens
gcatattaattaaaatagaaaaataatactcttccaatggggaagcttggcagataccaccaggacaaagtgatcaaagttagcactaccagccatgagacgaatagataccgtgtgcctcctgatatgttgcagtgaggatccagcatcacttctatggttgacattcctgctgaaactgcgttaggtaaatctgatcatgtgaaacaacagacacaccaaaattgggtgtcattatatgaattaagtgtatatacgcttcaaaaatatcgtgttcatgaaagacaaagactaaaggacattttcagtttaaaggagctataataaataaaagctattttaattggatttttatttttgctataaagaaaatgagagtgataattgccaaaatttgaatatgatctatagactatataattgttttgtatcaataacactgtattgacttaataatttttcattagttatataagagaatgcccttcctccaaagcaaatgtaatagaawgtttaacattgtcactacatgtggagaaagtgagtgaagtatatataaaacttattatttttaaaaaatctttagatacaaggttgtttcaaaataaaaagttaaaaaaaaatttttacctaatatatcacactctgttagca

SEQ ID NO: 690352 - DNA, 1741 bp, Homo sapiens
cagaaaaagattaataccagaacaattataacatactctaatagaagttacatgaacgtagtctcttttctctaaaaatatcttattgtactgtaccactggtaactcaaactgcggataaggggggactgttgtacaacagtctcaccatttgccggtatttccgaatcatttttagcttgtcttctcctcccttgttccttctttctgttcaaggctgctgattattctccaggaggctcttctagctccaatcacattcttatatgtaacagataggaggtttctttcttcagctgtcagctccacatccatccctgctaatttcttcactgactccaccatttctataagggaaaagcaaaatcccgggtccctcagacaaaagggcgggtggaggaggagaagccgagagtcctgctccggcgccgccggagcaccgcctgcctcagccgaccagcgccgtcgactactgggcctagcccagacgagaggagggaaaggccgcagaggccgcgaggatgctgcggaggcgcgggcggccggctgccgcctagttgtgcagcccagaccaaggaaagagaagtgggaggagcggggagctcggcgtcccgcgtcctccgcggctcaggacgactacgctcggcacgtccgggaccctccggccgtggcggttgcagcgccaaaagctcgggcctcagcccctgacgctgtggtgactccgccgcgcctcgccgtcgcccctgtccccgtcctgcccgccgcctccgccgctggggacatgtccaaccccggaagccggaggaacgggcccgtcaagctgcacctgacaggtgagggggagcgccgggccgggctgggcagccgccgggtgggcgagctggcggggggtgcctgttgacttgggaagggccaggatcgcgatcaatggtgagttgggggttggaggaatgggaaggcctagttcagggagagtaattggaaaaccactcgctccggtttggacattctttaaaaagccgaggatgacttggggagggggggtggtcttttgtggaggggaggttacatcggttcgcatcgcaggcggatttcaggtccgaaagtcttggtcaaggagcccgatgctgcctctcggggctcggggaggagcccctgggctaccgcccaggtgggatcgtgaaggggatgaagagctctcgtggcgaggattattgaatccggttgctgactgcgcgcaactttaaggagtgtttactccttaaagatggagcgcttaacggaagtgtgtgcgtgtgtgttcccgggttgttaccttgcacacctacttatgcccgcgtgcaaaatccttactctccgcctccggctaccgctgccggggccgcacaccttaaactcacgtctctctgaggagaggagactgaggttgacttttcccgtgtgcctgtctgatccgacggctcgggctcattgtacactgtgttttggaagtgtctgattgtagggtggcatgtttggggttgtaccttgtaggccgcagaacttgtgtcacttctaactccagacctgctttaaaaacacactttttkgcgggggtggggagggggtacttttctaactatgtgctcatacaaactttagagcaaactttctcttactctccccaccctcccccttctttttctaaatggaaaataatgtccggaggggttgctagatagaagactacacttacaaagtg

SEQ ID NO: 690353 - DNA, 1741 bp, Homo sapiens
cagaaaaagattaataccagaacaattataacatactctaatagaagttacatgaacgtagtctcttttctctaaaaatatcttattgtactgtaccactggtaactcaaactgcggataaggggggactgttgtacaacagtctcaccatttgccggtatttccgaatcatttttagcttgtcttctcctcccttgttccttctttctgttcaaggctgctgattattctccaggaggctcttctagctccaatcacattcttatatgtaacagataggaggtttctttcttcagctgtcagctccacatccatccctgctaatttcttcactgactccaccatttctataagggaaaagcaaaatcccgggtccctcagacaaaagggcgggtggaggaggagaagccgagagtcctgctccggcgccgccggagcaccgcctgcctcagccgaccagcgccgtcgactactgggcctagcccagacgagaggagggaaaggccgcagaggccgcgaggatgctgcggaggcgcgggcggccggctgccgcctagttgtgcagcccagaccaaggaaagagaagtgggaggagcggggagctcggcgtcccgcgtcctccgcggctcaggacgactacgctcggcacgtccgggaccctccggccgtggcggttgcagcgccaaaagctcgggcctcagcccctgacgctgtggtgactccgccgcgcctcgccgtcgcccctgtccccgtcctgcccgccgcctccgccgctggggacatgtccaaccccggaagccggaggaacgggcccgtcaagctgcacctgacaggtgagggggagcgccgggccgggctgggcagccgccgggtgggcgagctggcggggggtgcctgttgacttgggaagggccaggatcgcgatcaatggtgagttgggggttggaggaatgggaaggcctagttcagggagagtaattggaaaaccactcgctccggtttggacattctttaaaaagccgaggatgacttggggagggggggtggtcttttgtggaggggaggttacatcggttcgcatcgcaggcggatttcaggtccgaaagtcttggtcaaggagcccgatgctgcctctcggggctcggggaggagcccctgggctaccgcccaggtgggatcgtgaaggggatgaagagctctcgtggcgaggattattgaatccggttgctgactgcgcgcaactttaaggagtgtttactccttaaagatggagcgcttaacggaagtgtgtgcgtgtgtgttcccgggttgttaccttgcacacctacttatgcccgcgtgcaaaatccttactctccgcctccggctaccgctgccggggccgcacaccttaaactcacgtctctctgaggagaggagactgaggttgacttttcccgtgtgcctgtctgatccgacggctcgggctcattgtacactgtgttttggaagtgtctgattgtagggtggcatgtttggggttgtaccttgtaggccgcagaacttgtgtcacttctaactccagacctgctttaaaaacacactttttgkcgggggtggggagggggtacttttctaactatgtgctcatacaaactttagagcaaactttctcttactctccccaccctcccccttctttttctaaatggaaaataatgtccggaggggttgctagatagaagactacacttacaaagtg

SEQ ID NO: 690354 - DNA, 1741 bp, Homo sapiens
cagaaaaagattaataccagaacaattataacatactctaatagaagttacatgaacgtagtctcttttctctaaaaatatcttattgtactgtaccactggtaactcaaactgcggataaggggggactgttgtacaacagtctcaccatttgccggtatttccgaatcatttttagcttgtcttctcctcccttgttccttctttctgttcaaggctgctgattattctccaggaggctcttctagctccaatcacattcttatatgtaacagataggaggtttctttcttcagctgtcagctccacatccatccctgctaatttcttcactgactccaccatttctataagggaaaagcaaaatcccgggtccctcagacaaaagggcgggtggaggaggagaagccgagagtcctgctccggcgccgccggagcaccgcctgcctcagccgaccagcgccgtcgactactgggcctagcccagacgagaggagggaaaggccgcagaggccgcgaggatgctgcggaggcgcgggcggccggctgccgcctagttgtgcagcccagaccaaggaaagagaagtgggaggagcggggagctcggcgtcccgcgtcctccgcggctcaggacgactacgctcggcacgtccgggaccctccggccgtggcggttgcagcgccaaaagctcgggcctcagcccctgacgctgtggtgactccgccgcgcctcgccgtcgcccctgtccccgtcctgcccgccgcctccgccgctggggacatgtccaaccccggaagccggaggaacgggcccgtcaagctgcacctgacaggtgagggggagcgccgggccgggctgggcagccgccgggtgggcgagctggcggggggtgcctgttgacttgggaagggccaggatcgcgatcaatggtgagttgggggttggaggaatgggaaggcctagttcagggagagtaattggaaaaccactcgctccggtttggacattctttaaaaagccgaggatgacttggggagggggggtggtcttttgtggaggggaggttacatcggttcgcatcgcaggcggatttcaggtccgaaagtcttggtcaaggagcccgatgctgcctctcggggctcggggaggagcccctgggctaccgcccaggtgggatcgtgaaggggatgaagagctctcgtggcgaggattattgaatccggttgctgactgcgcgcaactttaaggagtgtttactccttaaagatggagcgcttaacggaagtgtgtgcgtgtgtgttcccgggttgttaccttgcacacctacttatgcccgcgtgcaaaatccttactctccgcctccggctaccgctgccggggccgcacaccttaaactcacgtctctctgaggagaggagactgaggttgacttttcccgtgtgcctgtctgatccgacggctcgggctcattgtacactgtgttttggaagtgtctgattgtagggtggcatgtttggggttgtaccttgtaggccgcagaacttgtgtcacttctaactccagacctgctttaaaaacacactttttggygggggtggggagggggtacttttctaactatgtgctcatacaaactttagagcaaactttctcttactctccccaccctcccccttctttttctaaatggaaaataatgtccggaggggttgctagatagaagactacacttacaaagtg

SEQ ID NO: 690355 - DNA, 1741 bp, Homo sapiens
cagaaaaagattaataccagaacaattataacatactctaatagaagttacatgaacgtagtctcttttctctaaaaatatcttattgtactgtaccactggtaactcaaactgcggataaggggggactgttgtacaacagtctcaccatttgccggtatttccgaatcatttttagcttgtcttctcctcccttgttccttctttctgttcaaggctgctgattattctccaggaggctcttctagctccaatcacattcttatatgtaacagataggaggtttctttcttcagctgtcagctccacatccatccctgctaatttcttcactgactccaccatttctataagggaaaagcaaaatcccgggtccctcagacaaaagggcgggtggaggaggagaagccgagagtcctgctccggcgccgccggagcaccgcctgcctcagccgaccagcgccgtcgactactgggcctagcccagacgagaggagggaaaggccgcagaggccgcgaggatgctgcggaggcgcgggcggccggctgccgcctagttgtgcagcccagaccaaggaaagagaagtgggaggagcggggagctcggcgtcccgcgtcctccgcggctcaggacgactacgctcggcacgtccgggaccctccggccgtggcggttgcagcgccaaaagctcgggcctcagcccctgacgctgtggtgactccgccgcgcctcgccgtcgcccctgtccccgtcctgcccgccgcctccgccgctggggacatgtccaaccccggaagccggaggaacgggcccgtcaagctgcacctgacaggtgagggggagcgccgggccgggctgggcagccgccgggtgggcgagctggcggggggtgcctgttgacttgggaagggccaggatcgcgatcaatggtgagttgggggttggaggaatgggaaggcctagttcagggagagtaattggaaaaccactcgctccggtttggacattctttaaaaagccgaggatgacttggggagggggggtggtcttttgtggaggggaggttacatcggttcgcatcgcaggcggatttcaggtccgaaagtcttggtcaaggagcccgatgctgcctctcggggctcggggaggagcccctgggctaccgcccaggtgggatcgtgaaggggatgaagagctctcgtggcgaggattattgaatccggttgctgactgcgcgcaactttaaggagtgtttactccttaaagatggagcgcttaacggaagtgtgtgcgtgtgtgttcccgggttgttaccttgcacacctacttatgcccgcgtgcaaaatccttactctccgcctccggctaccgctgccggggccgcacaccttaaactcacgtctctctgaggagaggagactgaggttgacttttcccgtgtgcctgtctgatccgacggctcgggctcattgtacactgtgttttggaagtgtctgattgtagggtggcatgtttggggttgtaccttgtaggccgcagaacttgtgtcacttctaactccagacctgctttaaaaacacactttttggcggrggtggggagggggtacttttctaactatgtgctcatacaaactttagagcaaactttctcttactctccccaccctcccccttctttttctaaatggaaaataatgtccggaggggttgctagatagaagactacacttacaaagtg

SEQ ID NO: 690356 - DNA, 1741 bp, Homo sapiens
cagaaaaagattaataccagaacaattataacatactctaatagaagttacatgaacgtagtctcttttctctaaaaatatcttattgtactgtaccactggtaactcaaactgcggataaggggggactgttgtacaacagtctcaccatttgccggtatttccgaatcatttttagcttgtcttctcctcccttgttccttctttctgttcaaggctgctgattattctccaggaggctcttctagctccaatcacattcttatatgtaacagataggaggtttctttcttcagctgtcagctccacatccatccctgctaatttcttcactgactccaccatttctataagggaaaagcaaaatcccgggtccctcagacaaaagggcgggtggaggaggagaagccgagagtcctgctccggcgccgccggagcaccgcctgcctcagccgaccagcgccgtcgactactgggcctagcccagacgagaggagggaaaggccgcagaggccgcgaggatgctgcggaggcgcgggcggccggctgccgcctagttgtgcagcccagaccaaggaaagagaagtgggaggagcggggagctcggcgtcccgcgtcctccgcggctcaggacgactacgctcggcacgtccgggaccctccggccgtggcggttgcagcgccaaaagctcgggcctcagcccctgacgctgtggtgactccgccgcgcctcgccgtcgcccctgtccccgtcctgcccgccgcctccgccgctggggacatgtccaaccccggaagccggaggaacgggcccgtcaagctgcacctgacaggtgagggggagcgccgggccgggctgggcagccgccgggtgggcgagctggcggggggtgcctgttgacttgggaagggccaggatcgcgatcaatggtgagttgggggttggaggaatgggaaggcctagttcagggagagtaattggaaaaccactcgctccggtttggacattctttaaaaagccgaggatgacttggggagggggggtggtcttttgtggaggggaggttacatcggttcgcatcgcaggcggatttcaggtccgaaagtcttggtcaaggagcccgatgctgcctctcggggctcggggaggagcccctgggctaccgcccaggtgggatcgtgaaggggatgaagagctctcgtggcgaggattattgaatccggttgctgactgcgcgcaactttaaggagtgtttactccttaaagatggagcgcttaacggaagtgtgtgcgtgtgtgttcccgggttgttaccttgcacacctacttatgcccgcgtgcaaaatccttactctccgcctccggctaccgctgccggggccgcacaccttaaactcacgtctctctgaggagaggagactgaggttgacttttcccgtgtgcctgtctgatccgacggctcgggctcattgtacactgtgttttggaagtgtctgattgtagggtggcatgtttggggttgtaccttgtaggccgcagaacttgtgtcacttctaactccagacctgctttaaaaacacactttttggcgggggyggggagggggtacttttctaactatgtgctcatacaaactttagagcaaactttctcttactctccccaccctcccccttctttttctaaatggaaaataatgtccggaggggttgctagatagaagactacacttacaaagtg

SEQ ID NO: 690357 - DNA, 1741 bp, Homo sapiens
cagaaaaagattaataccagaacaattataacatactctaatagaagttacatgaacgtagtctcttttctctaaaaatatcttattgtactgtaccactggtaactcaaactgcggataaggggggactgttgtacaacagtctcaccatttgccggtatttccgaatcatttttagcttgtcttctcctcccttgttccttctttctgttcaaggctgctgattattctccaggaggctcttctagctccaatcacattcttatatgtaacagataggaggtttctttcttcagctgtcagctccacatccatccctgctaatttcttcactgactccaccatttctataagggaaaagcaaaatcccgggtccctcagacaaaagggcgggtggaggaggagaagccgagagtcctgctccggcgccgccggagcaccgcctgcctcagccgaccagcgccgtcgactactgggcctagcccagacgagaggagggaaaggccgcagaggccgcgaggatgctgcggaggcgcgggcggccggctgccgcctagttgtgcagcccagaccaaggaaagagaagtgggaggagcggggagctcggcgtcccgcgtcctccgcggctcaggacgactacgctcggcacgtccgggaccctccggccgtggcggttgcagcgccaaaagctcgggcctcagcccctgacgctgtggtgactccgccgcgcctcgccgtcgcccctgtccccgtcctgcccgccgcctccgccgctggggacatgtccaaccccggaagccggaggaacgggcccgtcaagctgcacctgacaggtgagggggagcgccgggccgggctgggcagccgccgggtgggcgagctggcggggggtgcctgttgacttgggaagggccaggatcgcgatcaatggtgagttgggggttggaggaatgggaaggcctagttcagggagagtaattggaaaaccactcgctccggtttggacattctttaaaaagccgaggatgacttggggagggggggtggtcttttgtggaggggaggttacatcggttcgcatcgcaggcggatttcaggtccgaaagtcttggtcaaggagcccgatgctgcctctcggggctcggggaggagcccctgggctaccgcccaggtgggatcgtgaaggggatgaagagctctcgtggcgaggattattgaatccggttgctgactgcgcgcaactttaaggagtgtttactccttaaagatggagcgcttaacggaagtgtgtgcgtgtgtgttcccgggttgttaccttgcacacctacttatgcccgcgtgcaaaatccttactctccgcctccggctaccgctgccggggccgcacaccttaaactcacgtctctctgaggagaggagactgaggttgacttttcccgtgtgcctgtctgatccgacggctcgggctcattgtacactgtgttttggaagtgtctgattgtagggtggcatgtttggggttgtaccttgtaggccgcagaacttgtgtcacttctaactccagacctgctttaaaaacacactttttggcgggggtgggkagggggtacttttctaactatgtgctcatacaaactttagagcaaactttctcttactctccccaccctcccccttctttttctaaatggaaaataatgtccggaggggttgctagatagaagactacacttacaaagtg

SEQ ID NO: 690358 - DNA, 656 bp, Homo sapiens
tcagcattttaaaactcatgaagtaataattttgcatatctaggtagattacttaaggttcaagtattatgttaagttttgcaaaaatatagaaaagaaagccatctagcatctactgctattaacatatatgtatttctcttcaaaatataatttaaaaactaaaattactacttgaacatatccttgaacatagtaaattcaagcaatgccaaaaaggtgcttataatgaaatgcctcccttctttatacccctagtcgctctccctcaagttgtttatcatacaactagtaaagaggtatatatttttcaacctatttttgaaatatacatctagaaagtataccccaaaagtgtacagcaaaataaatttacctgagctttacacacccctgttactagcatccatacggaaaaccagaacattgctagcaccaccaaaagcttcactgtgcttatccgcaygttttaagtacatagttgtacttaaaactctatgatacctttagaataactctaagatatctttatcttttaaaaactctaagatacctttagaataactatacttatttacatcaaaaggtatctttcaataatatttttagtcttttttttttttttccatttacagaaagcacttacatgaaccata

SEQ ID NO: 690359 - DNA, 602 bp, Homo sapiens
tgctaccctccctcctgaatgtgacacagctgagactgccctttgggagctcttctgtagtcttgtgaggaaggaaggggcatgttggtcccttctgggccttagaatgaaggaggcagcaaaggtgctttaggagccccgtgtgcctggagaggccctgctggtcaggaggccacagtccctggccaggccacagaggctgcagttgtcctgtagcagctgcagggcaggagagttgctgccaccgaggtcaccctcagcctgatcctcacagtccgggttgtcgtcagccagaaggctcttctctgtgcgtgtgattgtggtttccaagaacatgggtgcctgtgtttgtgggtgtgtctgaaggtggagctggcggtgtgtctggctgggagtcacatcaygggtgtatgtcttgcttcttataggccagcgtctctccttcgctggggctcagccaggccacagggccgggggcttctgtctctcttctcccagcccaaggagaaagctgcccttgccctgcccctcccctccgctgcccccctccaccgcctgagatggcttccttctccacagggaattcccagccctgtcctctg

SEQ ID NO: 690360 - DNA, 609 bp, Homo sapiens
tgtctttttttttcttataacttgcttttggccattttattacttctttgtacctttaattgagggacataaacaagtaagagttgaaaatccagtcaatctgacaatgttttgggaaaaaaacttaattcagatagagaataaaatgaacaattaagrtttcataattattcatttcacttaactttgctgttgctttcctcttttagaaagtcatgtacagaggagtttaagacgacagatgggaagcagctagtatacactgctctcatggagatgaaacaaagtggtgagtaaatactagttcctcaagtggattgtcaaggagatcccatgaagattcaccaaggaagcaacaggaccaacagagaacaagaggagcgaagccaggcagctgcccacccagaactgatggagagtgggggaagctccctcacgcagggaaaggtgagtgagtgagagtcctgaggggatctatacttctgtgatagacctttgcaatcccggacatgagagatattcctgacccccaggagcctccagattgagatggagagccacctagagtctttgcagaagaaccattgaagcccacatggggccctacag

SEQ ID NO: 690361 - DNA, 609 bp, Homo sapiens
tgtctttttttttcttataacttgcttttggccattttattacttctttgtacctttaattgagggacataaacaagtaagagttgaaaatccagtcaatctgacaatgttttgggaaaaaaacttaattcagatagagaataaaatgaacaattaagatttcataattattcatttcacttaactttgctgttgctttcctcttttagaaagtcatgtacagaggagtttaagaygacagatgggaagcagctagtatacactgctctcatggagatgaaacaaagtggtgagtaaatactagttcctcaagtggattgtcaaggagatcccatgaagattcaccaaggaagcaacaggaccaacagagaacaagaggagcgaagccaggcagctgcccacccagaactgatggagagtgggggaagctccctcacgcagggaaaggtgagtgagtgagagtcctgaggggatctatacttctgtgatagacctttgcaatcccggacatgagagatattcctgacccccaggagcctccagattgagatggagagccacctagagtctttgcagaagaaccattgaagcccacatggggccctacag

SEQ ID NO: 690362 - DNA, 595 bp, Homo sapiens
ttgacttactttaatggcccaagataatttaacttaactaagctcctaacaaacttctacttctattttaattcccctgtctttgtaactttagataacccatgtgtgcctcttttccttgttttttttttctaagtctctctgtggtacactttcagcaattacttgaacccctaacaactgaatggtaaaggctgccgtctctctaggtgtcaagcagttcaaaagtgaggcccaggcaggacatcccaggctgtgtggatctgttttctgaaccatataagccctgcaatgcatagcaaataaactcattatgtggctgccaacctttaatttgtaaagagaataagttattttgtgacaggccacaccttactgccaagcggcggggcaatgtgctctccacctgggcagccaggtgcctacctaaaagctatggcgtctatkcatggaagaacggagcaatgacaagtctttgccaccttcccttcccactctcgatcaccttagaccatctatagacatttcttcatgtcagaaaatccttacttctattattaaagaaaaaaaagaaagctcttcatcaactctgtgt

SEQ ID NO: 690363 - DNA, 1376 bp, Homo sapiens
  misc_feature 895: n = A,T,C or G
ttcctatggtatcagcttcatccaagcctgtctctttttttttaatcgtatcaggattggtcccgagcactggtggggacagatgtaggcatactcatactcaaggagaggaactgagagccatttatgaaagttatcttaggagagcaagaattgtcattatcacaagttcttagcaagcatatttcctcatctcactccttgagaggacttacttattcgcttctgaatccacagttgtagccacgtgatggggttactctgatatcagtttaggccttaatcagccgctccacccctgagaccagaggaagagttagcttcttctaaaactcacaggcttgagtggacaatctataaattgctagacaaaatttactatatatatatatgacattgtggttgctacaccaggatctattttccttcccttagtaaatttaaagggtgatcaccctttaaaatacatagggggatggatgggtgagaggaagggtgaattgatggatgaacaaataggcagatgaacagacgtgtggacagattggcacagaagatcaaattaaatcacattgctctacaacctgctttttagtaaccgtattccataaatactttgtatgtcaatcttcattcttatatcattttaaatgataaataatatcctggtataatgactaatgatttgaatcatttcctattattgaacaataaatgtttaaagtgatggatatggtgattaccctgatctgatcattatatatcatgtgcatgcattgaaacatcacactgtaccccataaataggtacgactataatatgtcaattataaatattcaaattaattaatttaaaaaatttcagacaagcaggctctatgcagatcatgaataancaatatagagcaaaataaacatgggcccccctctacatagagcacatagcttagtagagggagacagatcataaacagattaacaaataggtaattacagacttagaaatatgccataaaggccatgcttaggtaaaaaattaatgaagggttgtgcatggatcctatttaggtgaaacatcaggggaagcacatgtgaaggacaagggacaaggtatcccaggtacgaagaacaccatatgcaagctgtaagtcaggaaacgttggtcaagactctgcaaagatcagtgtagtgaggatagaggatagagtatgggaatgaaagggtaagctgaggcaagtttaggagaawaagcaagacatcataagccacagtctgagatgagatttaactccaggaaaatgcaaagttagtgcagccttttaagtcagagaatggtaggatgatatttaatcaagaaaaatttgactccatgtggtg

SEQ ID NO: 690364 - DNA, 658 bp, Homo sapiens
agaagtgaaatgacttactcaagtcataaggctagtcactaagagatccaggaatacaacttggctctgctgatttcagagatttggactggaaagtacagtgatattttacacctctgtgtaaagacactagattcacaaagggtgtaaaatgtattcagtcactttgagaattttcaaagcaacttgacattaatttatgtcattaattaatcatattgactcttattttcaggcataaaatactggccatcacatgatgttgacctgaaatttaaatccaagcttctacctaggtatttaaaagccccatgatagacacctctctgtagcaacagagcttttctctttcttttgcctattaaacttccgctcttaacctcaaaaaaaaaaaaaaaaaaaaaagtcccattggaggccgggcactgtgactcatgcctgtaatcccagcactttgggaggccgaggcgggtggatcacctgaggtcaggggttcaagaccagcctggccaacatagtgaaatcctgtctctactaaaaatacaaaaattagctgggcaaggtggtgggcrcctgtaaaaaaataaaaataaataaaataaaagccccatgatatgactacaaccttcatcatctcatcttctacattctaccacag

SEQ ID NO: 690365 - DNA, 427 bp, Homo sapiens
gaaaatttaaaatgccacggaaatttttgtgttttcattatatcctttccatatcctccaatgcaaatgttataaatcagcctataagtggaggtctrttcttaaactaacatctcatttgtttgagctaaaagccaaatactttaactcatttacccatgaaaatttttgtttcacatgtaaagtaaaacaaacacaggggcaaacctttataacatttattatagaggagaaagagagtaggatagttaagaatatatttcttctgagagagatttcatctgtgtagtttttagaccagtcaactgctgcataaagtttccaaatatgccagtgcttctcaaagtccccagtctcagtgaaggcaacataggttcacatatggggcagtcccatggtcagtccctgatttggccaggaagtggca

SEQ ID NO: 690366 - DNA, 583 bp, Homo sapiens
tttgcaactttctacctgatctcaatgttccagcattggcactttgttcatggcctgctaaattrttgctgtggtggagtttgagcagggggcctcctattcttccatcttgctgatacacttttttttttaattttctgaaaatgtttttacaaaatcagcaaaatcagtattatttcttccttaaacgtttgatagaacataatattgaagtcacctgggcctgaagatttcttgacagatatgggctatttgaattttctattttatcttatgccagttttattaagtttcaatttttaagggcttttcctccttcatctaagctattgattttgctgacataggtattataggatgtataagatatttccccttttatttctgattaataatttgcgttttctttctctttttcttgatttgtctagtgagatgtttattacttaagaaaacatcttgaaaaccagctcttggtttcattgatttctctactgtttaataaggtttgcattttatactttttcctgctttcacttttatagttgcccacgtatttatcgttttcagtattctttattcc

SEQ ID NO: 690367 - DNA, 583 bp, Homo sapiens
tttgcaactttctacctgatctcaatgttccagcattggcactttgttcatggcctgctaaattgttgctgtggtggagtttgagcagggggcctcctattcttccatcttgctgatacacttttttttttaattttctgaaaatgtttttacaaaatcagcaaaatcagtattatttcttccttaaacgtttgatagaacataatattgaagtcacctgggcctgaagatttcttgacagatatgggctatttgaattttctattttatcttatgccagttttattaagtttcaatttttaagggyttttcctccttcatctaagctattgattttgctgacataggtattataggatgtataagatatttccccttttatttctgattaataatttgcgttttctttctctttttcttgatttgtctagtgagatgtttattacttaagaaaacatcttgaaaaccagctcttggtttcattgatttctctactgtttaataaggtttgcattttatactttttcctgctttcacttttatagttgcccacgtatttatcgttttcagtattctttattcc

SEQ ID NO: 690368 - DNA, 620 bp, Homo sapiens
ataaatggaattatttgaaaatctatcatatataataaaattcactccctctttsagaaattcttttgaattctatcctgattgtcctggaaggatggtagggtatagtgtaggaaaaaaatatttttttagtatttagtttatgttcacaagtaattcctctaatcaatgactcattttgaagatgcaggtacttggcaacattattacccctgccccaaaatacagcctgtctcatctgctcctgtgggcttaaagctctcaagcatctgcccccactttatcaagcaccctccccgatctgcacagaatatcaaacttccctgccttttccaacctcttggcaactactcttgctttgcctcaggacctagatcttatatatttgaagatagagactcctaattttgcacattggatttattttgtcctacatatttttttttctaatagagataacagccccttttaacctcaacaaatacacaaatttcactcaatacccaccacccatctctctctctctctctttctccccctccctcccccccccccagaacctaataactgggtctcagccctaataaaattttcactgtgaaaattttactctaaataat

SEQ ID NO: 690369 - DNA, 620 bp, Homo sapiens
ataaatggaattatttgaaaatctatcatatataataaaattcactccctctttgagaaattcttttgaattctatcctgattgtcctggaaggatggtagggtatagtgtaggaaaaaaatatttttttagtatttagtttatgttcacaagtaattcctctaatcaatgactcattttgaagatgcaggtacttggcaacattattacccctgccccaaaatacagcctgtctcatctgctcctgtgggcttaaagctctcaagcatctgcccccactttatcaagcaccctccccgatctgcacagaatatcaaacttccctgccttttccaacctcttggcaactactcttgctttgcctcaggacstagatcttatatatttgaagatagagactcctaattttgcacattggatttattttgtcctacatatttttttttctaatagagataacagccccttttaacctcaacaaatacacaaatttcactcaatacccaccacccatctctctctctctctctttctccccctccctcccccccccccagaacctaataactgggtctcagccctaataaaattttcactgtgaaaattttactctaaataat

SEQ ID NO: 690370 - DNA, 599 bp, Homo sapiens
gttgtttaggggcacttaatctgtccctcagtttctgtttttaaaatcagaataatagaataattaataactttctcatagaattgttatgaagattaaataagtaaacacatgcaaaaagcttataaaaatattaccatatgtaatttaaacaacactggagttattttctaatctctttattgttatggacattaatgtatttttgttgttgaaatgggagagtgttacaaaaaaaagttagctgggtgtggtggcacscgcttgtaatcccagctacttggaaggctgaggcaggagaatcacttgaacctgggaggcagaggttgaagtgagcggagatcgccccactgcactccagcctgggtgacagagtgagagtccatctcaaaaaaaaaaaaaaaaaaaaaagagaaaaaagagatgggatagtgtttattcagtgagcacctagaattaaaaagtgaattgcgtgaataaattctctcattaacatggtttattgtggttgtaatggtggggttagtaaagaagtagagatagtctcctagtctccaaaatgacttggcacttgaacagtttaaactacatactaaagt

SEQ ID NO: 690371 - DNA, 599 bp, Homo sapiens
gttgtttaggggcacttaatctgtccctcagtttctgtttttaaaatcagaataatagaataattaataactttctcatagaattgttatgaagattaaataagtaaacacatgcaaaaagcttataaaaatattaccatatgtaatttaaacaacactggagttattttctaatctctttattgttatggacattaatgtatttttgttgttgaaatgggagagtgttacaaaaaaaagttagctgggtgtggtggcacccgcttgtaatcccagctacttggaaggctgaggcaggagaatcacttgaacctgggaggcagaggttgaagtgagcggagatcgccccactgcactccagcctgggtgacagagtgagagtccatctcaaaaaaaaaaaaaaaaaaaaragagaaaaaagagatgggatagtgtttattcagtgagcacctagaattaaaaagtgaattgcgtgaataaattctctcattaacatggtttattgtggttgtaatggtggggttagtaaagaagtagagatagtctcctagtctccaaaatgacttggcacttgaacagtttaaactacatactaaagt

SEQ ID NO: 690372 - DNA, 608 bp, Homo sapiens
tttgtgctgcctttgtgaaatccaccatttaaaaagtaaaatgtgattttaaaagaatgattcattggaaaataaaaatagaagtgaccaaaatgtttaaaaacaaggagcccttgtttatctgactgatgataataacccaagcatcactttcccaaaagaattcattgcataaatatcttctggagatgtggaaactggggttcctgggggtttcagtcactatttctagccagaaattcagagacacaaagctcttgaatttacgttaaaaattcacttcttagttatagacctgcacatttctagctgtagtaattctgcaaagcagcagccggtagacactaaaaggagcttagctgcaagtaaaatgggaacatagaaggtggtagcaacctgcctctaggtaatcagtccgtgtctagtatagctagtatatatatatagcttcctttagtgaactcctcctttctacccctcttcgaattctcctggaacgggcaatcccaggacctttcctctggtaaacccaaggacacttggcccaagctaggccaatcagacctttttctcctaggacacaacaaagttaaaactgkgtagcttga

SEQ ID NO: 690373 - DNA, 575 bp, Homo sapiens
gtaacaatataattggtgtaataacaatacctctaccagttgttttacactgtatttaaagtcaacactaggagatgaccatttttacttagaatgaatgatattcaaaaaatgtcttgtttttttttcagttgaaaaacaacactaaggaacatcatcaaaacccttccaatgtttattgtagatccctagccatgtaaaatttcaattccactttgttttcttatcaagatccttaaatcacaaagccagcaacacttcatttattcatcagacaacacattcttattggatacttaatatgtgccrgtcatgactctgtggttctagtgacaaagaagagaataaaataaacaaaaacacctgtccttctgaagcttatattcacagaggttggcaagttttgctgcaaaaggctagatagtaaatacatattttaggcttttggagccatatgaaaatgatcataacacatgaacaaacgtgtgcagctgtgttccaataaaactttactcacaaaaatgaatggggagctagattttgtctatgggctatagcttattgacctttagcgc

SEQ ID NO: 690374 - DNA, 1529 bp, Homo sapiens
gacttctctgccctacgtagctcccgacgcgcgactccgctggcaacccggcagcggcgactcaaacttttttgctgcggagacgggaggggcgcgctgggagctgagcctttcctccgaggggaagtgggagacgcgcgccgccaatccgcgccgggcctggcgctgacgccagagacgctcgcccctgattggctcttcccgaaggggctgccccccctcctttttttttttttttttttttttcctgttkgaaataaattaggagttaattacaggagcagtcagcaaagttgttattaggcgatccctgaagggttataatcacgccgaaactgaaaagcccgagacctaattaagagcgattatttaaagcggaagttcgccgagtcccatttcttctctcttttgacccttctttaaaagggaccctgcgcccatcccactctccctttaccgccagaataagttcaagattcgcaaacagcattgcagaaacatttacgaagcccctactatgcgtcaaaattggcttactttacagttccagaaagtcggtgctgaaactcacaggccagtatccctgtgaaagaaatgtatgcacttagaagagtaactcgccactagccagcgctcaaaagcgcccactgttattattacaactctttcccctggaaaagaggggccggaaggagcccgagaagtggtcaggagtgcctctctcccaaatggttcggagtgaagaatttaaatcagttgtccccatctctctcactagaaagcaaatccagcgcacttttagaaagttgaaatctctgtacttgtctcctgaacctcctttctgagcgcgatccggatccgacctttttctcaagacagtgcaagtgtgcattcatgagtttgtttgagcctgtgtttgtcgtgcgtgtttgaatgccagtgtttgcctcggagggtaatgggggtgggggggaggaggaaaagtcgccaatatctagtgcctccctctcgtttgcaagtctcagaaataccggcttccaagtttgcacaccccaggcctacatatcattttgggaagcacatttttattcatggcacctggttttttataaaaacatagatgtctccaccccaccccaaattataccctcggtaattcctttccaaagcctcagtgatgactgtctcagcctggggaaggggagagcgagcttcgaggattagaggcctcggatctctccgctggtcctcaaaatgcctgacctagaaggttagcttcaaaagacttttttcaggctgcggctgtcttttcctatatctgaacgattatcctgcgactgacgaggtaaataggaagtcacccagttcaggacctcgcctacagcagatgcttgctaaacattccctagagcattggaagggagagacattgtttttaattatttaaatgaccaaggcttggaggctacctcccagttcaggagtattagaaacttgacccctagacctacagacccttatgtaccctt

SEQ ID NO: 690375 - DNA, 1529 bp, Homo sapiens
gacttctctgccctacgtagctcccgacgcgcgactccgctggcaacccggcagcggcgactcaaacttttttgctgcggagacgggaggggcgcgctgggagctgagcctttcctccgaggggaagtgggagacgcgcgccgccaatccgcgccgggcctggcgctgacgccagagacgctcgcccctgattggctcttcccgaaggggctgccccccctcctttttttttttttttttttttttcctgttggaaataaattaggagttaattacaggagcagtcagcaaagttgttattaggcgatccctgaagggttataatcacgccgaaactgaaaagcccgagacctaattaagagcgattatttaaagcggaagttcgccgagtcccatttcttctctcttttgacccttctttaaaagggaccctgcgcccatcccactctccctytaccgccagaataagttcaagattcgcaaacagcattgcagaaacatttacgaagcccctactatgcgtcaaaattggcttactttacagttccagaaagtcggtgctgaaactcacaggccagtatccctgtgaaagaaatgtatgcacttagaagagtaactcgccactagccagcgctcaaaagcgcccactgttattattacaactctttcccctggaaaagaggggccggaaggagcccgagaagtggtcaggagtgcctctctcccaaatggttcggagtgaagaatttaaatcagttgtccccatctctctcactagaaagcaaatccagcgcacttttagaaagttgaaatctctgtacttgtctcctgaacctcctttctgagcgcgatccggatccgacctttttctcaagacagtgcaagtgtgcattcatgagtttgtttgagcctgtgtttgtcgtgcgtgtttgaatgccagtgtttgcctcggagggtaatgggggtgggggggaggaggaaaagtcgccaatatctagtgcctccctctcgtttgcaagtctcagaaataccggcttccaagtttgcacaccccaggcctacatatcattttgggaagcacatttttattcatggcacctggttttttataaaaacatagatgtctccaccccaccccaaattataccctcggtaattcctttccaaagcctcagtgatgactgtctcagcctggggaaggggagagcgagcttcgaggattagaggcctcggatctctccgctggtcctcaaaatgcctgacctagaaggttagcttcaaaagacttttttcaggctgcggctgtcttttcctatatctgaacgattatcctgcgactgacgaggtaaataggaagtcacccagttcaggacctcgcctacagcagatgcttgctaaacattccctagagcattggaagggagagacattgtttttaattatttaaatgaccaaggcttggaggctacctcccagttcaggagtattagaaacttgacccctagacctacagacccttatgtaccctt

SEQ ID NO: 690376 - DNA, 891 bp, Homo sapiens
ctcacgaaagaaaatggtttctcctcaatgtctggctaagcccagttagctcatctttaaaatgggggcacaactctcagggttgagttttgaacctgtctcgttcctggtacatccaagtgctcactgaacatggatccaactccttcactccccaggcagagactccggggaacagtgaaacaaaaacaagccaagtggccagagcgcagggccgagggctgtagaaacggaccaccgagcgaccccgtaaacccagctggggttcgctcttgaaaaaacaatctgtatgtcgagggagtctcagacacacacagcgcggttattacccagagggtgtcttggatgcggacggcgcactgggcgcgccgaacgccccgggcacccaggagtccagaggccctgggcttgctttcccgggagtgtagcgcacgcagaagggtctcggtaccctcagccctggaacacccgycccccgctccctccagtaccccgcgctacctcctactcctgccccggcgcgcactcacttggcggcggcgaatatcggccgggttcctgcatccacgccgctccatcttctgaattttccgacttgaccgaggcggtctcgaagggcttcaccagcggcccggggctgtgcgcttcccgagcgccgtgccccgacagcagcagtggccgcagggtggccccggccgaggcgctttcggccggcagcggggacgcctccttgggcggcttcttgtcggacatgagcgcctccacgctgaagggcaggctggagaccttgacgcggcgctcctccgcggccccctcggcgcccccaggccccgggcctggtccggccaccactgctgggccctcctcgtcgggcgaaaacaagtcattgcc

SEQ ID NO: 690377 - DNA, 530 bp, Homo sapiens
catttattatgtaataagttaacaaaaatcacatctacagtattataggttgttatatcagtgactctatttcaacataactagtttcctttgtaattgtatatattttatattagcactaaaatatcttttccaagaagttcatcagactgccatggtataaaaaaaggttaaggatgccaatgtcaagtgttttataaatagttttgtgatttcaaccactggacatcattttctgttatttgcagtcaaaggcaatcctaagtgatgtacaattacatgtttcctgaatcacaggtcrgtatagaccctatactggctttctggatgtggtgctgggacttaacatagcctaactcatgaagctgggaaatctcagtccattatattatacgaatataagatgtaatcatcatctttcagtgtttgtatggtgatggggagtatttcacacacccatttacttactccaaaaatgtttcctaatgcttactttgtgccaggactttcaatgggctggcccctccttg

SEQ ID NO: 690378 - DNA, 1149 bp, Homo sapiens
  misc_feature 473, 474, 495, 558, 559, 560, 561, 562, 563, 564, 565, 566,567, 568, 569, 570, 571, 572, 573, 574, 575, 576, 577, 578,579, 580, 581, 582, 583, 584, 585, 586, 587, 588, 589, 590,591, 592, 593, 594, 595, 596, 597, 598, 599, 600, 601: n = A,T,C or G
  misc_feature 602, 603, 604, 605, 606, 607, 608, 609, 610, 611, 612, 613,614, 615, 616, 617, 618, 619, 620, 621, 622, 623, 624, 625,626, 627, 628, 629, 630, 631, 632, 633, 634, 635, 636, 637,638, 639, 640, 641, 642, 643, 644, 645, 646, 647, 648: n = A,T,C or G
  misc_feature 649, 650, 651, 652, 653, 654, 655, 656, 657: n = A,T,C or G
gaattcagagctatttcaaagcataattataccaatctgcatataaaaggctatacgtcctacagaggattctatggaaaagcaaactgtttcaaagaagaaaattagaagtaattcccacaactaaaattcactaaagttagtacatgtttcatctggtaagtacagctttattttttttaagccagtagatcaatcccaaaaatagtggggatgattttttgtgtgcaaggtcagggaaagaggagtaagcaagaactgaaaattgaagacgaaggtaaagcaacagggtgtgtacattatacatattggttttgaaaatggccacatcacaccagaaaaatcaatacttcatattactgtatcagacaataggattctcacctacataatgtattaactatttattggccacatggcaatataccccaaaacctcacaacataaaaccacaaatatttattatctcacanntctgtgtggttcaaaaaattntagtgcagcttaaactggtgcctctggctaagactctcaagaggtgcagtcaactgtcacagnnnnnnnnnnnnnnnnnnnnnnnnnnnnnnnnnnnnnnnnnnnnnnnnnnnnnnnnnnnnnnnnnnnnnnnnnnnnnnnnnnnnnnnnnnnnnnnnnnnnaggctgaaccctgggtagcaaggggaaaaacattatttttgatgcacttgaccttatagtgcatacccaggaacatgctgagtgtaatattttttacttatacccaaagagtagaggttactattggaacctgacaggatttgtgaggattcaaaggccagggaaacatagttctgactaggagacggctctgtttgtggttcacagaggtaagatgtacactttacctgtgtctgttcatattcrgtcaattatatcaccatcagacttgtgatggtcacatgttttataccttatggtactttgttaacagaagaccaagaactctatggaggaaaaattaagagtttattttctattaaaacaaaatttgcagattgggaaagcacagccttcaatacaatgaaaatgtgctctctgaagaacaaagaaagcggctatcttaaatagagaaaattctcacccaggttttcactgaggacaatttatgca

SEQ ID NO: 690379 - DNA, 610 bp, Homo sapiens
tcccctccaagcttacaggaaaacactgtttatttctgacatttggaaaagctgtttcagcctcagtgttgactgatagtaatagatataagaattaataaaagagatgtatttggtgagtcaccagcacaagagctaaaacaggccacatcccaaggtaagtgaagcagaacctagcatcatcccatggtgttttgaagctatgattgaaagtcagaagggaggaatatgtgtttgccaagaaacatcaatgcttttgacttctttcaacctagactcattggtggcatttccagggwgctgatgatgtctggaggggagagtataaatctaaagtcaaaagccttgctgaaatagatttgctttagcttcttattttaaatgcatacatgtttcatggtgaaaattttgaaatggaatatgttagcaggaagtgataggctagtcttcactggtattcaggcaggtctgcctggtttttcactaagggtaaaaaaaagcccaggaaatctcacatttttcatattcctactcatatcctcttaataaaaaagacaaacctaaaaacaaaaaaagccaaatacttcaattaacgaacttattctaataa

SEQ ID NO: 690380 - DNA, 645 bp, Homo sapiens
gaaaggtcatcagtttttggccataggacattttcctaactgaaatgatggtgttgagacattcctgaagctctttcaaaatcagattggcaacatgacttcctccttatacagagccaaaaatcttccctttgcaactgcctcctgtttgtcctggttctcccctagtaagcaactttgaaagcttatctaatcatctttctgtataacaacttcttaaatattttaaaacagtgctcatttttcttttattcaaactaaacatgtccagtttctgtactagaaatgttatggacttagccattatctgaaataggggagtaattttcttatgcaataggttttactggaaaatgtaaatccaattttcataacttatcttttcttataccagtagggtttaatatgtaaagaaagtgttttaaacctgaagtaccttttttttaagatttttaaaaaggcatgaatgrtatctccctaatttacttggtttctaaagcaacattttcattaaaaaaactatactaattagaccttttagaaaataagaaagtataattaattgaaatgtttttgcttgaaaagcctttttgtttgtctttaatgttgaaaatagtttcctgacataggaaatgaagagaagcc

SEQ ID NO: 690381 - DNA, 3075 bp, Homo sapiens
tgttggaaggcagtggcctagataaagcattgcagtactgtggttcagagaaaagctttgtggaatatcttctctctcagtcagccttagacttagctagagtcttcatctaacttctgtgatctgatggatgcagtatctacgtcatcaatagagtcttctacaatgatctttgcttaagttcttctaaaaagttcttataatgatcttctaaaaagatcattaagtctccttaatgatctttgctgtctttacatttccgaaggtccccaaagtgcctttatgcctatctttctgtttctctcttctctgtttctcccctctttccctcctctctttctttctctctgtcttttacacttatttattgagtaccacgtacagtactgtgcgacaggggactgcttcctcgtaacacgaccctgttacaagatattatttttcccttcttaacacatattgcmcctgaagctttgggcagttgagtgctttagtgctgtaatagggttacactgcctggaagttttgcagagccaggtttcaagtcaagttctctctgacatcagagccgctgcacttttcatcatatccagaactttcaggtctaaagtgatccgctggctgcaggtacccctaaggctctccaagtagctgacttgttactaatttgtagatctcaggatctccttattggtgagggaattaatagtaaaatctaaaaagaacaattacctgaggtggctgaggggatcctataggaatcgactgcttgcacctaaaagcagagtgtgtaattcaactctgcagcaaatcatcttaattttataagacttactcagagaatgctaattaaaaattcagattcttgatcctgtagcctgtctttatgatttactagaacagaaatggagcccaggaatctgaatttttagcagtttccctgggtgatcctatgcaagtgttctggggaccatactttagtatgcactgctggaaggcagtgttatcaaagtggagaagattgaaatagcctgggaagctttcaaataatatagatttccaagccttaccccgcaccaatggaattagaatctttgcaacaggcaaagatggaccctgagattctgtacttttttaaagttccccaggtgattttgaaataaccagtcttatcactatcatttggtaaatgttttcaactactttctcatccatatgtcattagcgtcagactcttggttctatatctgcaatcctgatacctccttccaggcctttgactgtaccacctcttccccttctcccccgctcctctttctaaggggttagaatacacttaaagccagactgccattttgaaaaaatattcccctaggagacaagcacatttcaagcaccattctgagctgaattcttgatttcaccataataataataataataataataataagctgttttaaaatgatgaaaaaacatggtttagtgaaactattgagaattccataaaatttatcctacatgactaagcagtagcagccttttgtattcagtttaacccacatggaaaatgttaaatcaccatattaacaacacaatctagcagttaaatagcatgacagttaccatggaaatgtgccaaacacaggtgggctggcaatgtgtgtagggggttttggaggggggatgcattgtagattagaactgctatgcctgtttttatatttaaattacttatacagtcaacggattttaaagaaatgcagctggactttctaaattatgatcttccgcctctttaccttgtcacactgttagagggaattatttaattgctataaacgcaaactttttcttttggtgaaaacgtggttatttcttccttcagctagaatctctgattctcttaatacacacacttctgggtgtagtagtaataataataataattatcaaaaatgtaaaatccaagtgcattctatatcctgcaagacactagataaatggaagcttacctacctctctgatgtcgccttgtacagccacttgttttatccttatcataaccctatgatatagatcctattcttattttttcctgtttcatagataaatagaaaacttagtagaataagagctagaaagcaagcctagccttttggatgccaaagcctataacactgtactgcctcatgaccaaagatcttacagatttaaacagcaacaatgaaaccgattgttaaacttgttaaaggagacttgctacccacacatttagattctttacccacactggtttggccaactcctggtggcacatttgtgagtctgcatcataatcactcatggagattattaaaaataacagtgcctggctctaccccagacccgtggaatcagatttccaggggtgagttgtgaggagatacagagctcaagtaaaggtagtcttaaggcattctaggttattctgatgcacatgggttgagaatgactgttgaattataaaatagcttattttacacatgagacatttgtgatgtttagtgctgttatggcaggactaagaaagaagtttcataaagtcacttccatgtttaatttgtctttttatcatcagtgcctagtccattgtcaggtcaataatagcactactcgccaggtgtggtggctcacgcctgtaatcccaacactttgggaggccgaggcaggtggatcacctgagttcaggagtttgagaccagcctgaccaacatggtgaaaccccgtctctacaaaaatacaaaaattaacagggcatgatggcaggtgcctgtaatcccagctatgcaggaggctgagcagggataatctcttaagcccgtggggcagaggtttcagtgagccgagatcgcgccattgcactccagcctggacaacagagcaaactcccatctccaacaaaaaaaaaaacaaaaaaaaaaaaggataacactgctattgcttctattcatattaacaattaatattcaaaataatgatagtaaatactgagttaaactgatttatctggattagacattgtgaaaattatgc

SEQ ID NO: 690382 - DNA, 1545 bp, Homo sapiens
tattaaaatgatgcaggtcatgttctctgggaagccaaccctgagatgtagtttagtgtgcagtacgttcagatgggagagttcttgggaccaagtcccatgaaagaaaaggaaggaagtaggactgagcaaaggagagggctgagcggtcttagctgatcccacaggaagatctgatctgaattgactgtcagaattatcctgtattaggccaaaatgactatgcatttttacctgtgcctcaacagtcattggatgttgctgcctgaggagcccattaccttagatgaagtggctctctgtagctgaggcaactggcagctggaatgtgcctggtggcagcaccccctataactgagcaacaagtgctccttgaagagggttttgggtgrgtcatccctgtgtcccccacaccatgcccctgacacatgatgcttaatgataactagcttatggtttcctatgttccaagcaatgtgtcataaatttggatacatctatctacctatctatctgtctatctatctatctatctatctatctatcatctatcatctatccatcctgagcacgcataactaaattgcccaacatcaaccatctggtaaatgatagtgtggcctttaaagcaacacaatctagctgcagtgctcctactcttaaactctgctctactccatcttgcagtgacctgggtatttaaagagatctgctggtcctatcagacatagctgtgtgtttctagtacagtggttctcaaactttgatccccaggttagcatcatcagcatcagcggaaatttgttagaaatgtgaatcttctggccttacctagacccagaatcagatactttcagagcaagactcacaatctatgttttgataggtcctctaagggagtctgctgcaccctcaaccttgagaaacattgcaataatatatagggacaacaacagcaaaaataacctagcacattctaagggtctttctattcagtcttcttttcagctaccctctcccttacctctcccatggaactctgatccttcctggccaatggttccagctgctgaagtcttcccctgctggatttcacattagaaatggacaactctttattccatcatgttgccatcactccctcttagcctcaaggatggtgttccattagtttttttatttataatttgatgttgccccaaggcaagagtggcaacccaaaccatgtatgttggttttgttggcaggccaaagagcactgagttgaaatctcaggcccatgactaactaaaagtatgtccttgaccaatctcaaattgatctttgtttcaatgttttttttttttttttttgagacagtctctctctgtcgccccaggctggagtgccgtggtgccatctcagctcactgcaagctccgcctcccaggttcatgccattctccagcctcagcctcccaagtagctgggactacaggcacccgccaccacccctggctaatttttttttttgtatttttttttttagtagaaatggggtttcacc

SEQ ID NO: 690383 - DNA, 1119 bp, Homo sapiens
  misc_feature 5, 6, 7, 8, 9, 10, 11, 12, 13, 14, 15, 16, 17, 18, 19, 20,21, 22, 23, 24, 25, 26, 27, 28, 29, 30, 31, 32, 33, 34,35, 36, 37, 38, 39, 40, 41, 42, 43, 44, 45, 46, 47, 48,49, 50, 51, 52, 53, 54, 55, 56, 57, 58, 59, 60, 61, 62,63: n = A,T,C or G
  misc_feature 64, 65, 66, 67, 68, 69, 70, 71, 72, 73, 74, 75, 76, 77, 78,79, 80, 81, 82, 83, 84, 85, 86, 87, 88, 89, 90, 91, 92,93, 94, 95, 96, 97, 98, 99, 100, 101, 102, 103, 104: n = A,T,C or G
attmnnnnnnnnnnnnnnnnnnnnnnnnnnnnnnnnnnnnnnnnnnnnnnnnnnnnnnnnnnnnnnnnnnnnnnnnnnnnnnnnnnnnnnnnnnnnnnnnnnnnaataagactgacaagaatatttcttcaccggttgctttggtatgctcacaattcattgacttcatatatctcactataggacaatagaaaagataaataagaggaatatgtagaaaattgaatttttctctctttgggaataaggagaagagaaggtaaaacgaaagagagcttttggttccatctcacattacacatattagggaaactaaaagaccaatccaaggagcaggtaaagctattatgaacacaattgagtccttcctaaaaggtgtgtataaaaggcacataggggaacaatagagaaaaaataaaacactggaagcaaatcttattccagaaacagatttagcgaaagaaaattccaaaacattaaaaaataagaaaacaaatgatttgatgattgcaaaagagaggtctttggtcatcactgggtccttagagtaacaagatttcttctggaatccaccaagcataattatccatatggaacaaatgtgatcaataggagtgtctttccaagaaagcaggtttctgaggtgtaagatatcccagagcaagactgtcaatagctaccataaaacttaaaatgccttttcaaaggtaccaagaaagctgtcactaaactgaccctataaacattttagtactggtaccagaaacatgggagccaatggtaaaatgagaattaataagctttgaatatgctagatggaaggtaaagatgactgtgacaattgcaattaaaaaaactgcaaaataatgtagcagtgtctcagatatcattcttcaccagcagaggacagaatgcatatatatggtttattctacctgtagtaattcacataatcttaaaatgactctccttatagatttctccctattgaagttttattcacaacttatgctattaggacaactggcctaaactgcctgtcattcagaagtggccaaactaacagagaagacagattctctgtctttacccaatctcagataactttgagtctatgct

SEQ ID NO: 690384 - DNA, 617 bp, Homo sapiens
tgaagcacctttgcccacattgggaaaggtaaggggctgaatactgaatgaataataatccaaactatcacagtagaatagatggtgagacccccaactggaaatatcttgcggtgattaaaaaggtagttttatacaattattgactttcttaaaaccagatttctattccatgtaataaactggataatttaaattattatttaaatttatattattattctctataggcaaatatttgacaaattatttaaagcatttcatccttatataaacatgaataataaatttcaactggctttttcttgtactttatgtttttatttttctgaaatagaatgctggctgggaattgggttacttggccctggttttagcagttacataactttggccagtgtcacttaatatattggcatcagtttctttaaaatatctctcctctatcagtgcctatgagtttagaactggtccatcagcaacatttatgaggcaccagtattgtaagtaattctgagaacaaacataggttatgatcaaactttagaatcattgagtcaaagtccctcattttacagatgyggaaactgaaaccaagagccattactcaacttgcc

SEQ ID NO: 690385 - DNA, 2260 bp, Homo sapiens
tcaagctttgttttaaatctttgttttgaagttacttacagaaaacctaatttttaagaaaaatttccacattaatatcagcagtggtaaatcytactttatgctttgcggggcacatatagtctctgtccttatattttgttgttgttttaaagaaccctttaaaaacataaaaactattcttagctcaaggcaaaaaaaaaaaaaaaaaaaaaaaaaaaactggctacagtttgcaaacttctgctctccaaaacaggtactttttctttatatataaaaaaaaaaagcggaatggggctctaaaacagcgatgagctaaaattgcaccactgcactccagcctgggcaaaaaagtaagacccagtctcaaaaaaaaaaaaaaaaattccgatatatggcaacaagtttcatcatcatctttttaatccagccacttgtgtaagtcattgagcacctttgtgcctcagtttcttcatctataaaataaggggttaggatggatcagtggtttccaaaccacacatagaggaagcctggggctctcgggcaaggttgggctctatggacccacccccagctctcaccccagcacacacccagcctgcacagccctgctttgtctttgatcttttctacatagtggagctctccataaagacaaggaagggttccacctattttgttttgttttgaaagccactgttttagatgacctcagggatcctcctggtgcaaatcctctatgaatccactttgggtcatcagtcattatccaatcatcttactggggactaagtgtcaggtaaatagaaatgatttaaaatcctatattgagccaggcacagtgtctcacacctataatcccagcactttgggaggctgaggtggggtatcacttgaggccaggagttttgagaccagcctgggcaacatagcaagactcccatctctacaaaaagtttaaaaattacccaggactggtggcatactctagtaccagctacttgggaggctaaggtgggaggatcacttgagaccagtaagtggaggctgcagctgatgatcacacaactgcactccagcctggactataagagttaagatcctgtctcaaaaattaaaataaaaacaaatcctatattgagtatttaaaagaggagaggcaaaaacaagaaagatcttatcctaagggaccacccgtacttgttcagatttgtggaaattcactggacagccaaatcaagagagttcccaagtcccacatatactcatgaaagggagagctcattcctgcatcactctgcttagagcactgggaaaagcagaatgctttagcaaaggaaggaccactgagctgagactcagagacctggttccactttgaatttggaatttaccagctatataacttctgatgtttatttaacaaaaattgaaaaccctactataaacaagctcttagacatggtatgaggaatacagtgatgaaccagaaatatgaagaatgctctgtcccccactactgaaatccatcatccataaagtagggtattaatactgctctctctcccatacatggtggtcctgccaagatggccaagtacatgtaaactgcaaagcatggataacattaaaccagaaacctgtagattctcctccttttaagtaaataaatataatcaactccaacaattcactaatattggtgaaatagggccacaataagttttgtatagcagaaaatctatttatacagcatgaaacagcatggcaaaatagaaagggcacaagctttggaaccagacactcccactcgaatcttatcctgctatacactaggcccacctgaagtctacaagcaccttctcctgtttagagtataagatactaatatctgcaattgtacagggctatgtaaaggtaaattagcattacataagtaaagcacctggcacagagttgacgcttagtgaataatagctttccctttttcccaggcacctagaaatctcaaatgagaaaacattatgttttaaagaggacggcttacctcagaactgttgatattgttacccagctctatatcataatcaccccaaccaaagaagacaggaaacttctggttgttatgaccatggaatccagatgcagaatatgcccagtcatcaggaaaatctgacggtcttggcacagtttgaggacagaaagagagcaacagccaatagctgaggggagactccacagtctggaatgtgcc

SEQ ID NO: 690386 - DNA, 2260 bp, Homo sapiens
tcaagctttgttttaaatctttgttttgaagttacttacagaaaacctaatttttaagaaaaatttccacattaatatcagcagtggtaaatcckactttatgctttgcggggcacatatagtctctgtccttatattttgttgttgttttaaagaaccctttaaaaacataaaaactattcttagctcaaggcaaaaaaaaaaaaaaaaaaaaaaaaaaaactggctacagtttgcaaacttctgctctccaaaacaggtactttttctttatatataaaaaaaaaaagcggaatggggctctaaaacagcgatgagctaaaattgcaccactgcactccagcctgggcaaaaaagtaagacccagtctcaaaaaaaaaaaaaaaaattccgatatatggcaacaagtttcatcatcatctttttaatccagccacttgtgtaagtcattgagcacctttgtgcctcagtttcttcatctataaaataaggggttaggatggatcagtggtttccaaaccacacatagaggaagcctggggctctcgggcaaggttgggctctatggacccacccccagctctcaccccagcacacacccagcctgcacagccctgctttgtctttgatcttttctacatagtggagctctccataaagacaaggaagggttccacctattttgttttgttttgaaagccactgttttagatgacctcagggatcctcctggtgcaaatcctctatgaatccactttgggtcatcagtcattatccaatcatcttactggggactaagtgtcaggtaaatagaaatgatttaaaatcctatattgagccaggcacagtgtctcacacctataatcccagcactttgggaggctgaggtggggtatcacttgaggccaggagttttgagaccagcctgggcaacatagcaagactcccatctctacaaaaagtttaaaaattacccaggactggtggcatactctagtaccagctacttgggaggctaaggtgggaggatcacttgagaccagtaagtggaggctgcagctgatgatcacacaactgcactccagcctggactataagagttaagatcctgtctcaaaaattaaaataaaaacaaatcctatattgagtatttaaaagaggagaggcaaaaacaagaaagatcttatcctaagggaccacccgtacttgttcagatttgtggaaattcactggacagccaaatcaagagagttcccaagtcccacatatactcatgaaagggagagctcattcctgcatcactctgcttagagcactgggaaaagcagaatgctttagcaaaggaaggaccactgagctgagactcagagacctggttccactttgaatttggaatttaccagctatataacttctgatgtttatttaacaaaaattgaaaaccctactataaacaagctcttagacatggtatgaggaatacagtgatgaaccagaaatatgaagaatgctctgtcccccactactgaaatccatcatccataaagtagggtattaatactgctctctctcccatacatggtggtcctgccaagatggccaagtacatgtaaactgcaaagcatggataacattaaaccagaaacctgtagattctcctccttttaagtaaataaatataatcaactccaacaattcactaatattggtgaaatagggccacaataagttttgtatagcagaaaatctatttatacagcatgaaacagcatggcaaaatagaaagggcacaagctttggaaccagacactcccactcgaatcttatcctgctatacactaggcccacctgaagtctacaagcaccttctcctgtttagagtataagatactaatatctgcaattgtacagggctatgtaaaggtaaattagcattacataagtaaagcacctggcacagagttgacgcttagtgaataatagctttccctttttcccaggcacctagaaatctcaaatgagaaaacattatgttttaaagaggacggcttacctcagaactgttgatattgttacccagctctatatcataatcaccccaaccaaagaagacaggaaacttctggttgttatgaccatggaatccagatgcagaatatgcccagtcatcaggaaaatctgacggtcttggcacagtttgaggacagaaagagagcaacagccaatagctgaggggagactccacagtctggaatgtgcc

SEQ ID NO: 690387 - DNA, 648 bp, Homo sapiens
tataggagcacataaagaaaatgtatttttagtcctactacctagagacagccactgctaagttggtggtgtgtatccttgctggattttttttcatttataactgagtcctactacatatacagttttataatcttctgttttcacctaacaatatataagattgtccatttttccatggacattctcaatgttattcttttaatgtttgcatagtattcaggtttgcctgtgttataatttatttaatcagtcccttgttattgaatatcaagggtccccccccaaaaaattgttaatataaacaatggtgggataaaatgacttttcatgcrcgtccctgtgaagagaccaccaagcaggctttgtgtgagcgacatggctgtttatttcacctgggtgcaggtgggctgagtccgaaaagagtcagcgaagggagttaagggtggggccgttttataggttttgggtaggtaaaagaaaattacagtcaaaggggttttgttctctggcgggcaggagtgggggtcgcaaggtgctcagtgggggtgcttttgagccaggatgagccaggaaaaggactttcacaaggtaatgtcatcagttaaggcaaggaccagccatttacacttcttttgtggtggaatg

SEQ ID NO: 690388 - DNA, 613 bp, Homo sapiens
aggggctgacaacttaatttaattagttaattactgagaagagctaactcagacacatagctgacagtgcctaatgaaagatctttctctacaactagtttctaatagagtcaacagctcccctttgaaatacacctatactctaagaccaaactaggctggtgggggacagatggggctaacaaggagcacacaatccttagcctcaagtaacattgtctggatcaagaaaatccataactacgaaactttctccctctagtaaacagctgcacagactatagcttatctcctgcaagtacatcaaagaagtgccataagcagtgtggaatagtttttggatttgaaatgcaacaggagwagatatatcaacctacatgtcattagtttagggcaaccagtttgtgttacaaatagaaatgttcctgcaaactagaagtggcataattgaaaaactgttgtcatcattatcactgtcatagtctgaagcaaatgtgcactcctattagcctgaaggtgtccacttggcatctagacctacctatttgtaaataagcaattagccttgacaaatgcagaaatactatcataagtatgcagcttgatgaatttt

SEQ ID NO: 690389 - DNA, 1853 bp, Homo sapiens
  misc_feature 741: n = A,T,C or G
tgactaactgtggcagggaccacgtgagaaaaaatttgagtctcaagtagcaaaatatttcactgatcctgtcatccagagctaatgattccaaggtacccagaagcagtctagattgatgctggataataatgcctatctgttctctaaaaagaacatccctgtattcctatacagtaagtagggtatcactgagctttcctgttaaaataggaaagataactcaaaatcacattccttctcatgcttcaaaatagtttctaataaaaacattgatttttaatttacctgcatgctgccatctcactctggggatgacacagctggtgtgagttgacaagtcttgctgcacaaagtgttaataaatcatgctggagaggtataaattggacagctttcggccagtgttagagcttgctgtgcatttgagattttagagtctgaatggcctctattaggagagttcgaagggaaatgtagaaaatctctgtcttgtgaggcttgtaaaatcagatggacaaagactatgggcacacctaagggaaagtgtgttggtggagtgacgatgcaggcttctcctgaggtcagaagttggtttaaaatacaagctgagcgcggtggctcacgcctgtaatcccaacactttgggaggccgaggcgggtggatcacgaggtcaggagatcgagaccatcctggctaacatggtgaaaccccgtctctactaaaaacacaaaaaattnagcagggcgtggtggcgggcgccctgagtcccagctactcggcaggctgaggcaggagaatggcgcgaacccgggaggcggagtttgcagtgagccgagattgtgccactacactccagcctgttcgacagagcgagactccgtctcaaaaaaaaaaaaaaaaatacaaggagttctattaatgtcaacatgttcttgtagaaaaggctggattggaaatgtatggtgcctggctgggttggtaaactagtttacttaagtaatcccagtagtttgcgttcggattctgtctggacaagttagtttcacaaaagagaaaaactctcatccactgttattaaccctggtcacttataagcaaattggtatctttggacttaaagatgacaaggtgtctcagaccgttggctgctataacaaaatatcttaaactgggtattttataaacagtagaaatgtattgcctacagttctggaagttgggaagtccaagatcaaggtgccagcagattcagtgtttgctgagggctcaatctctgcttcaatgatggtacctttttgctgtgtctttatatagtggaaggggcacacaagctccctagggccccttttataaacgcactaatycctttcttgagaggtctaccctcacgatctagtcacctcccaaaggccccatctctaatactatcacattggggattaagtttcaacatgaatttgggggggacaccaacattcagactgcagcacaaggtgtgagagagggaaatgatggtggagcccacattgctatacctgtttctatggctggtcaacagtgccatctgtgaaagctgaaggcagtgtatttctgagattaggttaatatatcctttgtccccttttgaagttgccatgtcttcctccattcttcatttttaaatatccactgtagtattaggacaggacaaggaaaaacaaacagagtaggctggagctaatctctccattctgagtgatgtattggtaattttgtataatttaatcagactgatcacagaacaagataatcagagtatgacctacagaatagggctttagggggcgttaaggatttccagcataaggtt

SEQ ID NO: 690390 - DNA, 604 bp, Homo sapiens
gggttcctgatttttctgctaagttataagcacttttgttatacaaaatatataagccctccaatatatacaacaaatgcttttgggcagttcatctatttttttaaaaaaagagattacaatagttaaatgctgccaytcatttcttctccgatgtctagccagtgtgaaagatcttcaaacgtgaggggtttttttcttgactaaaataataaaaatagtcacttgcacatattccctaagtatttttataaacatttgtatttgcaggtttgtaaaaattatgcaaaaagtagaaaccattctcacactgtggtctctcctcagaaggatggaataggaagaagctgagatatgggatgaggtacaagctcgaggtaggatgtggatatctgctgagtttgtacttgctttattcaatctggagtcattctttgcatctaacggtacctcatattgactgtatcaaattgtctgtgacaaaatgttattttccatttaagtgtatagcaccaaggggcaaatagaattgtacagagaaggctggagactttgaaaacaaatttctcctttttcatagtttttgcataaaagcaatcctgaa

SEQ ID NO: 690391 - DNA, 1717 bp, Homo sapiens
tccaaggacacactaatttgaatagaatggcaggaaaaaaaaacacttaagaaatgacaaacgtgaatttcacaaacaagatatatacttaactggggtttatctgtaatttcctgacaacaaaaagtaaaacaaaagcctcttgacctttcaaaactcataaaaaataaaataggcaaaaatgaaaatgacaaccattttgctgctggtttatatacagtatttttcttaaatcacaaaaatgaacaaatttattcaaaatataatttaatatattttaatatatttaatttactcattaaatatattttgtgattatatttatgaataatatattcataaatatatatgtaaataatatattcataaatatattatgaatactatatattcatgatatattatgaatactatacattcataatatattatgaatactatacatcatgatatattatgaatactatacattcataatatattatgaatactatatattcataaatatattcactaaatatatttaatatatttaatttattcaaaatataattataattttaaaatgagaatttaaaaatatttaaatgaacatgcagagttaaattgaagcacatcttttactatatacctatttttcaaaattatttcttcaattttccctgttctattttttaaaaaaagataagatctgctgatgcttaatgaattttaaatatatagctagttgtgtatctgtgcatatttatcagcaggataacgaagggttaacaaaacacctctctactttgtgtygtgtacatttgtgaagtgcaggtgtgctatttctgttgaaggagttagaagtgggttgcaagctggctaaagaaatgtacattacattcaaaaatggctttatattccctggctgttcactcttttgaatgcaaaaagtagtttttgctaactccattttgcggctcatggaaagctgaaaaatcaatagcttcaggttgatgaaacctaaatccatttgattcctttccaccattgccattatgcagacagtcaagtgtgatgtatttagttcatgcagtacttattactctcaagcacagcttctcatcagggaaaaattagaccagatgagaagtaatcaagaaattctggagaggtttcaaagatcttccttctaactgcttccttaaaaaaaaaaaaaaaaaaaaaaaaaaaaaaggtcttgctctctcagtcttttggaagaaaaaaaataaacatctctacactctaccataaagctctagaaagttctgtacaattgcttcatgtcactattttctaacaatagataatactagctgaataaatgccaaattaaggaatttttccccttactaatggtaccagagccatcactctggcagaactaatgccaaagcaaaaataatcacaaatcaatcaggaatcagaacaaataaaaaaactacttaaactgatttgggtatttcatttttactgaattggctatttaatagaaaaataatgttaagtggttgtataatcaaaaggtttagaagatttggcaacggattgcagtggttcaaatcatactcctgttaattagtagcttttttataagtcttaaacacattatatatctttcctctctaattatgaattttatcatatgtaaaagggaattatagcagaatcaacctcaaaattttggtgagagaat

SEQ ID NO: 690392 - DNA, 1717 bp, Homo sapiens
tccaaggacacactaatttgaatagaatggcaggaaaaaaaaacacttaagaaatgacaaacgtgaatttcacaaacaagatatatacttaactggggtttatctgtaatttcctgacaacaaaaagtaaaacaaaagcctcttgacctttcaaaactcataaaaaataaaataggcaaaaatgaaaatgacaaccattttgctgctggtttatatacagtatttttcttaaatcacaaaaatgaacaaatttattcaaaatataatttaatatattttaatatatttaatttactcattaaatatattttgtgattatatttatgaataatatattcataaatatatatgtaaataatatattcataaatatattatgaatactatatattcatgatatattatgaatactatacattcataatatattatgaatactatacatcatgatatattatgaatactatacattcataatatattatgaatactatatattcataaatatattcactaaatatatttaatatatttaatttattcaaaatataattataattttaaaatgagaatttaaaaatatttaaatgaacatgcagagttaaattgaagcacatcttttactatatacctatttttcaaaattatttcttcaattttccctgttctattttttaaaaaaagataagatctgctgatgcttaatgaattttaaatatatagctagttgtgtatctgtgcatatttatcagcaggataacgaagggttaacaaaacacctctctactttgtgtcgtgtacatttgtgaagtgcaggtgtgctatttctgttgaaggagttagaagtgrgttgcaagctggctaaagaaatgtacattacattcaaaaatggctttatattccctggctgttcactcttttgaatgcaaaaagtagtttttgctaactccattttgcggctcatggaaagctgaaaaatcaatagcttcaggttgatgaaacctaaatccatttgattcctttccaccattgccattatgcagacagtcaagtgtgatgtatttagttcatgcagtacttattactctcaagcacagcttctcatcagggaaaaattagaccagatgagaagtaatcaagaaattctggagaggtttcaaagatcttccttctaactgcttccttaaaaaaaaaaaaaaaaaaaaaaaaaaaaaaggtcttgctctctcagtcttttggaagaaaaaaaataaacatctctacactctaccataaagctctagaaagttctgtacaattgcttcatgtcactattttctaacaatagataatactagctgaataaatgccaaattaaggaatttttccccttactaatggtaccagagccatcactctggcagaactaatgccaaagcaaaaataatcacaaatcaatcaggaatcagaacaaataaaaaaactacttaaactgatttgggtatttcatttttactgaattggctatttaatagaaaaataatgttaagtggttgtataatcaaaaggtttagaagatttggcaacggattgcagtggttcaaatcatactcctgttaattagtagcttttttataagtcttaaacacattatatatctttcctctctaattatgaattttatcatatgtaaaagggaattatagcagaatcaacctcaaaattttggtgagagaat

SEQ ID NO: 690393 - DNA, 653 bp, Homo sapiens
agatagtttgtaacaaaagatggtggattatcataattttaatcaaacatgagccccaatcacttttgcagttctaaatgaggtacttttacctaaagatatcaaaacaggcttggaaacttagtgtgcttctatacatataacaaatgtatcattttcactattagttgagatgaaaaaaattgccttttgtgacaagaataggagggcaacaattattttatctaaaggatatattaattttacttttgcctgttcaaagataatatgaagtacctcaatttggtgttctgcagaatttcacacatttcatgattacatgatgaaaaattggatctagtgagtaggcaatggtatatattyattatgccatgctaggacatgtaaatgactgtctatgtgaaatgaactgtacaaagattcagagacatgccatattaatgaaaggttttaagggttgctcagctaggatggctggtacaaaatgggggactggtggagtttgtccagaatttaagagattcactgaattgtctctttgcagttctatgcctggtgacagtggtgagcaacaattttaatgacagtagcctaacaagggaaagacaacaaagagcttaattttgtgagatgaaagaaaaatcaacccacca

SEQ ID NO: 690394 - DNA, 1424 bp, Homo sapiens
gacccaccaatgtcctgtgcccatattatcatagatgccagctgacactctcagaggcatccttcaaattagaataaaattgttctaatacagcatgaaamcctttactctgatacaaaagatgcagccatatcataaaggtacatgtttggggagaactgcaatatcaacacacatctaatcaaaagcttggccagttctagcaaccacattgtgattcttaagcaggtagtacttattctctcttttcctgctgcctctccatagtacaccaaaacttccagaatgctcactttttttccaagagaaataatctctggatatcatcaaggttatctcaagtctcaagtactccctatggtcatcatcagcttccctcccagaataaacttgcatactgacgatatttcaccttaaaacaatctactattcccaagaccctcattcaagacaggaggtttaacaaactgtacttctagaagtatcttgggaaccaattaagaatgagaattttaaaactaaaacataagtgatctactaagaacatgaaataagaagagcaatgacttgctgttccttaaatggataagagataaaaggaaacattttttgtcagggtgattttattcaaatgtagtatgtgatttattctctgcaatgcataaataaacttcagaaaaagagaaggacgacatagagttgggaacagaagtaaatcagagctgtgccaatatttgcaaagacctgctatcacacggtactgtgttcatagggaaaatctgttataagtaatatcaagagtgtcctaaaagacttgtgttgagcataaatgcatccgtagtatgcccttgtttttccacttctcatactctatgtcttggccagtcacaaatactcactagtagtcatcaatactattcatctatgccccagtcctatagagtccatgtgcttctctgtctgaaatcctcaaaattccttctgtgcatacacacgaacacaaagtccaggcccaggtaaacatctccatttttgactgctacttatttctttttaaagtagattgtagcacatttagatggatcaaagcttaaaaatctccctcccagctctgttatccagccacttattactctcccctgtctattcttcactccaaaaggatattttataaatatgtgtgcaggttcccatattttacacaaaccatgacattttaatggtttgttgcttcttgtgtgtaaaatgggagataaataatatgaccagctggggttgttgagtaaatcaaatgggctaacatacatgaagcatttcgaatagtgcctggcacagagcaagctccatgtaagaattagctattataatcttcatcttcatcttaatcattgctttcatgtctccataaaaataaatataatttt

SEQ ID NO: 690395 - DNA, 1424 bp, Homo sapiens
gacccaccaatgtcctgtgcccatattatcatagatgccagctgacactctcagaggcatccttcaaattagaataaaattgttctaatacagcatgaaaccctttactctgatacaaaagatgcagccatatcataaaggtacatgtttggggagaactgcaatatcaacacacatctaatcaaaagcttggccagttctagcaaccacattgtgattcttaagcaggtartacttattctctcttttcctgctgcctctccatagtacaccaaaacttccagaatgctcactttttttccaagagaaataatctctggatatcatcaaggttatctcaagtctcaagtactccctatggtcatcatcagcttccctcccagaataaacttgcatactgacgatatttcaccttaaaacaatctactattcccaagaccctcattcaagacaggaggtttaacaaactgtacttctagaagtatcttgggaaccaattaagaatgagaattttaaaactaaaacataagtgatctactaagaacatgaaataagaagagcaatgacttgctgttccttaaatggataagagataaaaggaaacattttttgtcagggtgattttattcaaatgtagtatgtgatttattctctgcaatgcataaataaacttcagaaaaagagaaggacgacatagagttgggaacagaagtaaatcagagctgtgccaatatttgcaaagacctgctatcacacggtactgtgttcatagggaaaatctgttataagtaatatcaagagtgtcctaaaagacttgtgttgagcataaatgcatccgtagtatgcccttgtttttccacttctcatactctatgtcttggccagtcacaaatactcactagtagtcatcaatactattcatctatgccccagtcctatagagtccatgtgcttctctgtctgaaatcctcaaaattccttctgtgcatacacacgaacacaaagtccaggcccaggtaaacatctccatttttgactgctacttatttctttttaaagtagattgtagcacatttagatggatcaaagcttaaaaatctccctcccagctctgttatccagccacttattactctcccctgtctattcttcactccaaaaggatattttataaatatgtgtgcaggttcccatattttacacaaaccatgacattttaatggtttgttgcttcttgtgtgtaaaatgggagataaataatatgaccagctggggttgttgagtaaatcaaatgggctaacatacatgaagcatttcgaatagtgcctggcacagagcaagctccatgtaagaattagctattataatcttcatcttcatcttaatcattgctttcatgtctccataaaaataaatataatttt

SEQ ID NO: 690396 - DNA, 704 bp, Homo sapiens
tccgaacagctggctgattctattctcttctgttctctgcttcaaaagccaagtttgtccttatatcatgttatataacccaagattaagattggttttgcagagaattttaaaactctttatatatatttgaatgtcaactatcactaaaactgtttatgtatatttgaatgtcaactatcacttggactcttgtgatcccaatgttttctttgttcctatctacttatacctccatttttaatctttttcccacttcggtaggatcaaagaaaagtagaaattaattactgaaaatatatttcaatagtcatcaaagaagatcaatgagaatcaaatcgtttcagcattatttttaagccggatttaattctaaagtcttttagtttgctctgtaaggttttgtatagtctgttcttcttatagaagtttattatattaagataagacacttgcatctaggtggcagttctaggttccccacaagttcctaactgcctgagaggtggctgactgagttgccatcaggtcaggcccsgagccacagtctttcacagaagagattcatgttatctttactatgcaaagctgaataggggaatagcagaaagaatttgacactgactcttcttacttatttccttattccttccctgaagattataatctctttaaaagcaggaataaattctgagtctttcttg

SEQ ID NO: 690397 - DNA, 620 bp, Homo sapiens
tattttagaggcaaagaccttgaagtttttttgttggtagttttcgtaagttttttcattggacaaacaaaatagagagaccagattgaatccactgtcttcctgtccattgtttacaacatgaggtagaaaaagagcctgcataatcctcagtttattttgagcatcaagagagtatgttcttccatattctctcacttttagcagtatttatgatgctataatgtctcaaaatyaaaagaataggaaaatgctgtgtggtctttatttctaacaccaacactgtaaatgagactgtgatctaggcatatgataataacaatacagggattcgataggaaaggggaggaatttgagaaatgatttaaccaatatgttttgagtggcctaatgaagactgaaaatgactttgcagcctaggcagaaaagtgaaatggtagaggaaagaaacaagaaggcagacacaaggaggagtcatcaaattcttctccttataaagaattttggtggcatcagcaccttgagtagaggaatggaaagggtaaaacatctgtctatctttcctgcctatgctgtgccactgagtaaccaaatagcagataaagggaggtttctctttt

SEQ ID NO: 690398 - DNA, 613 bp, Homo sapiens
gtggtttgccacagtaggagttctcccatattagcatcaggaccccgccaacactgtgtgtatgctgccggtctgctctctatagggggcatctgcctgtacataatggggtcaaaccaagctctaaaacgtgtagtcttcgctcagctccgcgcctttctctccacttttaaaccccaggcactgctgtaggactctgacccctatcctcctcacgcttaagagatgacctctactttagaaaagcgtgtacaaaatactttgcttttggcaaattccgccattttagccggatttgctctgttgctccaccctcgggcgacagtggtgaaccaacaatttttttgctgtctttcctaaacktgtcacgtattggcctgtcacccgacccttcttgtggccctgataagttttgcataattccacctagtgttatctattgatagcctttgtgggaatgcctgtgacaaatgggaacatcccttctcttttgaatactgaaactcttctttgtcccagaaagtttaattcctgatagagtatttgggagaaaaagcaaaggccaacacccataagagaaagaatgcaagactagtaggctcaaagccagtta

SEQ ID NO: 690399 - DNA, 1824 bp, Homo sapiens
ttggaacacagccatgcacatctacttacggctgctttcaggttacaatggcagagttgagttgctctaacagacaccatatggctcaccagtgcttaacagtgctgaatagccacatttggctagtgactatcactattggacagtatacttctaaatgcaccagtgaattagttgagggttggaaaaatggggtgaacagaacaaacatataattatcatttcccgtccattatacatcatcctacttgtttccacattgtgttgcttcaatatccttttgaggttatctcttgggtttgtaaatgtattatctcctgtatttgtcttggtggccaaaacatttacttatcactcttgttacatgttagcatctgcaggtcagttgccatgttcctgctccctgtgtcttcttattctaggagctagctgaatgagacaccccagtttggatattctgctattctcatagcagaagaaagacagcaagagaacaacaagaaatatacaattactcttaaaggcttctttgcaggcatggtttctgcctctcattccattgggctaagcaagttgcatgggcaagcttaacatcaccgtgccagagaagtatccttcatccacacgggacatgacagtgggtggataagtgcatcctcatctaggaaaggggtcagcaaatgcttggagacaataaaacagtctaccacattttcttgtttctgatgaggaaattatgacctggagatgactgtataacttactcattgccaaccaactaggcagtgccagaaataagaaggaaactcaggtttatcttactccaaatccacgtttttccattacacattttgcagggttcccarggtattttggctgataggagaaaagtgtgctgaacatcctctatttgtcctgtgaatacccactctccttcttcatctctcccttgccttgggaggctgatatatactgacttcatcaatagcttctctcgctccctagtttccaggtgggtttggcatagggaagccccagcaacagattggagggaagcagaggagtgaggctgtatgttttattactccatctccctcccagtagagtcaccaagggctggctgtgtctcttcacaaaaagtcttagcttctagcaggcagctctctatataacccctccctgtgggttctggaagcaccttctcttcacttcacctcttcaggtctaagagtataagacagctgagctgtcactaaactgagtactatccctgtggctcttctacactatccctagacctttaaaaataatccttaaagctgagctcaatggcttatacctttaatcccagcactttgggaggctgaggcaagaggatcacttgagcccagaagttcaagaaagaaagaaaagagaaaaaataataacccttaaattctgctggaattgtcataattttagagtgctcccttcttcttgttgggactcagttcacaaagagctcatagctgtaacccaaggcagaactaaagagagataatcacagttttgcactgctctttcctctgttttccccttaaacatggagaaaaaagttattgcaaagcacttaagaaatttagacacaggttaaatgaatatagaagcatagaaaaaaaattaaggaggcttgggatctaagaaagtaagactttcttggctttatttcttgacactatgattgactggtaacaatattcagattctctgagctatctatttccatgactggaaagataattcaaaatacatgatgcgtagagatgataatgactcattcattca

SEQ ID NO: 690400 - DNA, 760 bp, Homo sapiens
cttagggcacagattctgtgcctccggtgctctgggatttgactggccctgcctcatttaggtgggagcgtccactctggatatcttggtgggggcaaggttgtctctactctgcaaaaaggatgaatgcctctttagacttctaatctgacactgaaggaagccacctgagaataaaaaaaagacactgaatttagagaccaaagactccaattttcaccctggctctcttgcttaaatgctgtgtgactttggacaaatcactccacytctctgagcttcagagtggttgctccataaaaggaagggatttgatcagacattttcagtgtttatgcccagttataaagcatgtcttaactttaacactgaacacgtttgctttaaagtgtgtccatcaagccaacacaacacttcatagaagtctcgaaagatctaaattggttaaaaagaacagagtgcatttgttttggggggcgatgtgtattggctgcagccagcaaaatgtcaattcaatggactctgtggcatcttcataaccaacctgaattcctatttgatgttagttactcttcaaaggtgagccagttgtccaaactgagcaatgttcccctcattctgaccgtcgctttctggccacattgatccaaatggtggtgttctcatcgtcttgatcatccccactggctggccacccaatcactgatggataagtgtttctgcattcacaggatcacctgtgggcgcttccctgggttgg

SEQ ID NO: 690401 - DNA, 760 bp, Homo sapiens
cttagggcacagattctgtgcctccggtgctctgggatttgactggccctgcctcatttaggtgggagcgtccactctggatatcttggtgggggcaaggttgtctctactctgcaaaaaggatgaatgcctctttagacttctaatctgacactgaaggaagccacctgagaataaaaaaaagacactgaatttagagaccaaagactccaattttcaccctggctctcttgcttaaatgctgtgtgactttggacaaatcactccacttctctgagcttcagagtggttgctccataaaaggaagggatttgatcagacattttcagtgtttatgcccagttataaagcatgtcttaactttaacactgaacacgtttgctttaaagtgtgtccatcaagccaacacaacacttcatagaagtctygaaagatctaaattggttaaaaagaacagagtgcatttgttttggggggcgatgtgtattggctgcagccagcaaaatgtcaattcaatggactctgtggcatcttcataaccaacctgaattcctatttgatgttagttactcttcaaaggtgagccagttgtccaaactgagcaatgttcccctcattctgaccgtcgctttctggccacattgatccaaatggtggtgttctcatcgtcttgatcatccccactggctggccacccaatcactgatggataagtgtttctgcattcacaggatcacctgtgggcgcttccctgggttgg

SEQ ID NO: 690402 - DNA, 626 bp, Homo sapiens
tgaatggacatatgagagatgaagtcatatttttctaaataagttcaaaaatattttgctttaaaatataagtagtgattaaatttctaagaattgagcaatagttgaatgttataaatttagttttcatgagtatttctctytccacatttcttcttctcaacttgctcatatcccttcaaatgacaaaatacttagaagtatttgagtcaagttagatatatttttgaagatattatttgcttatttatctatgagaggtcaacaacaacttccatgaatattaggaaagcaaatgtcggtagctctattcacttcaatatttaattcacctatatctgaaatttaaatgtcagtgataagagtgacagaaagtgacaatttctttaggtaacacagcactaggtggcaatactttaatattgtcactattacatttttcagatatacaatgtatactttaccaagaatcctagtctattatgttctaaggatgagctgtctttatacgaattcacaataaatagctgtgtaaataagagttaccatttttattttatagcataaaatgtatttcaaatagttgtacaaatcagatatgttataaaagaaacgtctttcctatt

SEQ ID NO: 690403 - DNA, 576 bp, Homo sapiens
tgtgctatattttatttaaccattcaattaatattgaatacataactttttggtgctataaataaatgatgaggtagtgaacaaagtaataaaaatctagcttctaaggaacaatttgttgtttttgccacctcacatccattgccccttcttcataatattaccttaatttttcttggggaactaacatttctctattggctaatgattggcaagacratcaattaagatgcactgaatatttttagattaaaaaatagatgtgaaacctaacttacgatagttggatgctctctccatagcaactgaatcttaagaaaagtaagactgaaaacagctgtagctgattcatctggtagctgattcatcctgtagctgattcattgttttctgttacctggttctccagagccaccctggttcctgcccttttggggcctaacttttcagctttctttttcagttctattagctgaaccaaaaatttatgttttattttgtctgagttgatttctgcttttgcaaacaaagaatctgaacttctacaaggtgaatacttctgattcatttgttttt

SEQ ID NO: 690404 - DNA, 1142 bp, Homo sapiens
tcaaaactagaaaattgttaatatctgttaattctgagaagttggtacacaggtgattttttttttttttttttgagacagattcactctgtcacccaggctggagctcagtggtgcaatcttggctcatcacaacctctgcctcccaaattcgagctatcatgtgagccaattctcatgccttggcctcccaagtacctgggattacaggtgtgtaccaccatgcccagctcctttttttgttttttagtagagatggggtttctccatgttggccaggcaggtcttgaacttctggcctcgagtgatccacccgcctcagcctcccaaagtgctgggattacaggtgtgagccactgaacctggctcatgggtgattttaaattctctataattttagaactttactaaaaggatattagggaactaatagtaccttcatatctcagacagaacttctcatagtgttctatccatgttctcttatgagagcatgtcctactattttaatgtctaatgattcagcttcacaattcttgagaattttgaatttttatccatatttatattcttatctcaatattaaatatattttaattgtatactttttccctcaaaacctaggtaaaattaacattccaggaagatatgctttgattatcctatagcttcatatatccccatcatactacagggcatctcagggcagagaggttggagatgcttattctagtttggggagcagaactatagagtcactgtagattttcctttagaagaaaacaacatacagaagagaaatcctctgaatttaacctcacccttcccctttacaatagttaattttatgtggcaacttggctgaccakaggagccagatatttggtcaaacattattctagatgtttctgtgatggtattttttagatgagattaacatttaagtcagtagactatgagtaaagatgattaccctccataatgtgagtaggcctcattccaccacaggtgaaaaccttaataggaaaaaggctgactgtgcccaaggaagagggaattctacagaagagtccctttggactcaagctattatcttaactcttcactggactctagcttgctggactacactgcagcttttg

SEQ ID NO: 690405 - DNA, 1602 bp, Homo sapiens
tcttgaacaggaagwctcggcattacattacaaagatgttagttctccctaaattaattaaatattttaatataatcttgataaaaataccaagttttttaatcaaatgaaacaagcaagaatagatataagctaaatgtaaagctgggcactggcttaatgctgtactggaggcgcgagaaatgctaaaaagggtattattgggtcaaatggcaaaaacatgaatggtagaagagatacaagtattgtatcaatgtaaatttatgaagttgatcattgtagtgtggttatttaaaagaatatctgtatttttaggaaatgcacacttggggaacttaggggcaaaggccatgatgtatgaaatttatccttaatgggtcagcaaaaaaattatgtacgaaagagaaggagaagaagagaagatgaaactataaaacaaatgaaaggatatgtgactatttttgtactactttatgtttgcaactatttgtgaatttgaatttatttccaaataaagagtaaaaacgaaaagaatgggtagaaagagtctgaaaagaagagcaattgaaagagactagtctgaccataaatattgatatggtatggttttggcacatgagtagacacacaaagaaacagaaagaaaagtaaagaaaaagatgactagcatggggaaattcagtttatgataaaggatgcatctcaatgttaataaatcgtgttatgacaagtggatatctatctggaaaagataaaattggatccatagcccacgctattcatcaagataaactccaaatgtagcaaagatttatacagaaaaaaataaaacctcaaaagtagtagaagaaaatatggacgaatttctttgtaacattggagtgaggaaggcctttctatgaatcaaagtctagaaaccaaataaaaaaagaccgatatattttactacacaaaaaagtagttacaaggcagagaaaaataggaaaattttgcaattcataagactgacaaagcgttctttttttgtcttttgtttttgtttttgttttttgagactgagtcttactctgtctcccaggctggagtgcagtggcgcgatcccagcttgctgcaacctgcgcctcccaggttcaagggattctcttgcctcagcctcctgagtagctgggattacaggcacatgccagtatgcccaactaatttttgtatttttagtagagacagggtctcgaactcctgacctcaagcgatccacttgccttggcctccaaagtgcctccgcgcccggcccccacaacttttttttatttttaaatatataaggatttcattgaaatcaagacaaaaagacaacccaatataaaaacaggcaaaggatataaacagatagttctcagaaaaagagatacaaatgactttaaactcatagaagatgctcaatttcactcaaaatatgagaactgcaaattaaaacaaaattgacatgccaattatcatctatgagcttggttacaaaattccaaatgtttgatgacacataattttggcaagaaactcttatgcattgctgattggagcccaaaagataacaatcctatgtaa

SEQ ID NO: 690406 - DNA, 1602 bp, Homo sapiens
tcttgaacaggaagactcrgcattacattacaaagatgttagttctccctaaattaattaaatattttaatataatcttgataaaaataccaagttttttaatcaaatgaaacaagcaagaatagatataagctaaatgtaaagctgggcactggcttaatgctgtactggaggcgcgagaaatgctaaaaagggtattattgggtcaaatggcaaaaacatgaatggtagaagagatacaagtattgtatcaatgtaaatttatgaagttgatcattgtagtgtggttatttaaaagaatatctgtatttttaggaaatgcacacttggggaacttaggggcaaaggccatgatgtatgaaatttatccttaatgggtcagcaaaaaaattatgtacgaaagagaaggagaagaagagaagatgaaactataaaacaaatgaaaggatatgtgactatttttgtactactttatgtttgcaactatttgtgaatttgaatttatttccaaataaagagtaaaaacgaaaagaatgggtagaaagagtctgaaaagaagagcaattgaaagagactagtctgaccataaatattgatatggtatggttttggcacatgagtagacacacaaagaaacagaaagaaaagtaaagaaaaagatgactagcatggggaaattcagtttatgataaaggatgcatctcaatgttaataaatcgtgttatgacaagtggatatctatctggaaaagataaaattggatccatagcccacgctattcatcaagataaactccaaatgtagcaaagatttatacagaaaaaaataaaacctcaaaagtagtagaagaaaatatggacgaatttctttgtaacattggagtgaggaaggcctttctatgaatcaaagtctagaaaccaaataaaaaaagaccgatatattttactacacaaaaaagtagttacaaggcagagaaaaataggaaaattttgcaattcataagactgacaaagcgttctttttttgtcttttgtttttgtttttgttttttgagactgagtcttactctgtctcccaggctggagtgcagtggcgcgatcccagcttgctgcaacctgcgcctcccaggttcaagggattctcttgcctcagcctcctgagtagctgggattacaggcacatgccagtatgcccaactaatttttgtatttttagtagagacagggtctcgaactcctgacctcaagcgatccacttgccttggcctccaaagtgcctccgcgcccggcccccacaacttttttttatttttaaatatataaggatttcattgaaatcaagacaaaaagacaacccaatataaaaacaggcaaaggatataaacagatagttctcagaaaaagagatacaaatgactttaaactcatagaagatgctcaatttcactcaaaatatgagaactgcaaattaaaacaaaattgacatgccaattatcatctatgagcttggttacaaaattccaaatgtttgatgacacataattttggcaagaaactcttatgcattgctgattggagcccaaaagataacaatcctatgtaa

SEQ ID NO: 690407 - DNA, 1911 bp, Homo sapiens
tccgcctccgccatcttaccccgctccatagactgggggcgccccgcagcgcgtcccctccgtcggctcggctcaccttttccctgccccacaatgccgytcccaccacaggctccacagccgccccagcctctggctacccgcaggccgacccctccctcaggctcgacacgcccccttgcgtcaccgcgtccgtcggcgttctgcgtaatgtccgctgggatttgtagttctctgggaaatgctaggttggattccattcattcatacatggaatccgcaaatactagttgaagcccactgtaagcaaaaacagttaacgacagtgcgtaaacagtgatgatcaagtcaggcagtggcactaaacctacaaattcttgtttaccacctttgccacaaagtgccaaggctccgtcggcgcgaataataaagtctaacttaatgtctgacagaggccttacagtctagtgggggagacacggggagctggagaattcaaaactgtgagctgtaagccagttccgataatggagttcagagatctcttctggttgccaaggcttcataaagacactgggtttcggaggttaaaaggcataactggaaggtgtgaggagaatccagacagccaaaaagaatttcatttgcactgacgtgtaaagacgtagtagtaagggatgggtctggaaaggttcgctggagagaaattacgaggagccttaaatactgggctgataaatgtgtactttgttctaatggttccactgatccaacaaccaactgcaacagaagcacctggaaacatttttttttaatacagactgactgacagtcatacatctggagattctgatccaggcatctgcatttcatgaactcatcagttacaatttaaaaatcggatttattaatcattgcttgagtttttacgtaacacaatgaatgggaaggcactgaaggttttttgggggtttgtttgtttgtttgtttttgagacagtgtcttgctctgtcgcccaggctggagtgcagtggggcgatctcggctcactgcaagctccgcctcccgggtgcatgccagtctcctgcctcagcctcctgagtagctgagactacaggcgcccgccgccacgcccggctaattttttttttttttttttttagactgagtctcgctctgtcgcccaggctggagtgcagtggcgggatctcagttcaccgtgagctccacctcccgggttcacgccattctcctacttcagcctcccaagtagctgggactacgggcccacgccctgggactaccacgcccagctaatgtttcgtatttttagtagagacggggtttcactgtgttagccagaatggtctcgatctcctgacctcatgatccgcccgcctcggcctcccaaagtgctgggattagaggtgcaggtttttaagaggagtgacacaatcaaaatgtgggcgttaggaaatttggtgaagggcaagtgtgcaagatgtgcagagacagagaatttggagataaggcaacactgtaggagatgagaaggcctaaaccagggaagcagcaatgagaatgaaaaagaatgaacaagtaggaaaaacatcaaaaagagagaattgacaggatttactagataccaaaaaggttagatattactccaaggtttagtaccagagtgactagtagaagagagtttccactgacaaaaaaaaaaaggcatgagagaagaaccaaactggaagtttaggctaaataatttgtgctacaaccatactatagactattatgcaatcattaaaaagaaagacaaaagactctatggtcatacatgaaactgtctccaagttgtagttgttgagtggaaaaatgcaaggcatgaaacaatatgtagactctgtcctc

SEQ ID NO: 690408 - DNA, 666 bp, Homo sapiens
tcctccataatcataagtttcctgaggccaccccagccatatggaactgtgagtcaattaaacctctttcctttataaattacccagtccctggtaattctttatagcagtgtgaaaacggactgctacagcagtgctctggcctcggttctggggtattctccctgttgcaatatcttaaatgaagttgatttctttagttgtttgttttttgtctttgatagaggagagagacaataaccaagtaaacaaagcaggtaatttctggtaataggtaccatggagatgataaaacagggtaatatggcagggagctgagaagttcaagacctgcagttggcaagctggagagccaggagggccaatggtatagttctggtctgagagtgaaggcttgagaatcaggagagttgatgatgtgggttgcagtccaagtccaaaggcagaagaagactgatgtctcagcttgaaggcacctaggcaccatggtgggataaagcaaggtaagaaaatccatatgagtagtgaaaagtgcaaggaaaagaaaggaggggratgaagaaagagaataataacacctcaaggaacaaagctgcgtagctgcagagtcgccctctgttctgcctgcacagggctgcctaggatgtttataggccccaaacggtc

SEQ ID NO: 690409 - DNA, 1124 bp, Homo sapiens
tcaaccattctgattttgtgttttggaagaagggtctccgatgaagagaggataaatgtgatactgactagtggggaatttctcaattagctttaatgattggggtaggctactagaaattgtaatgaagagaaaataaccgttcactgctttcattcagaaaatatggaatgtgtcttaactagttggaaaacactgagtaatgaaatgatgagctggttgaggctgataatcaatgcatggccatattcatttatttaactgatatttgaccatttagtatgtgtaacatcctaccagggccagggaagtaatggcaaacaaggtagatgtagtttcttccatcatgcagtgtcacagaagaactagatgtacacatgtacgcagtataagtcagaaaattaatmattttttaagtgctatgaagaaaaagtattattcactccctgtgttctgtgttagtatctgcaaatagatgaatggttgaattgaactcatgtcagccatttttgttgtcatttatctgtcatagtgtcatttattagacatagtgctatgacactatgtcatttattagacatagtgctagtatcacaggttaatgtttgaaaatagataaattctgctagtgatacatctttttatatgatgtaaagaagctaggtgtatctgggcattaataaacataaaagggattgtattatgaggaaacatttttctaaaattatgaaatgggcttcatctacaaaatgctgatataaaacagttcaaaattgctcactctggctggacatgatggctcatgcctgtaatccctgaatttggggaggcagacgcaggaggattgctacatagcgagactccatctctacaaatgtaaaaaattagctgggtgtgatgggagtagtcccagctactcagtaggctgaggtgggaggatcacttgagcccaggaggttgaggcttcagtgaactatgattgggtcactgcactctagcctgggtgacagagcaagacaaaaaaaagaaagaaggaaaggaaaggaaaggaaaaaggagaatgcttactccctaagttttcactagaaactaaagttactaagagttaaaattctaattaacat

SEQ ID NO: 690410 - DNA, 1112 bp, Homo sapiens
ttgtttacacatgaagctgtttattttgctttgaatgggaagctgttttggagtcatgtgaagaaggatagaaaactactgagaaatgtagctcaaaaacctggaggatgctggtagcagatgagttgggagtggattgcatggtgacaaccagagagcgtaagtagtctcttattacgtacagtatttcattggttatatcttgcttctggattgttttggaatttttttagccttactattttattagactggcaggggaatcataaatggaggaaataaataattttgagttgatggagtagcttgagaagattgtctcaaattcaagtttttggctttcttgtgtggtcaggtattgaagtttgaaaattgtgatctgtggagcttaaaggtttttcaaatagaactaggagcccttacaaaacttctcttttgttatttatgtgtcacttatttcttctctgggacaacctattaccggagttgaaaaagtctgtacttaagataatttggatcagcaagcttattatcagtgatgtttttcttgcccaatttgacctatatctagaaatgctttgctcaactttctagaaattactgatactcatctttttccccagctttgttctaactcaaatttggataattttgtgtcattatctttctgttgttttaatacttagagagttggtgtggtgaaattgcaacagaataaaaaaatactattttaatttcagtgtttctggtaagaaatctgcctttactaatgactgaaatggacctggtttttgttttcccctttattacagtttgtggattagtcrgtgtattgaacatgaaattcaatataactaaagtgggttttaaaagataatgaaatcaatactaacgtgaaaagacttgtcttcatcagagccaccccacaattggccctgtgctctctgttgctgcatacttaggtcctacagttcttcatgtaaccgcctgaaaagctctacttttctactaagaataaataatcctgctgaaatggaccataggtaactcaattaaacatagcttcctaccactgggttgtttaattatttttcaataattaaatagataga

SEQ ID NO: 690411 - DNA, 1443 bp, Homo sapiens
atttttagtagagatggggtttcaccatgttggccaggctggtctcgaactcctgactcaaatgatcctcccttctcggcctcccaaagtgctgggattacaggcaggagccactgcacctggcctggtctcaaattcttacgctcgagaaaccctactgccttggcctctcaaagtgctgggatgcattagccrctgtgcctggcaagttgaatggcattttaaggcatattccactttactgcttgttctgcgtataggagaagcatagcccccaaacaagaatgtaactgctgcagtggaagaattacaggggctccaattggagtgagtatgggcagaccacatgaggtacatcatcatggtggcctcattgtctgttggtagcagagaccatgcatacaacccaaatgaactaatcacagacctttgtgaagtggaatttttttccttaatgtgtttgcatattgctgtcactacgaagtcattttatctttaatgcttaattatctgtactaatggaggagaatattagtggggaaaatgtaacaacactgattcattttcagcttcccaatcaacatcagtagattttacatcattctggattcgaattaattctggcttgctctgtctctttttttttttgagacagggtctcactctgtcgccaggccagagtacagtggtgcgatctcagctcactgtaaacctccacttgcctcagcctcccaagtagctggaactacagtcgtgtgctaccacacccagctaattttcgtatttttagtggagatggggttttaccatgttggccaggatggtctcaatctcttgacctcgtgatccgcccgcctcagcctcccaaagctaattctgattctctttcttgctaaccctagcactataaacaagttacttggcctcatgttcttcatttataaaaggatgggcttggccaaggtagattgttggcttgcagatttagtgtgcagaagattcagtgtgttataaatgtgcattccctgagtctcatcccagagagattctgattcagcggggtctttaattgggcccaagaatcttcattgttaacaagaatttctaaatgaatctaatgcaggtggttctctcatcccacttcaagaaacttacttgaaatatctcctagtcaagaaaagagattggaagctggaatagatttgagaaaaagcctgagttggggaaatagtgcctttggacatttcttattgccttctttggtccttatacccaaagctatacaattcaaatttcattttatgcccatgtgcagcagttaagccttgagaccacaagcacaattcattagattgcacaaaataaagaagagatctatctaactttagggctataatttctactgtttttgacactgtcccaaactttcccctccttggtatt

SEQ ID NO: 690412 - DNA, 659 bp, Homo sapiens
gcaacaagattgcctgagtgtaatggcatcctccttgttctctgggataaaggaaagtggtcttactgtcatgcactcttgttgggaaggggaagggggccataccaccgagccacccaccgggacctggcccgtttccatccctggggtttgctaggaagtcgcttccagccaaatcgctctgaggactcagattgtctcgtttgcctggttgttatggagagattcgacacacaggcaatcaaaccccttagctcacctgcgagaggaagagagtgagcgacaagtgtaatagtggggagagaacagatattccctgtcactccgcttgcattatcccccataatgagctctgcccgacagctgctctcagggctcagactgttgcagggagcccagaggaggctgcttggggtttcagtcctctacccactgcaagtctgaggctgcaccggtgtcycctcccccaatcaccagcttgatgaacaggcaggaaacaaaaccacccacaaggtaggaggccaacctcgctgtggaaatggacagagccacagagccttgtgtctcacacctgctggtctcacacatgtagaaactggggcaccctggtccgtcagccaggagctgtaaaggattggctcctgcatgtgagacacgtg

SEQ ID NO: 690413 - DNA, 599 bp, Homo sapiens
attctcttacattgtcattacagtttagcatgtttttgtccacaaacataacttacataaaatactgtatttttcctcttctcactaaagcactggctttttagatagttctccatgttgcagagagcacatctagtttgtttctaatagttggatagtatagtactgtatagtgtaagtccactctgttttccttatttatttattagctatgarctcacataattgcctttatctgtttatataaacaacacagtgatgcataccattaataatctggtgactgtggatttcttgcgaggatttctttttgatagaaattctggattaatattgctaggtcagcaattttgactcaagaaagtaccccctgcgagctttccaggatgcctgcatcagcctacttccaaccagcagtgcatgagcattcttgcttcatgttctcaccaacacatgacattctcatttacactgatccataaggtataaagtagtatgttactatcttgagtttcattcctctcattaccagtgaatatgagcatttctttatatttttgtggattacccttgaaaatcctttacccatttgtctattg

SEQ ID NO: 690414 - DNA, 599 bp, Homo sapiens
attctcttacattgtcattacagtttagcatgtttttgtccacaaacataacttacataaaatactgtatttttcctcttctcactaaagcactggctttttagatagttctccatgttgcagagagcacatctagtttgtttctaatagttggatagtatagtactgtatagtgtaagtccactctgttttccttatttatttattagctatgagctcacataattgcctttatctgtttatataaacaacacagtgatgcataccattaataatctggtgactgtggatttcttgcgaggatttctttttgatagaaattctggattaatattgctaggtcagcaattttgactcaagwaagtaccccctgcgagctttccaggatgcctgcatcagcctacttccaaccagcagtgcatgagcattcttgcttcatgttctcaccaacacatgacattctcatttacactgatccataaggtataaagtagtatgttactatcttgagtttcattcctctcattaccagtgaatatgagcatttctttatatttttgtggattacccttgaaaatcctttacccatttgtctattg

SEQ ID NO: 690415 - DNA, 599 bp, Homo sapiens
attctcttacattgtcattacagtttagcatgtttttgtccacaaacataacttacataaaatactgtatttttcctcttctcactaaagcactggctttttagatagttctccatgttgcagagagcacatctagtttgtttctaatagttggatagtatagtactgtatagtgtaagtccactctgttttccttatttatttattagctatgagctcacataattgcctttatctgtttatataaacaacacagtgatgcataccattaataatctggtgactgtggatttcttgcgaggatttctttttgatagaaattctggattaatattgctaggtcagcaattttgactcaagaaagtaccccctgcgagctttccaggatgcctgcatcagcctacttccaaccagcagtgcatgagcattcttgcttcatgttctcaccaacacatgacattctcatttacactgatccataaggtataaagtagtatgttactrtcttgagtttcattcctctcattaccagtgaatatgagcatttctttatatttttgtggattacccttgaaaatcctttacccatttgtctattg

SEQ ID NO: 690416 - DNA, 590 bp, Homo sapiens
tacttttatttttcttcaaagagcaatgtagctaattatagctacctcccatgattgmtgtgaagaacacatgaaataaattgcaagaaacagcccaatttgttataccatagttggaaaaggcttgtggaatgaatccattgaaacatgcctaaatggtacttgaatttaaaaacaaaaaacttttaaattttaacttaaaacttgataatattataattttaggatttctctttttcttttaattgtggcaaaatatgcatataaaatttactgtcttaaccatctttaagtacacagttcagtgacattaactatatttacattgctaagtaaccaatctctaggaatttttcatcttgaaaaactaaaactctatattcattaaacaaacctgtattaacccctcttttcagcccctggaaactagcattctactttctatttctgtgaattagattactttagacacttatgtaactggagtcatacagtatgtgtcttttcatgactgacttatttcacttagcataatgtcttcgggttttatccatgttgtagtaggtgacgggatttccttcccttttaag

SEQ ID NO: 690417 - DNA, 568 bp, Homo sapiens
attgccattcagaacattttgaaggtgtccattttccttcccccacaaaaaataggtagcattttgatttatgtctttatgaaagcagtatttccaaaatatttttctgtgattattgagataataaatactttttcgtgatgcccatgacttctctaaaacttcgtttttattgtctatatttaaggtgtaccgtatggtgttttgatatacatatacatggtaaaactactactacagtcaaacaaattaacatctctatcatctcacattgtgtgtgtgtgtatgtgttgtgtgtctgtgtgtggttacagcaccaaaaatctactctcttagcaacgttctagcatacaatattattaattatagtcctcgtgatgtaaattacatgtgtagactttttcttattcagcatttattctgtctkctgaatattttccatccacctactttcaaagttattgtaactttagtgtcaatatatataaaaggtacctcaaggaaatccctgctgtctctaaaaataacaggaggcaccttcttaagtttccttaaatagtgatgtaag

SEQ ID NO: 690418 - DNA, 652 bp, Homo sapiens
tccaactagcctttccaatatattaatagttttacaaggtaaccactcaatatcggtacttgctgcaataaagtatttaactgtaatgaaactgacctatggctttgctagtattattttctgtgcttctgtttatatgytgttgaagtcttatttgtctttcaaagcccggccttaatatttctaaagagagaataatctgttctcacacagttcaaccaaatttttttacatgtctcattatagatagacagacagacagacagacagacagacagacagatagatagatagatgagaaatcatttttgttttaatttttctcaacccttagaatgaagggatcttggcttgtgcacttctgtgagccctttagcaccaaaaacagtgctttacacatcgtatcagtcctttttttccacctaaaattttattttttttaatcagaggttagatggaatacatagtgtcctgctaatgggtgaaataaattttatttagggttttatttatataggacacatgcattaataagtctcagattgggggtgtcccctttcccagtacttagctgtcacaaagaataggtgaaaagtttcaatcaataaagttagtcaaagatgccattatatattcagaatttttaaaaaat

SEQ ID NO: 690419 - DNA, 1559 bp, Homo sapiens
aattaagaaattgtcttgaatatttactttctctctaatatccttatgatgtaacataaaattattaactttttatcagtattaagtattattaccactacatcatagtatttaagttatgtgacattacttaaggactttacattctcttctggggaagggattagatttttggttatatgcaagatagctgtattatgttatatggaatgaccttattattgtctttatttgtgtatgggtgccaagttgataaagggtcagcatttgctggttaattgtatgtgtcaacttgactgggcttgatcaaatagctggcgaaagattatttctgggtgtgtctgtgaggatatctccagaagtgattagaatttgagtcagttgcctgagtaaagatcattcctttcgcaaggtggcctggcattatgcaaccttttgagcactctaatgaagcaaaaaagggagggcaaattctctctctcctattgagctgggacatccatcttctgcctttggatgtaggagcttttggtttttataccttctgaatccagaacttataccctcatccctccttccccacaacccctggttctcagcttttcagacatgggctggaatttacaccataggtggaatcttgcttctcaggtttcctgatcagcctggactaaattatatcactggctttgatggttcttccagcttgcagagttggtggtaggactcctcagccttcacaattatgagagccaattcccaaaatcaatctctctctctctctctctgttaggatagagagatacatacttgtttgtattgctttctctctatctctctcttctgagatagaaagacagagaaatacaaacaagtatgcattgtcttataatcagataaaattatttacaaagtatgtattatcttataatcacataaaattgttatttggaaatacaaaacatattaaagagtatccacttattaaaactgtgaggtataactttgcttgttgattttggtagcagccaaagtattgaccccaaaataaatatgctgacttctttgaggaattattgtagtaggtaaggtatcatttacttcatgtcttatttggttcaaaaatgtcatttatgcaatttccttagaattccctttctatgctctttgtacgagctgcactttggtttctcatacttacattttgtgaaggtttctcataaaatggggttttctagcattatctgggccatttatgtcactatttctatctctctctctgtgyctgtttctttttgcattagagtgaaagagtacaaaatgtaatttgtccattagtaaaaaattatgagtccaggttggcaagggcaaatggagacctcaacaataggtcaattgtgatgtaattaattacagtcatgtagcttggagttcaggctgatgacgattcagttacacatcccagagagagggagaaagagaacacagattgattctgttccaaacagttaacagaaaatgtcgttgtgccttattctgcttacaagtgaaactcttga

SEQ ID NO: 690420 - DNA, 1559 bp, Homo sapiens
aattaagaaattgtcttgaatatttactttctctctaatatccttatgatgtaacataaaattattaactttttatcagtattaagtattattaccactacatcatagtatttaagttatgtgacattacttaaggactttacattctcttctggggaagggattagatttttggttatatgcaagatagctgtattatgttatatggaatgaccttattattgtctttatttgtgtatgggtgccaagttgataaagggtcagcatttgctggttaattgtatgtgtcaacttgactgggcttgatcaaatagctggcgaaagattatttctgggtgtgtctgtgaggatatctccagaagtgattagaatttgagtcagttgcctgagtaaagatcattcctttcgcaaggtggcctggcattatgcaaccttttgagcactctaatgaagcaaaaaagggagggcaaattctctctctcctattgagctgggacatccatcttctgcctttggatgtaggagcttttggtttttataccttctgaatccagaacttataccctcatccctccttccccacaacccctggttctcagcttttcagacatgggctggaatttacaccataggtggaatcttgcttctcaggtttcctgatcagcctggactaaattatatcactggctttgatggttcttccagcttgcagagttggtggtaggactcctcagccttcacaattatgagagccaattcccaaaatcaatctctctctctctctctctgttaggatagagagatacatacttgtttgtattgctttctctctatctctctcttctgagatagaaagacagagaaatacaaacaagtatgcattgtcttataatcagataaaattatttacaaagtatgtattatcttataatcacataaaattgttatttggaaatacaaaacatattaaagagtatccacttattaaaactgtgaggtataactttgcttgttgattttggtagcagccaaagtattgaccccaaaataaatatgctgacttctttgaggaattattgtagtaggtaaggtatcatttacttcatgtcttatttggttcaaaaatgtcatttatgcaatttccttagaattccctttctatgctctttgtacgagctgcactttggtttctcatacttacattttgtgaaggtttctcataaaatggggttttctagcattatctgggccatttatgtcactatttctatctctctctctgtgtctgtttctttttgcattagagtgaaagagtacaaaatgtaatttgtccattagtaaaaaattatgagtccaggttggcaagggcaaatggagacctcaacaataggtcaattgtgatgtaattaattacagtcatgtagcttggagttcaggctgatgacgattcagttacacatcccagagasagggagaaagagaacacagattgattctgttccaaacagttaacagaaaatgtcgttgtgccttattctgcttacaagtgaaactcttga

SEQ ID NO: 690421 - DNA, 935 bp, Homo sapiens
gtgtattgctgcttcatggcaatgaagttcatttcaagattaaccactgcatttaaaacactagaaaaagtcctgaaaaacttaatgcagtcttaaattttgaacatatttctatagatgaacatagttataagcacattgcacttaaaagcttacagcacatctttagttattgtaaagacattagaatgtacttcgattcgtgtgttttattgttttaaaaataaggctattactttagggagggtaagctcaccttacaacatttgctgttgtaaaagtcttctaaaagttaccagtatcactaattatcgttgccgcatcattaccaacctctctgtcacattatacgtgtttccctaagggaaacacagtaagaaatgatccataaaagtggtgtcaataatagggtgtatgaaccactatacctatatttgcacagtaaaggcattgaaataaaccagatggtctcttcctttcttgaaggttaaattaaatgcatatttacttttcctttaattataaccttcatcctacagggcaacttttaaccaaagacatggctgcataattcacatataatttgtcagggcaatgaataaatwaaaaaaaaccacagtagcctggtgctgctaatattgctaggcattgcacctttctcacaatcatagattattttttaatttggttgatgtaaaagttatgtgacttattttcttatcgatattgagagttttttgagtctttagaaccttgcaacagttgcttctgagagtcgtttcaccccttgtagcctcatttgtaatatatttatgagactatgagaacacagtttatttgagtatacatatagttacatggattaatcaagcatactagatcatactaaaaaaaaagaactccacttttaaaaagtggaatagttaagagcttgg

SEQ ID NO: 690422 - DNA, 595 bp, Homo sapiens
ctagtaaatacccctaaatacctgcaatttagtagggaaaaatagcaaaacttcccatttcctttcctttagcatttctttttcttctttcatctatttttattttcctccaggaaaataaattttaaaaattgccttacactgttcatggaagccactagcaaacactgcagtactcttaatggtgatgattctcagttgaaatatttaattatcccctttcaccccatacacacacaatacaggccaatgaatctctacaactatgttgtgttacakaagtgatgtgagctgccctggcagacggacaagaaagaaagtgaatactatttcaggtacctttatttccttccctaaacctgttaaaagtgttatgtataagactttaaaaactatatgagttacttatttcacatgtttattgctgacttttgttgccttctcttaagctaaagttctgtcttatgaggcgaatcatataaacagtgaagttttaagagttcttctatgaataaaccctgtaaaaccaccaagaaattagcattactcaaaattcttccaaatatcagtattttcatcatcctactcaactatt

SEQ ID NO: 690423 - DNA, 1253 bp, Homo sapiens
tttaaaaaaaaaaaaatgagtcagggttttgctgtgtcacgcaggctggagtgcagtggcatgatcatagctaactgcagcctcagcctcaagcaagcctcccacccagcctcacgaatagcttcaaatacaggcacacgccaccacgcccggctaatttttgtattttttgtagagatggggtttcaccacgttgcccagactggtgaactcccgggattgttaggatttcggcttccccaagttttgggatcataggtgtgggacaccacgacggagtctcgctctgtcccccaggctggcgtgcagtggcacaatctcgactcagtgcaagcttcgcctcccgggttcacgtcattctcctgcctcagcctcccgagtagctgggactacaggcacccgccaccatgcctggctaattttttttgtatttttaatagagacggggttttaccgtgttagccaggatggtctcgatctcctgacctagtgatccacccgcctcggcctcccaaagtgctgggattgattacaggtgtgggccactgcacccggccacaaagtttctaattaggaatgcaaacctttaactcccactcggctaagcacccaaaacagcaaactattttcattggatttttcacattatggtttcctgaagaagtaataaacaactctctaataataacaactagtaaacattctccatagagaatgagttttagctgggcacggttgctcacatctctaaccccagcacttagggaagctgaggcaggtggatccctggagctcaggagttcaagaccaacccgggcaacatggctgtcactgcaaaaaacttaaaaaattagctgggcatggtggcacacttttgtagtcccagctactcaggacactcaggtagggggatggcttgagcctggaaggtcaaggctacagtgagccatgatcacgccactgcactccagcctgggcaacagagcaagactctgtgtcaaacaaacaaaaaaaagaaaaygaattttgttgggcgtggtgcctcacacctgtaatcctagaactttaggaggctgaggtgggaggatcacttaagtgcaggattttgagaccagcgtaggcaacacagccaagacctcatcactacaaaaattatttaaaaattagccaggttggacaggcgcggtggctcacgcctgtaatcccagcactttgggaggctgaggcaggtggatcacaaggtcaggagatca

SEQ ID NO: 690424 - DNA, 635 bp, Homo sapiens
gaaaccccgtctctactaacaatacaaaaaattagccgggcacggtggcgggcgcctgtagtcccagctacttgggaggctgaggcaggagaatggcgtgaacccgggaagcggagcttgcagtgagccgagattgcgccactgcagtccgcagtccggcctgggcgacagagcgagactcygtctcaaaaaaaaaaaaaaaaaaaaagaacgggttagctgcttttaatcaatgcaattagatcaccaaaaaaaggtgggaaaggagctcataaattaaaataaaactacctcccccctgaaaaaaataaaataaaataaaataaaataaaataaataaaaacacccacgcccctggagctaacctgacaactaccttcattcacagtgctttacacttaaaccaggcttggggaaatgaataaaagcagagaggggccactgcttttaaacgtttcccaacagtccagacgatacttctagcctctgctcatactttttgacagtgaatcagaacaaaacatagatttgctaatgtgcatttaatcaccaaaggactgaagaagtctgggcttttattctgtagtgtttctaagaccttgtccattaaatgtaaaccaaaagaaagaagtctt

SEQ ID NO: 690425 - DNA, 586 bp, Homo sapiens
ctatgtggtaactgtggacaggaaatgttttctgatcttacaatgtaatagagtgtctagaaaactccagtgtgtaaaaggttgtctgtgtagtgtgactttgtgagtgtctaaactgtctgcctttatcatcagtaaaattaaatggagtagatattaggaggtgcaaaggattcatctgcaagtgtgaagaaaaggaggactttgcaaagccataggaaggctgcaggtgaggaagacctgagccctaacctactgcatgctctcattaagaataataatggcaatgtctatctattgccttgagagtcatttatgagtctcagattctgagacttttgcaaggattgtagagtacagaaagaaaagaaatgatccattttgttgtggtggtttatcaagctaatgaaaattcattttagaaaatcaaatatagagaaaggtataaaaaacaaaacaaactatatcagtctcaccactctgaaatcaccatttttaatattttggcatacatctctccagacttctctgcgcatctataaaccaatatatgtacataaatggttcattatacatgatsgcttgc

SEQ ID NO: 690426 - DNA, 402 bp, Homo sapiens
catgtaccctaaaacttagagtataataaaaaaaaaaaatttataaaaaaaaaaaaaataaaaaaaaaawaaaaaaaaaagaaatgcatatcaagaagacaggtccgatttcattaaatactggtcatgtattatttaaagacttcctaaaccttattattattattattattaaagacttcctaaaccttaaaattatgctaggccttcatttggttctattcattgtagtgagatggaaattacaggacatcaaaaggctgaagctgccaggtatataccccccgaaaaggaaatcaatatatcaaagagataactgcactcccatgtttattgcaacactattcacaatagccaagatttggaattagcctaagtgatgatcaacagatgaatggataa

SEQ ID NO: 690427 - DNA, 402 bp, Homo sapiens
catgtaccctaaaacttagagtataataaaaaaaaaaaatttataaaaaaaaaaaaaataaaaaaaaaataaaaaaaaaagaaatgcatatcaagaagacaggtccgatttcattaaatactggtcatgtattatttaaagacttcctaaaccttattattattattattattaaagacttcctaaaccttaaaattatgstaggccttcatttggttctattcattgtagtgagatggaaattacaggacatcaaaaggctgaagctgccaggtatataccccccgaaaaggaaatcaatatatcaaagagataactgcactcccatgtttattgcaacactattcacaatagccaagatttggaattagcctaagtgatgatcaacagatgaatggataa

SEQ ID NO: 690428 - DNA, 402 bp, Homo sapiens
catgtaccctaaaacttagagtataataaaaaaaaaaaatttataaaaaaaaaaaaaataaaaaaaaaataaaaaaaaaagaaatgcatatcaagaagacaggtccgatttcattaaatactggtcatgtattatttaaagacttcctaaaccttattattattattattattaaagacttcctaaaccttaaaattatgctaggccttcatttggttctattcattgtagtgagatggaaattacaggacatcaaaaggctgaagctgccaggtatataccccccsaaaaggaaatcaatatatcaaagagataactgcactcccatgtttattgcaacactattcacaatagccaagatttggaattagcctaagtgatgatcaacagatgaatggataa

SEQ ID NO: 690429 - DNA, 714 bp, Homo sapiens
cccacatgagcatattgcacattacaattttttccctgtaatgtggaatcagcccagaaagcttgttaattgcttaaagtactccaagcttgtttgaatagaaaatcacactgaaacctattagctcacttttctctcagcatggccagttatacagacctgactatcagttccagaaaagttattttttaaaggaagtctttcaatatttcatcgattctcagcacacttggtggcttaaaaatatcctccataattttcttccctgtgatgtatatataaacaaatctaattccttgttagatgctaattgcaacagctatataactgtgcctctgaaacttcctagaaacattatccatatgtcaaggtcttcccctaactacttattaccctaatgagagaattatttcttctttctcctgctgcccgccttccatctattttgtaaggtaaatactgtaaactaaaaataaaatcccatgccccatcatctgactgaaaggactccctcttgaccatggggaccccagaaaccttgaaactgagttcctsgccatgatgggatgataggtcagacatgtctcattatacctgttcccttttgcagtttacacaaaacaactgaccagaatttatacaaaaatagaggtcataaggctgacaaaacagactctttgtgacaatatgataccaaattataaacaggaccta

SEQ ID NO: 690430 - DNA, 714 bp, Homo sapiens
cccacatgagcatattgcacattacaattttttccctgtaatgtggaatcagcccagaaagcttgttaattgcttaaagtactccaagcttgtttgaatagaaaatcacactgaaacctattagctcacttttctctcagcatggccagttatacagacctgactatcagttccagaaaagttattttttaaaggaagtctttcaatatttcatcgattctcagcacacttggtggcttaaaaatatcctccataattttcttccctgtgatgtatatataaacaaatctaattccttgttagatgctaattgcaacagctatataactgtgcctctgaaacttcctagaaacattatccatatgtcaaggtcttcccctaactacttattaccctaatgagagaattatttcttctttctcctgctgcccgccttccatctattttgtaaggtaaatactgtaaactaaaaataaaatcccatgccccatcatctgactgaaaggactccctcttgaccatggggaccccagaaaccttgaaactgagttcctggccatgatgggatgataggtcagacatgtctcattatacctgttcccttttgcagtttacacaaaacaactgaccagaatttatacaaaaatagaggtcataaggctgacaaaacagactctttgtgacaatatgataccaaattwtaaacaggaccta

SEQ ID NO: 690431 - DNA, 953 bp, Homo sapiens
ctgtctataaagtgaaaatagattggagaaatacaggattggagcaacaatgctagttatgtggctgttaaaatagactaagtaagagatgagagtgatctgaactaaggttatgacagtgagatggaaattaatggatcgattccaagagatgccaagacttctggcttgaataagtggttggataaagggttggtagagacaacatatattttagacagagtgaacctgaaggtcctgcaagacatgaagtggcaacatttaaaacatagttaaagggctgytggacgtcatagactatccaagtttcaaaaccatgaattgagactggcataaatctgcaaatttgtgcaattatattcgtcattgttcaggattttatgcatagtcttggaggaaattgacagctaaattagacccacaacatgggtttgtcagcaattgtgatagaagaataatctatgttcttgagaaaagactcgaatatatattggtaagagagtctcattcataatggacaaaaaaatctaagctgaattaagacagaagtggacagagtaaagggctgaagagaagaaaataaaataccacattactggcagtccctgtgcgggggaggaggaactgcttttcttctcgtggatcacagggcttccttcatagaggctggccaatacagagttgggcagctggaattgtactttcagaatatctatgctatcagcctagcacagagttttaaatactgttgcaatacccaccacatcccacccagaggagccctggaatcttcatgagagatagcagtgctcttcttgtggagtttattaaggcttactgactgcttttaccctcagactattgggaaccaaaaatatttctgttgtctggaccatggaaaacaaagaccaggcaaaagagataggggtgaagtaagagatgagtgtaacttt

SEQ ID NO: 690432 - DNA, 1258 bp, Homo sapiens
gtggctcacgtctgtaatcccagcactctgggagtccgaggcgggtggatcatgaggtcaggtgatcgagaccatcctggctaacacggtgaaaccccgtctctactaaaaaaaaaaaaaaaaaaatgagccgggcgtggtggcgggcgcctgtagtcccagctactcgggaggctgaggcaggagaatggcgtgaacccgggaggcggagcttgcagtgagccgagatcgcgccactgcactccagcctcggcgactgagcaagacttcgtctcaaaaaaaaaaaaaaaaaaaaaaaaaaaaagttgtgttcccactatgttgcccagggtgatcttgacctactgggctcaagtgatcctcctgcctcaacttcccgagtagcagggtcatgcacttttgggccaggatcatctcttaaccttcctgcaagcccttgccaacttcctccaggcttctgcccactgcctgcgcctaaagccaatgccatgtgtttcatattttagtgaccagagcacagtgaggcacgtcagacccattagctttctaatcaccacaccagctgtgtgagttgggggttgggtactgccctcccctttcataggagtgggcactgagaattggggaaattacacaactggtcataagcactcaattaggaggaggaggaggaggaggaggaggaacagagtgtttgaaagacaatttttaaaaattggatagcacagtagcctggggacatttgcgaaggagtaagatggcggcgtgtgcgttgataaccgttcaaggtgccatcgtgacggtcctgagccaggagggaaagagtcatatgtttgctatgctcttctcaccaaggcaggggattgtgtcatatgttttagagagttgtctgtgaaaaacaattaaaacttgatgcttaggccgggtgtggtggctcatgcctgtaatcccagcactttgggaggccaaggcaggcagatcacttgaggtcaggagttggagaccagcctggctaacgtggtgaaaccccatctctactaaaaatacaaaaattaatcgggcctggtggcagcaggcacctgtaatcccagctacttgggaggctgaggcaggagaatcgcttgaatgygggaggcagaggttgcagtgagccaagatcatgccattaaactccaacctgggtgacaagagcaaaactccatctcaaaaaataaaaattaaattaaaaaaataaaaaaaaaataggccaggcgcagtg

SEQ ID NO: 690433 - DNA, 1302 bp, Homo sapiens
ccttacttttattattagtaaaataatgtgcacatcatgtcccaactcaaggagaagaaaatgctttgcatcctgaaattcccactctgccctcccctgcaaaaataaaatcaaacaaaaatccaacaagatcactctgtctagtgagccattttctgtaaatgactaactccttgatagaatgatacccctgacttaaaatactgatatatgttcctataagaaaatagctgctttctaccaggaagagactataaacttagaaactttagtaatttggggtcttttctttaaactatctagtgagtttttttttaatttggtgagaaaagttagcaactaaaaatcctctctctttgtaattcttccatgcctgtgtcttcttaatacagttattatcctgtaaagaaaaccaaagaactaattatggtaaaagttaggacgacttttagtgagagagtgagttttgcttaggagggaggaatcactggagatgtggcttagtgaaagaagaaaggtaaaataatacatattttcaccttagaggaaaggtgaaaatacatattaaaaaaggagagaaaaataaataaaatctacacaaaaacaagaacaaccaccactcatatggagcccttgcagaacttgcaggatcctggcctgtgatgagggtctatactctgggctatttgcctgacaagaagaatatcaggactgtaatgawgaaggaaacaagccgatgtggaaaaacgttgattcctaaacactgtgaccatctgctggccaaatggcaagatatactttgttccatggctgggaactgtttgtaaaaaaggttacgttgtgaacagatgttgtaagtctctttttaagaaactaaaattcaggggcaaaattagctggaatcaactttaaaaacaaggctttaaaaagctgacataaaactctaggaccagtagctagcaaaaatgtgattagaacagctgtctgggacattccaccaaaataccctcaccccagaggagaggcctaactcatttttggaaattgcaaaggtggatgaaacaggcctcaagagcaagagaaattttctgtttttctctctctctctctgcccctcctcctttctctctctctctgagtattattttaaaaatggatgtcatttttgtcttattcataacttatctatgtttgttttactataaatgtcttaaattacttgccatcaagttggggttatgttctaagaagattgagaaagtgtttttgttttgttttttgagacagagtcttgctctattg

SEQ ID NO: 690434 - DNA, 1302 bp, Homo sapiens
ccttacttttattattagtaaaataatgtgcacatcatgtcccaactcaaggagaagaaaatgctttgcatcctgaaattcccactctgccctcccctgcaaaaataaaatcaaacaaaaatccaacaagatcactctgtctagtgagccattttctgtaaatgactaactccttgatagaatgatacccctgacttaaaatactgatatatgttcctataagaaaatagctgctttctaccaggaagagactataaacttagaaactttagtaatttggggtcttttctttaaactatctagtgagtttttttttaatttggtgagaaaagttagcaactaaaaatcctctctctttgtaattcttccatgcctgtgtcttcttaatacagttattatcctgtaaagaaaaccaaagaactaattatggtaaaagttaggacgacttttagtgagagagtgagttttgcttaggagggaggaatcactggagatgtggcttagtgaaagaagaaaggtaaaataatacatattttcaccttagaggaaaggtgaaaatacatattaaaaaaggagagaaaaataaataaaatctacacaaaaacaagaacaaccaccactcatatggagcccttgcagaacttgcaggatcctggcctgtgatgagggtctatactctgggctatttgcctgacaagaagaatatcaggactgtaatgatgaaggaaacaagccgatgtggaaaaacgttgattcctaaacactgtgaccatctgctggccaaatggcaagatatactttgttccatggctgggaactgtttgtaaaaaaggttacgttgtgaacagatgytgtaagtctctttttaagaaactaaaattcaggggcaaaattagctggaatcaactttaaaaacaaggctttaaaaagctgacataaaactctaggaccagtagctagcaaaaatgtgattagaacagctgtctgggacattccaccaaaataccctcaccccagaggagaggcctaactcatttttggaaattgcaaaggtggatgaaacaggcctcaagagcaagagaaattttctgtttttctctctctctctctgcccctcctcctttctctctctctctgagtattattttaaaaatggatgtcatttttgtcttattcataacttatctatgtttgttttactataaatgtcttaaattacttgccatcaagttggggttatgttctaagaagattgagaaagtgtttttgttttgttttttgagacagagtcttgctctattg

SEQ ID NO: 690435 - DNA, 662 bp, Homo sapiens
ctagttgaagtatgtttctactgaatgtgcatcactttcacaccatcataaattcaaatcattgttaagtcaaagactgtataattctttaacagaagtcaaatgacggtaactagggttctcattaggtgaaataatcctattgttagaaacaataatccaatctatcaagaaatataaactctatcacttagttcttctgcagtatccctaagatctaaaatagtaggcatttggtagaaactatttgaatgaatgaaaaaataatgactctcatcctttgtaactccactcttaccgctataactaacctccatttggcatctgcyctcacaactatggctttgttgtgacattaagagatgagatggattgaataatcttttaaggttcctggaataatgaaaaacactttccgctcagtaataaaatgcttttattttattaggccttttaaacaatgtatttttctcacaaattttagaagaagtattgatatgctactaatgtaaatttgggatgtggcagcaacttaggcctgcagcatacttgccactgctaactccattggcaccctccaccacccctcccactcggcactgctaactccattgcctccctcccacacccctcccacttggcactgtccactcatggcacag

SEQ ID NO: 690436 - DNA, 924 bp, Homo sapiens
gaaaactataaaaacaggtggtggactgaatttgattcatgggccatcaattgctgacccttgttctaaggtataaactccacrtgttgttttctcctggattcctggcatcagcataacaatggcacatagtgggtataaaatagatatttgttccacaaatcaagaagtgtagtcttacaggctaggccattcttggacaatggatgtggaatgtctatgatttgccgatgtcagcacttaaacttaggactgttatcacaaccttaccattcatggaatcaaggctgcagcatcattacccagacaagttttgtttagaaactgtagtagacctaaacctcaccttaggggccataaaaaaagtaaagataaggacatctagagagagcctgagttgggaaatctagcatagatttcagcttgtctggatgtctaagtagtcaactttattgtatttccataactgtcataaaacatactataagctcagtgacttaaattaacacaaacatgttattctacagtttataggtcagaagtgtgatatgattttcactgggttaaaatcaagaagtcaggaaggctgtattcctatctggatctagcagaacatctgtctccttgctttttccagcttctagagaccacttaacttcttagtttatggctcccttcttctatcttcaaagccaatgatactgcatctttctgaccattcttccatagtcacaactctttcttatcacagtcagcaaatattctctacttttaagaacccatgtaattagattcgacctacccagataagaatctgacattcaatcaaaggatatgatttaaacattttctacaaatatgtagttactaaaaaaatcttactttctgaagatgcagtggtattggaattatcattattgattg

SEQ ID NO: 690437 - DNA, 924 bp, Homo sapiens
gaaaactataaaaacaggtggtggactgaatttgattcatgggccatcaattgctgacccttgttctaaggtataaactccacatgttgttttctcctggattcctggcatcagcataacaatggcacatagtgggtataaaatagatatttgttccacaaatcaagaagtgtagtcttacaggctaggccattcttggacaatggatgtggaatgtctatgatttgccgatgtcagcacttaaacttaggactgttatcacaaccttaccattcatggaatcaaggctgcagcatcattacccagacaagttttgtttagaaactgtagtagacctaaacctcaccttagrggccataaaaaaagtaaagataaggacatctagagagagcctgagttgggaaatctagcatagatttcagcttgtctggatgtctaagtagtcaactttattgtatttccataactgtcataaaacatactataagctcagtgacttaaattaacacaaacatgttattctacagtttataggtcagaagtgtgatatgattttcactgggttaaaatcaagaagtcaggaaggctgtattcctatctggatctagcagaacatctgtctccttgctttttccagcttctagagaccacttaacttcttagtttatggctcccttcttctatcttcaaagccaatgatactgcatctttctgaccattcttccatagtcacaactctttcttatcacagtcagcaaatattctctacttttaagaacccatgtaattagattcgacctacccagataagaatctgacattcaatcaaaggatatgatttaaacattttctacaaatatgtagttactaaaaaaatcttactttctgaagatgcagtggtattggaattatcattattgattg

SEQ ID NO: 690438 - DNA, 659 bp, Homo sapiens
acctttctagcttgtggagcccttgaagattccagggaagtccatggttgtgtaccgcatgagaccagggctgaaaatgggtctttcagcacatggttgtagatggaaccatagaaatctgtctgatcaatgaactgttgaagtgatggacactgttcagtgaatacatgtaccacctttggcagtctttcagggggcttgcagccctgctggaagccagattcatagttccataaatttgtttttcccccttgatcagtcatctgaccaatgctgttggttattttaagggatactgaataataataataataaaaaatcccggtggagcaatgcaacgtattttctcctgtgtgggaaataactcattcattcattccatagtcatttaatgagtgcctaccatrtgcttagctttgtaaggaccctcccagtgggagaggtcatgatacaacatccagaagaaccttttgtaaggggatctccaccagaaatgataagatgacctcaggaacagaagagctgttttaaagaacagatgttctagaccagttgacccagctaaccttaaaaatacttcactgtagaggttctcccaaggacactaaagggtgtggtttggatttatagaactcagaagcgtttggaagcctttagtt

SEQ ID NO: 690439 - DNA, 567 bp, Homo sapiens
cccagctactcgggaggctgaggtgggaagattgcttgaacccaggaggtcaaggctgcagggagctgtgattgtaccaccacactccagcccgcgtgacagagcaagaccctgtctctaataaataamtaaataaataaataaataaataaataaataaataaaatatccaactgcctacatgacatctccatggaaatgtttaataagtatctcaaatttactcctggacagaacaggattagccttcccttagtcgtccccttctcagtaaataacatcactgtctacctagttactccatccaaattctgttcacttctgtctgcactgccttccccatgcccaggccaccacagtctctcctacagggtctccctgctgatcctcttgcccatttaccatctatgttccacacccagtgagagtgatcttctgaaaacataactcagatcaggccagattcaaaattcgaattgttgtggccaggcgtggtggctcatgcctgtaatcccagcactttgggaggctgaggcaagaggatcacttgaggccaggagttcaaga

SEQ ID NO: 690440 - DNA, 982 bp, Homo sapiens
gagtttttaggacagcaatgatcttagaagagaatcagatcaaagttctgagtgttttccctggaactggcattgtattattaatatcctacaaatgggagacatgtatcccctggtctcatacctggaatatcaaaatggtacttcattaacagtgtcaaagcaaaagtctgatggctctgmctgctcttgtgagtaggggtactcatattccctttaagcccttcccccaaattggcctagaggtccagggggttccacatgggctcaacattctctgattaactctcccctcatatcaacaacttcctcctatcaagcttgacatcttgtcctatttcttcctattctaggtgtaggcaagtctagtttgctcttcagctactctatccctctcctgcatattgactcttgaattcttgatccctagtagcttctcacagtctgtgaaatggagcatggaaccactacatagaaacaggaaggttctgccctgtactctcagctcttaagggcacagtcacaagaagaccatttttaaattctcattgtgtaacacccttacacattccacatgcatcatagcacataactctgacaataaactacaaggtaagcaactaattattccctttttaatattttttaaacctaggaaggtaacttaatctctttgacttccagttctcatgaactagaacattagagaatcaagatttgaaccagaggtgatggtttttaaaatatgtctgctagatatcaaaatgagtgcatgggatttgatatatgtacacaggtaggcatagaaatagatagagatgctcaaggatatgtgtatatgcacatatgaatatgtgtgcatgtatatacatgtatccatttccaaactctgtcttttaggaggatatagaaacaatatcaccccagtaacaataaacaccctagtgcccacatcttgatttctccatatcattttctgcta

SEQ ID NO: 690441 - DNA, 628 bp, Homo sapiens
cttttaaatgtatttgtattgaaaaatactgagatatagtccttctatttagttaaccaaccaaccttccttccttcctcttttttttttttttttttttttttgrgacagggtctccctctgtcacccaggctggagtgcagtggtgtaatcttggctcactgtaacctctgcctcctgggttcaagtgattctcctgcctcagcctcctgagtagctgagactacaggcgtgtgccaccacgctcggctgttttttgtatttttggtagagacaggatttcaccatgttgcccaggctggtctcgaactcctgagctcaagcgatccacacactttagcctctcaaagtgctaagattataggcatgagccaccacacccagctggttaatctttcagttgttcctcaagaaaagtaattcagtcgttttatgttttgaccttgaacataacctgttgtgtttcaactctgtctttccaggcttcggttgtaagctttttaaagaaagaggattgtattttatgattttggcagtgccctccttgtcttcttctacaacttctagttcagagctttattttgtttcatatcactctagaaattattaacaaaccagtggctactta

SEQ ID NO: 690442 - DNA, 628 bp, Homo sapiens
cttttaaatgtatttgtattgaaaaatactgagatatagtccttctatttagttaaccaaccaaccttccttccttcctcttttttttttttttttttttttttgagacagggtctccctctgtcacccaggctggagtgcagtggygtaatcttggctcactgtaacctctgcctcctgggttcaagtgattctcctgcctcagcctcctgagtagctgagactacaggcgtgtgccaccacgctcggctgttttttgtatttttggtagagacaggatttcaccatgttgcccaggctggtctcgaactcctgagctcaagcgatccacacactttagcctctcaaagtgctaagattataggcatgagccaccacacccagctggttaatctttcagttgttcctcaagaaaagtaattcagtcgttttatgttttgaccttgaacataacctgttgtgtttcaactctgtctttccaggcttcggttgtaagctttttaaagaaagaggattgtattttatgattttggcagtgccctccttgtcttcttctacaacttctagttcagagctttattttgtttcatatcactctagaaattattaacaaaccagtggctactta

SEQ ID NO: 690443 - DNA, 605 bp, Homo sapiens
gctcccagggacctcctgagcagaatttccagtggtccatttacctgccttcgtcgccagagcgagaggtgcagatcgtcagcaccatggacccttccttcccctatgccatctacacccagcgcgtccgcggagggaagatcttcatagaaagagtccaggggaacccaaccctattgcacatcacagatcttcaggcccgggatgccggagaatatgaatgccacacacccagcaccgataagcaatactttgggagttacagtgcaaagatgaacctagtgggtaaggagaagctgtcttcacgtcgccagcrtctggcctgactcagttctttagtagtgtaattttgctttatgccatgcatttgactttaaaaaaaatcccaaaactcccaacatattttaggggtcaacagatagcataaggaaactaaatttctgtgttcacttctaaataataggtggttgagggtgaaaatttaaaaagatctaatacagatgttaagaatttcataagttaactaacgctgtaactggtgaaaagggatatgaaaatataaggcaaggacgtttgtggttgatgatctgaatgacaaggaaaat

SEQ ID NO: 690444 - DNA, 1332 bp, Homo sapiens
caatactacaaccgtattcccttctcctcttttccctgtgccttctttctgtttagtgtggcaaaataatactaggattatgatttcatgattgatagcttatgcagaaaacttaactgaacattgaatatgtcaagctaaatctaaattcctacaataagttaaagatcctctggttcacctgtaacagatttaattgatcctccaagggcaactacttgttcaaattgaacatctagttctttctatagggttagacttttagatccatgtattagactccttttttaaatctaacagtaggagaaacctatagtgagagtttttcagataaattattccataaattgagtaagtaaaccaaagtgaaagataatttgacaatttgtggacaaatggattaccttaatcccttaactctcagtagcctctaaccatacaatgatttaatcatggagcctttgcacttccctattcgtgaccccaaatacaagaaagcatcccacagttactgtctgatgaaatcctcaaggatttgcttctatctatagatggtaacatacaggtaagcaaatcctgtctcagtcagtggtattttcttattttaggctcaatgtagatttgaattagattattccatattcaaatagaaactgaatattggtcaataccttataatttgaactatagaataaagaataatttgtcagcaggcataaactcctctaaaaggacatctttgttttaatgtttcttctgttgcttagcataaatataaatgagactatagttagaactctgtctcaaatattagctgctatagctgactctaccctaaaggctttagtggctaaataatttatatatcactaatcatcaggtatatgcaaaccaaaataaaatgagatcacagtgagatagcataaggaaatatcatctcactccaattacaatggttattatcaaaatacagamcaataacaagtgtagagaaaaggaaacccttatatgcttttgttgggaatataaattggtacatccattatggttgtaccaatagtatgaaggttcttcaaaaacttaaaattatcacatgatcgagcaatttcaccactgggtatttatccaaaaaaaaaaaaatgaaatcagtatgtcaaaaaaaatctacacttttatctacagcaaaaatatagaataaatatatatgtccatcaatggataaataggtaaagaaatttagtaaagactccaccaaaaaaactgttagaactgttaaacaacttcagtaaaattgcaggatacaaaatcaacatacaaaaatcagtcgccttt

SEQ ID NO: 690445 - DNA, 988 bp, Homo sapiens
cacagtttttcagaatcccaagttttgctatgggcctttctgtttctttctttttttaatgcagctttctttcttagctttagaggaagttgaaagaaagaaatattaatggaatcatgtaaattaacagccacagatctaaatgaatagcacctatattcaaccagggttgcttaaacaagcttgaacacctaaactctctttctcccgagtgagttgtttgctaaatatgttatggagagagatgttaggtgattgcttttctcagtactggttaagaatattggaccttggagcagattgtccctatcagtttgtataatcattatacatcaggaatggtcctcagtttatatacataggacctattgcctactcttggtggtactatattagtattgatttgcccrtatagatttctggttttgccctgaggactaaaagtggctaccttctggctacctcctgttgtcagtggcctacagttttgtaacatagtccattttgtgtcctggaaaacattaatttcttgataattgactcggatatgatagcttgaacttaattatcctgagtctgaaatatataagtcattttgagtagctgttgtcagtaaaatgtaaaaaaaatcaattactctaatttactgagaaaaaaggtgatgacagttttcaccttgtaaaagtaaagtgctacttttgtatctttaattattggaagctgtatttagaaagtgctggtctagataaagtgatattgcttcagtaactgctttattgatttaaatatgcttaaagtgtaaaattagttttcagtcccctgaactctgaaatattaatgaggagtttagagaaattatttccaattataatacaaaagaaaaatggaaaattccttttgagtatgattttatgcaacataaaattatggagagagaagatatatattgttttagagatttctatgcttgtaaaattttgaggtaaaa

SEQ ID NO: 690446 - DNA, 652 bp, Homo sapiens
gacttttataaaagaggctgcatatagcatttggctggcttgcccttctgctttctcccatgtgaggacaccacatcacccgccgcctgatgatgcagcaataaggtaccatcttagaagcagaaagtagccctcgccagacaagcaaaccgatcagtaccttgattttaaacttcccagtctccagagttgtaagaaaataaatttctgtcctttataaattacaccagtcatcaggtattttgttacagcagcacaaaatggacyaagacagttccattgcaacaaggtgccattcattaccttgatatatgctaaaaccccaacagcttcatctatcattgtctttttgccattactgcaaatgtcaacgtggtgaaaaagtcaattaatatttcagtattatgaagtttttttttttttcttgaagtcacagcttcgctttgctggactctctttaatgaacactttgtggaccccatgaaaagatcttggagactcccaggggttcatggaccacaattttagaaccactgccatcaaaagtaacgtcacctttttttggaacacattttgaaggatttgttgatattttagggagtatgagaaaaatagaggaattgtagaggaatctaagagaactccaaggttg

SEQ ID NO: 690447 - DNA, 1574 bp, Homo sapiens
acacataaatagaaataaaatgtgtaataacaatagcaaaaaccccaattacctttgcaccaacctaataacctgtccaggattgagtctttcatacttaatggtaactgaccagtctatccatgtattttccaaggtgtgacctgcagatcactagctattttaaattttccttgaaaagaggaactatatggtcaaacatatttaagaaatgctatgaactactttctcctcttactgaatttcactgagtaaaaaaatattaaggactctgagaagtcttgtattagagaaagatgtctgtgtgcaatctagcagttcctaaattatttgtctgaagcaaataatattgtgctattccacaggataaatgtgtgtgaactttttctatttaatcaatctacagaagcaaagctttttactttatagtcaaaagattatctcacaataatgatggtcattatggtggcttccttctcttcccccaacccccactgcctggtttattgaagtaaaattgacttacaataagctgtacatatttaaagtgtgcaattcgataaggtttgatttatgtatatacacccatgaaactgtcatcagaattaagatattgaaaatatctatcatccctaagttttgttacggtcctttgtaatccctctctcctagataatcttgaatacaaagcaataagagcagacaacattgtccactcttttttgagggttggrccctcaaactttaatgtgcatgtgactcacccaggattcttgttcaaatgcagactcagattcagtaagtctgtgggtagggtctgagtgtctacatttctaacaagctctccagtgatgctccagtggtactaatggtgctcacacatcaaaaccagcaccaagttcagtattcacatataaattgctgccttggaaacagtttccactttaaaaatatttaaaaacaatattaagtttgtcctagttattactcatggaaaataccatagatagagttagataaaaatcagtctaacaataacacaactccttccaaagcccatgaggaaactaaatatcctactaataaagggcatgaaaaatcttagaagagaaatgttgcaagtaatttcttcatcttatatcttaaaatgaatattgaagacaagctcttttaattattcacaagaaatcttccacaatggaatagtgagaaaatatctgacaaatatcatcatcatcatcatcatcatcaaattgctgtatcataccttgtgtttaaaactatcttcctaatttaataaaacttgcttaactttggtcaaaataccttatctatgcttaaattacacaaaactcctaaacattattttctttaattgcacaatttgtctgcatagcaaaaaagcttaaaaggcaataccagaatggaattggtttggtcataatcaatagcatcttaatggaggatttaagtactataattcccctgaatgtagaagaaaacctggtatgaaataaaaaccctttgaagagctattttgcatggcataaagagttctcaccaacaaccttatc

SEQ ID NO: 690448 - DNA, 1759 bp, Homo sapiens
ataagaaatggcattgaaaaagagatacctgtgtctctgtcaaatttgytgcttcaacccaatcattctgtagaaaatcaaagagcacatttaatctctttcgcctatctctttaaaaaaatggagactgtatatcagaatttgtcttttctgtgtacttaagaacatggcaattttagatacagcaatatccaaagtttattcttcaattttatactttccctttgcatatttattctatcatttttcaaacttttagggaaaaatacttatcatattttcccagattagtaagcttgcaaatactatcaacatatcttcttgtggtctagctgtggctacatggacgaagaaagggagaaaggaaggaaggaaagaagtattcaaatgagaagatgtaatcttttaatttatctattccaaaagctaataaaatattagtcccttaaccctgtcatccaatgaaaacataaaatgttttcttacttctagagttcaagcaaaaaaaaatcacacatttttaaaggtcatagtaattgagtagcagaaacatttattaacagtaaggctgcttaatgcagactgaatttatttattcactcttgaggggccgttagattgtacaattctgtaaagtccttagtatgagaatggcatcagcttcagaaacctaagaaatagttgaactggggagacaagtaaataaatacaaagagaaaaacttactgggagcacagaaatatgtgcgctaactctttttgagagaaccgtaaaagattttttttggaaaatattaattttgttctgtaatgtaacacatgaaaaaggattgttagagaaaattatatgttggagtactttttgtttacactggaaacaaaacatttctgcacaatggtctgttgcttaagattcctggagaatcacttctgtgtttagatagttttttaataattaaaaaattaacatttataaaattagaaatagttgtattattttatttaatatttctttatgttgaatatttaatgtccatgaattaatctttaaattaatatgaagtaaccattaaatatttaaaaatattgaatttccaggaaaactccgttaaagactccatcaactttaggacatcccaaattaattaaaagaattgggcttcgattttaaggaatatagaaaggatatagacaaatacataccataaagtgactaaaagaagagaacaaagttgtcttttgaaagagtggaattcagacacactatctaaacagctatattatacatgggttctttgtttggacagtattaacatttattgttcagaaagcacaattatttaaatacatataataaagaaattaaatctttgaaaatctcttttggacagaaaaagccagtaggtggacctatacaggtatcaaattagaatctatcaaacttgaaaactaaatctattgaataataaaaatgacaatcttataagataatggttaactaaaggttctaactaatatgaaaatccttaggttttaaaaaacttcagagattaaataaaaacaacaaaaacatcataattaagatacatactaaaatgccaattaatggtaagagttacattaacttaccaggtttaaactcatgctaaatcggttttagaggattgatttcattattatcctaaaatctgttggtgtaacagaatgactgatatgtgtctgagtatatatatatgtatgtgtgtgtgtgtgtgtctctg

SEQ ID NO: 690449 - DNA, 1759 bp, Homo sapiens
ataagaaatggcattgaaaaagagatacctgtgtctctgtcaaatttgttgcttcaacccaatcattctgtagaaaatcaaagagcacatttaatctctttcgcctatctctttaaaaaaatggagactgtatatcagaatttgtcttttctgtgtacttaagaacatggcaattttagatacagcaatatccaaagtttattcttcaattttatactttccctttgcatatttattctatcatttttcaaacttttagggaaaaatacttatcatattttcccagattagtaagcttgcaaatactatcaacatatcttcttgtggtctagctgtggctacatggacgaagaaagggagaaaggaaggaaggaaagaagtattcaaatgagaagatgtaatcttttaatttatctattccaaaagctaataaaatattagtcccttaaccctgtcatccaatgaaaacataaaatgttttcttacttctagagttcaagcaaaaaaaaatcacacatttttaaaggtcatagtaattgagtagcagaaacatttattaacagtaaggctgcttaatgcagactgaatttatttattcactcttgaggggccgttagattgtacaattctgtaaagtccttagtatgagaatggcatcagcttcagaaacctaagaaatagttgaactggggagacaagtaaataaatacaaagagaaaaacttactgggagcacagaaatatgtgcgctaactctttttgagagaaccgtaaaagattttttttggaaaatattaattttgttctgtaatgtaacacatgaaaaaggattgttagagaaaattatatgttggagtactttttgtttacactggaaacaaaacatttctgcacaatggtctgttgcttaagattcctggagaatcayttctgtgtttagatagttttttaataattaaaaaattaacatttataaaattagaaatagttgtattattttatttaatatttctttatgttgaatatttaatgtccatgaattaatctttaaattaatatgaagtaaccattaaatatttaaaaatattgaatttccaggaaaactccgttaaagactccatcaactttaggacatcccaaattaattaaaagaattgggcttcgattttaaggaatatagaaaggatatagacaaatacataccataaagtgactaaaagaagagaacaaagttgtcttttgaaagagtggaattcagacacactatctaaacagctatattatacatgggttctttgtttggacagtattaacatttattgttcagaaagcacaattatttaaatacatataataaagaaattaaatctttgaaaatctcttttggacagaaaaagccagtaggtggacctatacaggtatcaaattagaatctatcaaacttgaaaactaaatctattgaataataaaaatgacaatcttataagataatggttaactaaaggttctaactaatatgaaaatccttaggttttaaaaaacttcagagattaaataaaaacaacaaaaacatcataattaagatacatactaaaatgccaattaatggtaagagttacattaacttaccaggtttaaactcatgctaaatcggttttagaggattgatttcattattatcctaaaatctgttggtgtaacagaatgactgatatgtgtctgagtatatatatatgtatgtgtgtgtgtgtgtgtctctg

SEQ ID NO: 690450 - DNA, 1759 bp, Homo sapiens
ataagaaatggcattgaaaaagagatacctgtgtctctgtcaaatttgttgcttcaacccaatcattctgtagaaaatcaaagagcacatttaatctctttcgcctatctctttaaaaaaatggagactgtatatcagaatttgtcttttctgtgtacttaagaacatggcaattttagatacagcaatatccaaagtttattcttcaattttatactttccctttgcatatttattctatcatttttcaaacttttagggaaaaatacttatcatattttcccagattagtaagcttgcaaatactatcaacatatcttcttgtggtctagctgtggctacatggacgaagaaagggagaaaggaaggaaggaaagaagtattcaaatgagaagatgtaatcttttaatttatctattccaaaagctaataaaatattagtcccttaaccctgtcatccaatgaaaacataaaatgttttcttacttctagagttcaagcaaaaaaaaatcacacatttttaaaggtcatagtaattgagtagcagaaacatttattaacagtaaggctgcttaatgcagactgaatttatttattcactcttgaggggccgttagattgtacaattctgtaaagtccttagtatgagaatggcatcagcttcagaaacctaagaaatagttgaactggggagacaagtaaataaatacaaagagaaaaacttactgggagcacagaaatatgtgcgctaactctttttgagagaaccgtaaaagattttttttggaaaatattaattttgttctgtaatgtaacacatgaaaaaggattgttagagaaaattatatgttggagtactttttgtttacactggaaacaaaacatttctgcacaatggtctgttgcttaagattcctggagaatcacttctgtgtttagatagttttttaataattaaaaaattaacatttataaaattagaaatagttgtattattttatttaatatttctttatgttgaatatttaatgtccatgaattaatctttaaattaatatgaagtaaccattaaatatttaaaaatattgaatttccaggaaaactcmgttaaagactccatcaactttaggacatcccaaattaattaaaagaattgggcttcgattttaaggaatatagaaaggatatagacaaatacataccataaagtgactaaaagaagagaacaaagttgtcttttgaaagagtggaattcagacacactatctaaacagctatattatacatgggttctttgtttggacagtattaacatttattgttcagaaagcacaattatttaaatacatataataaagaaattaaatctttgaaaatctcttttggacagaaaaagccagtaggtggacctatacaggtatcaaattagaatctatcaaacttgaaaactaaatctattgaataataaaaatgacaatcttataagataatggttaactaaaggttctaactaatatgaaaatccttaggttttaaaaaacttcagagattaaataaaaacaacaaaaacatcataattaagatacatactaaaatgccaattaatggtaagagttacattaacttaccaggtttaaactcatgctaaatcggttttagaggattgatttcattattatcctaaaatctgttggtgtaacagaatgactgatatgtgtctgagtatatatatatgtatgtgtgtgtgtgtgtgtctctg

SEQ ID NO: 690451 - DNA, 629 bp, Homo sapiens
tgtagactgactgcaacctaaattgttttaattagagaagttcatatatatcatagattttggaatagaagaatttgaaaagacaaaataatcgaaacattagaatccatctgaaaaaagcagattctagggccatgccccaataacagtgttaaaattttggtcagcaatatagaaataaagctcataactttaatagaaatatacctgaacagaatttaattaagaaaaagtgagccaaaggaaattgcattgttcatggccctcaaagattgatgtgtgaggataatcattttgtacttacggaattcttcttatgtatacttcccatttattgagcatgtgctatattccatacatttctctaaacaaacccacaaacaatgacaacaacaaaaatacagattaggtattatttttattatacaaaagaagaaattgaaaacaggttaactacttgcccgtggtcaaatagctaggtaatgcgaygccaggactctaaccctggcaggctggctccagattcagcattcttcacaaatgtgcaacactgaatcccatatatgcttccctgtagtgtcaaggagactttcttttcctttttttttttttttttttcttttgagatg

SEQ ID NO: 690452 - DNA, 593 bp, Homo sapiens
gcatgaataatccaaccctttgtttagcgtataatcaaacaataaccataaacaggggacaaccagcagccctcaaggctaatagcctaatgggagtaccctcatttattcgtttgacttcttaataaacctgctttcactttgtggactcacctgaattctttcttgcgtgagatccaagaaccctctcttggagtctggatcagaaccactttccagtaacattttcatgatttaagattttaaaaattagtttatcaaggatttggttgtttatgtgattttcagcgattttttatttggaaaaatgtcttgaatgacctaactactatctctgtraacaggaaatttctgaatgcatatagtgattaggagacttttgaaaggaagaaaggattaaaagtctgaaatacctgaaagcaaagaatgggacttctatgaaagagaggaaaatggtacagtaaagcaagaccagagactccagtgatttaaaatggtaattttcgcagttaactttatctatgctatagaataaattctctttagatttaaatttttatagagctataatcttttcttgaaaatatgaatgt

SEQ ID NO: 690453 - DNA, 653 bp, Homo sapiens
atatgtgtgccgtggtggttttttacataggtatatgtgtgctgtggtggttttttacataggtatacatgtgycatggtggtttgccatcatctaggttttaagccccgcattaggacgtttcattgcttttgatgccagcttccatgcttttctcttcgagaatccactcatctttttatacaaagtgaagcccttggttatgttctctgctccttaatacagaacagtattaaaattttgctctcttgttcaatgaatgtgaccattttataggttgaatcactgaaaaatatatcaataaaatttaaactaaattaatttagtgataatgaaactagtcacttcaaaaatggcaagtattcatctgtatacattttaagaaaaaaatgaaaggctatgctgttacaagcttatcattcaggttcacagtgactataacattttgagagtaacattttagaaaacataataatttaaaataccacacacttaataaactgagggaaatattgtatatttaggagtgtattttatttaaaatgatgaattattcatgaaatagactcagatttgtctggtctcttacttggtttagaaccataaggtatggtgtggtagcctataagcacatgagtcaattgaacagctaa

SEQ ID NO: 690454 - DNA, 653 bp, Homo sapiens
atatgtgtgccgtggtggttttttacataggtatatgtgtgctgtggtggttttttacataggtatacatgtgccatggtggtttgccatcatctaggttttaagccccgcattaggacgtttcattgcttttgatgccagcttccatgcttttctcttcgagaatccactcatctttttatacaaagtgaagcccttggttatgttctctgctccttaatacagaacagtattaaaattttgctctcttgttcaatgaatgtgaccattttataggttgaatcactgaaaaatatatcaataaaatttaaactaaattaatttagtgataatgaaactagtcacttcaaaaatggcaagtattcatctgtatacattttaagaaaaaaatgaaaggctatgctgttacaagcttatcattcaggttcacagtgactataacattttgagagtaacattttagaaaacataataatttaaaataccacacacttaataaactgwgggaaatattgtatatttaggagtgtattttatttaaaatgatgaattattcatgaaatagactcagatttgtctggtctcttacttggtttagaaccataaggtatggtgtggtagcctataagcacatgagtcaattgaacagctaa

SEQ ID NO: 690455 - DNA, 936 bp, Homo sapiens
agaaattatatattgtgattaaggttatgaatgccacatattatcattaaactttagcataagttttgatttttgaatttgtgttggggagagtgcaaagaataagaaacaatatttttattgttatgtaaaaactggcttcagttaaattttcaaataaatttggttgcaaaactaaaatttatatgtaatataaaaatccattcacagaaaacaacacatttatcttacattattaatttaatataataatgtgtcacataagtaggtatagaactacacctggctataaagattaatattattaagtcatccataaactgagctatttaaaatcatgtttaaaaacattttgaaagtgtactttatttaaaataagtatcttatcacatataatacaaaatatgatcacatgtatttttaattccttagaaattaagggatctgtgagccttaaatatttagacatgataacccatgttcctttctcttcctgattatgttacaaaaaagttaaaaggctattttttcatcaagtttgactataactaaaatatgtagatacatttggaaaaacaaaatttttttgtcccacaaagtagttaattctgtttcttcctagaattttcataccatacacatttgaagttagaatatgaattacaggaaaactattagtctgatgtgtcattactataaaaatgcctccctaattaacttgtccacgaamaagagccagataatatttggttatagaaatggatgaaacaggtttttaaatgatgagtataggtataaagccaaagtcctcaaataatattagtacaatgtgtactaatgtctgtgtttggtgaatttttacatgtatgtgtgtatacatgtgtatatatatatatatgattgatatatacatatataatttatgtatttatactg

SEQ ID NO: 690456 - DNA, 656 bp, Homo sapiens
tgctctaaaagcctcttccagtggacagaagtgaggaaagtcacagattcagctgcctgctctgttcccactcctatggagaacacatggctgagagtaggtgctcagtaaatatttgctgactggatgaatggtcaaggcattcctttgtttgcactgatgttctctttctggctcttctgaaaagcacagagaaaagagaaagactggagaggtcaatgcattcaccaagccacagtctggagaacgytcttgtcttttggtgtcatctatgcttccagagaagactttggtgtcggaggctgagctgtcggggcagggatctggttagtgctaagctgtcttctgggagagccctttctgctctgtcacagctggagtgcagctgctggccagagagctgatttcctgacagcactgggatttggaaatccctgcatttcgcatacgtacccgccagctggtcttatccaaccctttcccctttggaaggaagcagtttgacttctggtagaaacctgcagacttgacaaagacaagagcttgttgtatggttttagcatatacattccttggaggactctttgagttatgtttacatagaggtccttgactgctagacagaacgaatcacttgtaactcagtatgctaaaca

SEQ ID NO: 690457 - DNA, 613 bp, Homo sapiens
tgcactccagcctgggtgactagcaaaaaaccatctcaaaaaaaaaaaagattaaaaattaaataaatagtaataatgataaaaatccaagttgctttaattctaagaccctaactcatcccattcactagagaaaaaatatcaaaaggattatcaactctgaaaaagtagaatttgtcccacagatgttttsatgctagaatatctattagaataacatattactttaacaaattatatagcaaattaaattttatctcaaaataaaaatgataaaattcaacgaagtattaattttaaaaatcttaaaaatcacaaatacattgacccttcctgttatatttcactctttttttaatgagcatatattactttaataattctctaaagagttgaaagtaagtataaacaagcagtcaacattatgcttaaaataagacatgaaggacatctccaataaagaccaaaataagaatgctacatatcagttacttggcattctttcagaaattctatcaagcagacaaatatgaaacagaaatattaccactgaaaagagaaaaggtggtattcttaaagagtaggtattttttaaaaatctagagaacgtcaa

SEQ ID NO: 690458 - DNA, 917 bp, Homo sapiens
tttccagatatcacttagaattttacctggtctctgttggtattgctactacytgctgtcagcaggttccaggtgctttggaagccaagattgagcaatctggcctcaattaagcttgataaattgtttctgaattaaactgagaaagtttgagacaatacctataagtgaaaaaaaaactaagctagctatttatgaatgaaaaaccttttatctaaaacaatgttaatacctgagaacataaaatattcagaagattataattctgcttttagctctattgtttttaaaacttggatgatttattttaaaatatcttaaatgtattgtcttgttcttgtcaggctgattattaaccatttacactgtttacggatctctgcttctctcaggttatactaaattatttttgccacttgtgaagaaaaacctacttgcgaattctttccctgtttgtttgtttgtttgtttgtatgaaatggcagccttggcctcattctttcaggcaggactcatgtcttattactaaagagctttcccaagaaactcattttatcatcgtcaataggatttggacagcttgcagccagcttcaataatattagttatcctctggcaccaatttaaaaaataatattatagataaaacaaacagtatgggaaaacagaaaaaataggaaactgatctgataaaatattttctgttatatatttgtgctcttgatcttgttgcgttataagtatgcacactattttgtgtgtgaattttttttcacttaagttcattataaggtttcgttgtctatcatagttataaacattttggttaaacaaactgtattattaagctcaggctcccataaaaaaaaattccatagactgagtgtcctaaatgtattgtctcacagttttagaag

SEQ ID NO: 690459 - DNA, 917 bp, Homo sapiens
tttccagatatcacttagaattttacctggtctctgttggtattgctactacttgctgtcagcaggttccaggtgctttggaagccaagattgagcaatctggcctcaattaagcttgataaattgtttctgaattaaactgagaaagtttgagacaatacctataagtgaaaaaaaaactaagctagctatttatgaatgaaaaaccttttatctaaaacaatgttaatacctgagaacataaaatattcagaagattataattctgcttttagctctattgtttttaaaacttggatgatttattttaaaatatcttaaatktattgtcttgttcttgtcaggctgattattaaccatttacactgtttacggatctctgcttctctcaggttatactaaattatttttgccacttgtgaagaaaaacctacttgcgaattctttccctgtttgtttgtttgtttgtttgtatgaaatggcagccttggcctcattctttcaggcaggactcatgtcttattactaaagagctttcccaagaaactcattttatcatcgtcaataggatttggacagcttgcagccagcttcaataatattagttatcctctggcaccaatttaaaaaataatattatagataaaacaaacagtatgggaaaacagaaaaaataggaaactgatctgataaaatattttctgttatatatttgtgctcttgatcttgttgcgttataagtatgcacactattttgtgtgtgaattttttttcacttaagttcattataaggtttcgttgtctatcatagttataaacattttggttaaacaaactgtattattaagctcaggctcccataaaaaaaaattccatagactgagtgtcctaaatgtattgtctcacagttttagaag

SEQ ID NO: 690460 - DNA, 965 bp, Homo sapiens
ccctcctcctccacrtaaatagttatggcaagagaaaaggaaaggaaaatgagaggaaaagaagagaaggagggagagatggagggagggagggaagaaggagagaaggagggagggagggaggaaacccatcatgactttgtggtaagggtcctgggatcatttgatttgtcttggcctctttctctattagtaaaaataggcttagatcacagacaggaaaagtgctttgaaaggcatgaaaagcccctgcaaatgggaggaagaagagagtcatttctgtcatagctcctcaccaactgagtgatgccccttggcttccaggcagaaatgaatccgagggcccagggcccagtcaggagaacaaccccactgactcttcatccaggaccccactccagcatggaggctgggaggcaggggcaggggagagggtgtgggaacgacaagcatggccctggtgctgcgctctaggttccacccccgctgctcttccccttccttagtaggtaagtggctagagcatggatgctggagccaagggcctgggttagaatttaggctttgccccttcttatctgcgtggccttaagcaggtcccctaatctccctgtgcctcaatttcctgatgtgtaatgaggtgcacttgcctcacagagttgtcacaaagattaaatgatttaacatacacaaagggcttagagcagcaccccacacataagaagcacaattacgtgttagccgttaataccatctgaggcttctccttggtgttgagtcctccaggaagctttcctgaccccacaggctgggttacactccactttgctcccacaggctactgtgcttccctctagcaatccccttatcttcctgtagttaagtcctattcttgagcccacttcacagaaaaggaaactgaaactcatagaaattagatgacttgtctctttgccctgatcatc

SEQ ID NO: 690461 - DNA, 615 bp, Homo sapiens
ttgtgagcatctaagcatttccttcatgatggatgatagctttgctgtgttaacatcatggtgacttttctttccctttcagccaactacagcagtattatcatctatctacatactaatatttaaacatacatatttgtgattttaaagtttccgacaacacatacttgtagcacaatttccagctattagcagacaaaccacttgcacttttttgctgatctaggggtgtcagaggtggtattggcatctgattactcatttttcttgcagcttctgtcacattcatacaacaaacagccatgatcaytatatagaagacagaaatatatttcccagaaatatttttttttgttggcggggggaaagagcttagagtcctcaaccaatttcaaacatacttccctactgaaccttgaaaataaaacatcttcattcaccttgtcctgtatggtataattggacacatgggtggaaggggtacaacaaaattccaccaagcattattgaaacatgtaagaactgcctcatagtcgcccccaaactatttgcttcagattgctgtaagcaaatctgaggtttgcaaaagtgaggctcagggacctatctgggtga

SEQ ID NO: 690462 - DNA, 1154 bp, Homo sapiens
ataagttttcaagaagtagcaaatgcagaaagcagcccctacctgggcggggagcagggaggctgggggggaagggaggaggttgaaatcactaaaacctaaaagcttgaagaagaactctgacaagatataacttagagacttcaccagatagttggtggcccctcgtcagaggactgggtctcaggtccttagagtctctctgccaagtacagaaatgccccaatcagctgagtagcacaccccataccccttagagatctaagtgtagtacaataagcctgcctcggtgaatgttggaaaagctgctgcttctggggagaactgccactggtagggaaaggaagacaagttgctgggtgacactggcagaaatctgtgaagggaggtgagactatgcagaatagtggttagaagaaccagctcaagttaggagaactgcttcatatcccagctctgccattttctagctctgtgaccttgggcacattacttaatcattgctagcctcgtgttttcccatacataaaatagggctagtgtcccttatctgtgacagtctgtgtaaagtgcctagaaaattacctagtatataagcccagtgcactatgcttgcttttgctgttaataaatgcatgagaatttaaatcaatggcttttgacccagggtgattttatcccccagggataatttggcaatgctgcagatatttttgattgtcatgacttgagggcagtgctactggcatctagcaggtagaggccagggatgctgcaaaacattctacaatgcacacgacaacaaataattatctggaccaaaatgtcaacagtgcagaagttaagaaaccctggcttaaataaaaacaaaaactgtgttctaagaactacaaagaaacattaagtcagagggaggagagttcagtgaagactagagtagtctgagcaygccatggaggaggagtgcgtggaaggatgagtggatttggacagtggagtaaagagaacgtaccgggcagaggatgacatgagcaaaggcttgaaggtgggaccttgtctttttctaaacttttatgattcagttgcacatcccaaaccatacagggacgctgtgaatcactgactcagaaagggaatgccaaatatgagtctcc

SEQ ID NO: 690463 - DNA, 582 bp, Homo sapiens
tgtgtaagaaagatggagtgtaggaggcagtgggggttcttgagttgggaaagatgaatgtctaatggtgggatccaggtaggatgccgccctgtgttcattcaccttgtgaatcttcatgactcagcagttggcattgtcctgcaaaatctcacattacttaaasatatagttatttttattttaacatggtaaaattagacagcacacatttgctggtcagatttggccatctaatgtgttgccttcacatcatgacaaaggaatactttgtgaataaggaattttaaatgccaatgactcttgaaaactttcaaatgaggctgccataaactattcctattactaaagttttttttattaaaatgttcatcaaatcaagataggctcctgagtattaaattaatttgataaattaattgaattattaaattatcgattaaatgagtaataagttaattttataaataaatttagaaacaaatttcactaactagaaaagtcaaagtctgattttaaaaagaaaacgctattgccagaattgtcaccaaactctagtacacgaatgtataagaatcttac

SEQ ID NO: 690464 - DNA, 582 bp, Homo sapiens
tgtgtaagaaagatggagtgtaggaggcagtgggggttcttgagttgggaaagatgaatgtctaatggtgggatccaggtaggatgccgccctgtgttcattcaccttgtgaatcttcatgactcagcagttggcattgtcctgcaaaatctcacattacttaaacatatagttatttttattttaacatggtaaaattagacagcacacatttgctggtcagatttggccatctaatgtgttgccttcacatcatgacaaaggaatactttgtgaataaggaattttaaatgccaatgactcttgaaaactttcaaatgaggctgccataaactattcctattactaaagttttttttattaaaatgttcatcaaatcaagataggctcctgagtattaaattaatttgataaattaattgaattattaaattatcrattaaatgagtaataagttaattttataaataaatttagaaacaaatttcactaactagaaaagtcaaagtctgattttaaaaagaaaacgctattgccagaattgtcaccaaactctagtacacgaatgtataagaatcttac

SEQ ID NO: 690465 - DNA, 604 bp, Homo sapiens
attaatctagtttgcagcttccaggttatcctgaactctctttgctaagaaccatttaaactcacgactacttgttcaacatcaatcttcattgggctaaaaggacagagacctccaaaagcacaraccctaaggactgaaatgtaacagacattaactctgctgactggttgatcaagacttacagaaaacacagtgccccttcgacatcttgaggatggtagcacagtagcaaagggtcgctggtactcatgtactgcagtgggtgggactatcccacagtgtgtgaggggcagaaatgttcatctctttctaagggttcatcatgcaagtctcactgtgcaaaacacttcacacacattttcttgcttacactttaccataagcctgggagaaaagtgttattaagatatccattttagagatgaagaaaatgaggctcactgtgtctgtatgatttgcagaagcaactccctgatgtgttctgaggaatttgaaacagaaagaaaaagcatgataaaattctagttatagatgaaaggatatgttgtggttgagacaagatctattgaaatatgggctagctggaaataatgctcagatg

SEQ ID NO: 690466 - DNA, 832 bp, Homo sapiens
ttttttttttttgagacggagtctcgctctgtcgcccaggccggactgcggactgcagtggcgcaatctcggctcactgcaagctccgcttcccgggttcacgccattctcctgcctcagcctcccgagcagctgggactacaggcgcccgccacygcgcccggctaattttttgtatttttagtagagacggggtttcaccttgttagccaggatggtctcgatctcctgacctcatgatccacccgcctcggcctcccaaagtgctgggattacaggcgtgagccaccgcgcccggcccttcatgtttattttgtgcaggtcatgcaatttttgctatttggttaccagaaagcttacaatagtctatttcatagtctatttctattacttataattgtctgtttcaagctgacaactttgattgcataaaactactttatacctgaaaacattttcaaccactgaaaaaaagtaacttatttttacaattattaattttaaataaatttttaaataattgtaaataaaacattacatttgggatattttaaaaattatttttaaaaccaaataaatattcatatatacaaattaattctttatttctgagttttagttgctttacctgagaaaaagaaaggagaatacaagtttaaatttcctccttcttcttaggaaagaatccctaatataaattgacatattcttcaaatactgtctctagtttaatctttatagtaatccaccaaagttggctataatttaatttatctaatgagggaaataggtctcaaacacattgataagtttcccgctttagaagctatta

SEQ ID NO: 690467 - DNA, 832 bp, Homo sapiens
ttttttttttttgagacggagtctcgctctgtcgcccaggccggactgcggactgcagtggcgcaatctcggctcactgcaagctccgcttcccgggttcacgccattctcctgcctcagcctcccgagcagctgggactacaggcgcccgccactgcgcccggctaattttttgtatttttagtagagacggggtttcaccttgttagccaggatggtctcgatctcctgacctcatgatccacccgcctcggcctcccaaagtgctgggattacaggcgtgagccaccgcgcccggcccttcatgtttattttgtgcaggtcatgcaatttttgctatttggttaccagaaagcttacaatagtctatttcatagtctatttctattacttataattgtctgtttcaagctgacaactttgattgcataaaactactttatacctgaaaacattttcaaccactgaaaaaaagtaacttatttttacaattattaattttaaataaatttttaaataattgtaaataaaacattacatttgggatattttaaaaattatttttaaaaccaaatraatattcatatatacaaattaattctttatttctgagttttagttgctttacctgagaaaaagaaaggagaatacaagtttaaatttcctccttcttcttaggaaagaatccctaatataaattgacatattcttcaaatactgtctctagtttaatctttatagtaatccaccaaagttggctataatttaatttatctaatgagggaaataggtctcaaacacattgataagtttcccgctttagaagctatta

SEQ ID NO: 690468 - DNA, 832 bp, Homo sapiens
ttttttttttttgagacggagtctcgctctgtcgcccaggccggactgcggactgcagtggcgcaatctcggctcactgcaagctccgcttcccgggttcacgccattctcctgcctcagcctcccgagcagctgggactacaggcgcccgccactgcgcccggctaattttttgtatttttagtagagacggggtttcaccttgttagccaggatggtctcgatctcctgacctcatgatccacccgcctcggcctcccaaagtgctgggattacaggcgtgagccaccgcgcccggcccttcatgtttattttgtgcaggtcatgcaatttttgctatttggttaccagaaagcttacaatagtctatttcatagtctatttctattacttataattgtctgtttcaagctgacaactttgattgcataaaactactttatacctgaaaacattttcaaccactgaaaaaaagtaacttatttttacaattattaattttaaataaatttttaaataattgtaaataaaacattacatttgggatattttaaaaattatttttaaaaccaaataaatattcatatatrcaaattaattctttatttctgagttttagttgctttacctgagaaaaagaaaggagaatacaagtttaaatttcctccttcttcttaggaaagaatccctaatataaattgacatattcttcaaatactgtctctagtttaatctttatagtaatccaccaaagttggctataatttaatttatctaatgagggaaataggtctcaaacacattgataagtttcccgctttagaagctatta

SEQ ID NO: 690469 - DNA, 1583 bp, Homo sapiens
atagaaaattccatattctgtctgtaaaatatatagatttctatgcctggggtgagttagaggagattctttctgaaggaagtagtctgaaaggctttagaagatccattcaaccttaaaaaataatcatcttaaatatcttgccaattaactctgcatcctagttatcatggtttgccagatgagataaacttccttgctctgttaaaacataacttatatacaaatggaaaactgcagtatacaaatgtttaaccctgttactcaaattagagaacaagctaagtaatgaaaacctaaaaatggtggcccacttaaagctggaaattattaaggccagaggggcaaggctcttggctgaatttggccagttttgattgcagtttacctttgtcttaggtgttgcttaagcttgattctacatccggatgtagtgatcagaccaaagctaacaaccccatacttccaaaccatttacggaatttgtcttgagaatgatttctgagaatgggagtttatattctgttaaagaattttggttaatcaccaaaaatgttacaagactcatgcaaatgatgtgcatgtcatcagacttttgcagttttgcaaaggaaatatgaaagttatatttttatttgataaaatatatgggaaatagtaagttcttggcatgtagtagatattttatttagtatttaatgaacagtgtttatatctgccaagcactattcttagtgtgctaaagatgttaacttatttagcttatgtaacaaatgctcgttgagataagtaatatgacttacaaaataatatggttgaatgctgwcaaactataattttgtcagtagttaattttgtcagaaaacattaagtataaaatcttcagaagtatgaataaaaatcagtgttttagagtagtcttagttcttagcttcaggatttagtttaatatatttcttacattatccttgtccttcaccatacatctggcttatagtaggaacttagtaaattattgaattcacacttaatatttacctttttaaaatatgtggctgaaatgttaaagtgaactcctgtactctcccctttatacaatgagaatttcattcctgagttagtggggtctggaaggtagggttggaagacatgtatgtcagaaaataaattttcttgacctctcactaaatgattgttttagcattacttagattactttcactcacttagttttatgtggtcaaaaaataaggggggaaaagcccttgaaatacacttagccttgcaaatacatactagacttttatctgcccacaaaattttttacaagcctctcatgaccccaggaagtacatgggtaataaaatcagtaaaagcaacatttttcttgcccaacgtcagtcattgcttgcctagtggccattttctgtgcttatttaacatctgttaactgttttaatgtggaaacatctctttcccctttattagcctcataaccacttattcagttacaggtggaaaattttaaaaatctgaaagtcaatgtagcaatactaatactaacacaagatagtttagaaaaa

SEQ ID NO: 690470 - DNA, 1423 bp, Homo sapiens
ctctctgtgctgtccttacaaaacttcgtgaaacctacatttctcggaaatattttacagataagattttttggaaatatgggaacaaggactgagtctrgtcctaaggacagagattcagttacaatcacaaaacccatctctgattggggaataggattaaaagagaaatatactcctccactcagattacagagaatggtgcctattctgcttccacattttgaaatgataaaatagagcgtcttgaactgtgtcctggcattattgcttaggttatttttcttttgcactgtgatgccttctctgctagaataacctttccgtgtaaaacccttcctttctagaggagcaggacatttgcatctgtgcttcaaaactgggtggaaagcatccacagaaggcctatgctggagtcagccctcctttcgtttacgcagaagaaaggacagctctataaaagtacctgtttatttggtttctgttgattactctgtttcatggggttgtgaccaatcatttacatggaaaaaccatctagacacttttctgttttgtttttaaaacatggagccattctttgctgggtaaatttataaaatttagccatgtcgatactttttcttactctcctataaagttatgtgtgtgtgtgtgtgtgtgtgtgtgtatacctatatatatcacactaaaatatatttgataggcctgccttattaaaaaaaagttttgtataatttatgtgaatacactaaaaagaaagcataaagaattcaggatattctgataatatcaagtttaacatgatttctcccttgctgccgaactccctgtgagactcattcttgctgactgtttatgttgaaaaagacaacagaactaagttatcaaaaatttgatgtaaaatttcagcctttgctgcgcccgatggctcacgcctgtaatcccagcactttgggaggccgaggcgggcagatcacgaggtcagaagtgaaaccccgcctctactaaaaatacaaaaattaggtgttcatggtggcacgtgcctgtggttccagctactcgggaagctgaggcaggagaatcccttgaatctgggaggcggaggtagtggtgagcagagatggggccactgcactccagcttaggcaacagaaggagactccgtctcaaaaaaaaaaaaaaaaaagtcaacttttatggccttctatctctgtggagtctgtgctacttttctttatgagaagctttgtttaatacttacacacgagatttaaaaaataatttggccacgccgacatttactttacagtgctctgttaactccgtctgcccccatgaatatatttctaggacgtttctctgtgagagccatgtgtggtaggaaatatggagcctttagggagattggaaatagaagaaa

SEQ ID NO: 690471 - DNA, 1158 bp, Homo sapiens
ttttttttccatgtgagcttgagaagaagcaatttatgttaatagtgtgtttatgttaggacactgggaatgtagaatatattccacctgccctttgcaactgatatcacctgtctcaccatcagaattattacacagaatttttttttgcctttagcatatgcttacagagagaactaaatatttgagattaaaaaaaaaacactccactagaaagaataaaatataaccattcctcaaatttgatgtaaaagttttaaatcctacttagggggtggtaaaaatagccaacttcaaagtctatcttatttatttccaaagctaaaaaaataaaaccaaaaactaactgttctggaatgagtaggaatgcaggacttaatttcttatcaggctgtacctatattaatggaaaaataagtccagcatattgcgttttcattgtgctacatttcacaaacacaagcacaaatgagwttcctatgtcagttatgactgcttatttatagataacaaagttattgcatttctgccctctattatctttcttcagtttccatttttagtgtatttttgttgttatgctttaacccagacattctctctgaattaaccttcttctacctttggcaacatccttctctcttccaaggatttcaatacattgtaaagttctgcacatcccagtagctgctggagaagccttctgtgtgtgctgccctataatccaattataatcacacagtgctattttctggaggtgtttatagttggagatacttagtttacaagttaaataagacaaaaaaattgtaagtgcttctgaatgttcagctgtccttttgagggtcaagacacatcagctctgtgaaactcagcttcctcatctgtggagcgaaggggttagaatacataatctctaagtttctttctgctgagattctagatcttaggctctgcatcagaatgcctaggtttgaatcttgattatttctttaccactttgaaaaacttgcttaaccttccagttaataaggataataaataatacctacctacctaatagggttgctataaatattaaataaattaatacatgtcaagcacattggatagtgctaggcatataaatatgctttaataaatgttagctcctattat

SEQ ID NO: 690472 - DNA, 1158 bp, Homo sapiens
ttttttttccatgtgagcttgagaagaagcaatttatgttaatagtgtgtttatgttaggacactgggaatgtagaatatattccacctgccctttgcaactgatatcacctgtctcaccatcagaattattacacagaatttttttttgcctttagcatatgcttacagagagaactaaatatttgagattaaaaaaaaaacactccactagaaagaataaaatataaccattcctcaaatttgatgtaaaagttttaaatcctacttagggggtggtaaaaatagccaacttcaaagtctatcttatttatttccaaagctaaaaaaataaaaccaaaaactaactgttctggaatgagtaggaatgcaggacttaatttcttatcaggctgtacctatattaatggaaaaataagtccagcatattgcgttttcattgtgctacatttcacaaacacaagcacaaatgagtttcctatgtcagttatgactgcttatttatagataacaaagttattgcatttctgccctctattatctttcttcagtttccatttttagtgtatttttgttgttatgctttaacccagacattctctctgaattaaccttcttctacctttggcaacatccttctctcttccaaggatttcaatacattrtaaagttctgcacatcccagtagctgctggagaagccttctgtgtgtgctgccctataatccaattataatcacacagtgctattttctggaggtgtttatagttggagatacttagtttacaagttaaataagacaaaaaaattgtaagtgcttctgaatgttcagctgtccttttgagggtcaagacacatcagctctgtgaaactcagcttcctcatctgtggagcgaaggggttagaatacataatctctaagtttctttctgctgagattctagatcttaggctctgcatcagaatgcctaggtttgaatcttgattatttctttaccactttgaaaaacttgcttaaccttccagttaataaggataataaataatacctacctacctaatagggttgctataaatattaaataaattaatacatgtcaagcacattggatagtgctaggcatataaatatgctttaataaatgttagctcctattat

SEQ ID NO: 690473 - DNA, 688 bp, Homo sapiens
aaggttgtaagttctgtgtttgttgcaagaatattgccttccagcaatgatctaattcatctagggccagaactcagagataatgtttacgtagcgtgtctctctttgcctttcagttatcactcttctccacctaatttcgatcatttccaaggaatcttcagttttagaataaatgctctggctgggcctagaaagtgtaggtattctggggcagtcaagaagagagccttctgcttctgacgttggcaaagagcctgaggactggcagtaacaagtcaccccctcttacccgaggaagtgaactgcagggatgttagctgatcaggacatttttttttctcatgaaagaataaagactatgctaaagaaaaaatagtgctggactgagactccaaagctctgcacagtggagtatgggagagatcrtttgggcatagaaattttaaagtcataagtttgtaaccctgtgccttttccatttacctcatattatggtaaaacatgtgactttgagtggcaccacttatttttaagcctccaagtgggattgttttgcaaaatgttatctgaaatagctgaatatattgatttgatgaatacagctatttaataatgttcttatttattggaaattatcagctcaaaatagaaatttgttttggaaagacattggactatgcagtca

SEQ ID NO: 690474 - DNA, 610 bp, Homo sapiens
tgatcaattctctatctgcctatatgaggaagagtaacaccctcttgtagaaaataacatcctttagagcatgtgttctcagtaggcacaagattggttcttccagtgtgaaacaaatattaaatggtacagtgatttgtggaccttcaaaaacccacarcacataaacagatacaactggcaggttggggaaattagtaacaaaaagtctattaaagttctttatagagataatagtgaaaaataaaggttggggaacactgatttagagccttttcagttttttagtataatacctgataattaaaagttatagatattctaaaagacaaaaacatgtgaccaaaagacagtagacagacaatataatgtgcatttgcaattttgctccagagattggagttagaacatatggacttaaaaatacataattaatgttaacttatattaatcagttaacaaaataggtaaaagaaaaacagatggaaatttggaaaatttcatcagagaattgaaatttgtgaagagagaaacaaatagaaaactgaaaagcatagtatctgaaattaagaactctctggatgggtttaaagttaattaaacacagtgg

SEQ ID NO: 690475 - DNA, 587 bp, Homo sapiens
aaacaaagtgaaatacctataaaatccagggccttagtatgcagccatagcttaagaaataaagtcagtaatacaatcactatctatctggaaattctaaaatccaagacatagtaaaagtaaatcttgctatggaaaaatataaaatgtagtatgcggtgatattgactgtgatattcaagtttcagaatactttggggatttccttttagccaagaaaatgagtattttttgaggtttttcatgctacatcatacagtacatatgagcatgatgtggtttattagactgatctacattatcattagttatttcctcagtaatcctartggcagtgggaaaatatgaaaatttagaggaaaaaaagccataaattgattgcgtattcataaaaatgtaacttaacaatttccttcaaattgtaatacccctactctacttctggatatatgcataaaagtaaccagacttttccctagagtgaatacggtaaatatgaatttgccatttcatatttgtgaatgaattaccataccatctttgtgaatatttctacatttgattattaaagaataatttcatttaaa

SEQ ID NO: 690476 - DNA, 634 bp, Homo sapiens
ggagttacatttcttttttcgaaaattcgagtggctwtactgacaagagatagatgaaaaacagggagtatcactaaaacgcttctaaaatattatttttgtttatttttaggacctaaatgtaataactaatatatagtaacttgtcacctacgtgtaactgaacctcagttctctcaagttcatcttttcgtgtttttcatcttaaataaccactatgtctcaaacttgagtacacagtggaatcacttggaaaactttttaaaagtagtactaattcataggcccaatcctaaaccaatttctgcacctagggcctcggggccaagcatgagtaggttctgaaatctccccagctgattctaatgtgcggcaggattgagttcctcctctctaaacactcacacctgtaacatctgtttatctcagttgattcttggtgatcttagccatttcttccattgtatggccaccctgtctagtgttggatgactttgaggcagaggagaatgacaatgaaattgaaggtttgggcattttcgtcctaagggaagaaaggaagcatgttaataatatcctgttttagaaacacaagcagcctctgtatgcctgaatcattttagtaggttaataa

SEQ ID NO: 690477 - DNA, 919 bp, Homo sapiens
aaaagtatgtctagaatatgggagtggtggtttaatttggctattttactactcttaaattagatctttgtatctgaggtggaactcctcagctaaagaaaaatgaaaacaattggaaagagccagaagagacctatgaagatgagtaatgggtagaaaataaaatttaaaaatcaataaatatatatgtagtgttttgtccatgcaaaataaagccctttgaggaggataaaatgtagaaaattattgtaatagcaaaagagaaatataatgcttttacatatatggtttcaattcagaaaaaaatgcagctatttttctctttgcatccatactcaaaataaaacagaataaaagaagttcaagcaggtgcacgaaatatttatatgagagataaatatttttaacttggaattaataactgttagaatgaatttcaagccttctctgagatcttttaaaatagagttccttctcatatgtttgggctgtggggcactgtactgctcaaaggtaaagtgaccagttagacgactatatgcttcatgaggacaggaatcctgtgttgggtgaattcacatctgataggctggagcataatggtctctaaaatatttgctaagtatgtgttgatgttaatttgcatttcacttagttgttaattatatatgtttggaatctgctttatggatctgcttaacaaatattacgtttatattaggtggtatcatcatacatacatggcatcatacatagactgccaactttctagctgctgtgttttcagtgaatagaagctagatgtgctaagtaaaagatgatgacaacaagatactgatagaatttccagttayctgcaattttggatcatctgatccattatctccatctattatcaactaagcattcatttgaagag

SEQ ID NO: 690478 - DNA, 831 bp, Homo sapiens
cagggcttcgggagatttttgaactgaatcactatgacttccttggtcagtggtgaatggattaattagatcacagtaaatcaataaaactaagagcctcaagtttaaaacatctgtaaaacagttaaataacttccacatttcttcacactcaaaaatacttcctagtggagggctaattttagccacatcccctaagttctcctcaaatataatactttccttaaatatagataggaaaaactaacataatatgcatgtgtttaatgtctgtgttgagtttgttcttaaagcatcatgaaaatggccaaccaattgagtctcaagatgatatgaaggtagagattatattgaccaattgaaattaatattgatgttaagctaggccttggaaaactctcatctagcttcaggaaattgaaattctttcaagtaggttttggttcagtttctgccataaagaggttatttcaaattgcgcaagtctctctctctctctytttttttttttaattatactttaggttctggggtacatgtgcagaacctgcagttttgttacataggtatacatgtgccatggtggtttactgcacccatcaacccgtcatctacattaggtatttctcctaatgctatccctcccctagctccccacccctcgatgggccccagtgtgtgatgttcccctccctgtgtccatgtgttctcattgttcaactcccacttatgagtgagaacatgtggtgtttggttttctgttcctgtattagttgctgagaatgatagtttccagcttcatccatgtccctgcaaaggacatgaactcat

SEQ ID NO: 690479 - DNA, 593 bp, Homo sapiens
tggcaaaacaaccccatcttctgctccagagctagatactgtctctgtctatcaattctctttgctagattagtagtctgcatccagtcatgagatacaaatcataccaccgttaaaaaggagatgtttaataaaaagaattattaaatttgattaaaggctaactatacaacataagaaaactctatatggtgccctaaggctaagggagagcacccaaggaagaacaaactcagaaggagttaggcctcactgaaaaaggcatagtttaaccagcagatagtggagaagttttcagtgttgccaggctggagctggtctggagttgcttttgaaaatatcagaatcctctctgccatgcaggagggagtgcaaatgaacagcaatctgcacaggmaggcagtgggatcctgggtgctggtggaggcagagagccttccaatacatggatttcacaaggtggtggtggtgggaggaggggtttgcaggagggacagaaggtgacattcaggtgcaggtggccacatggagacttgcagagggagtcctggcatcagcacagtcaggaggccttggaatcaggcagatgttgg

SEQ ID NO: 690480 - DNA, 632 bp, Homo sapiens
aggatggttggggacttaggacacctcttaatcttggaaagcttggcttcctccacaaggatgtactctttcagagactgcaccagctctttctctgcataaatcaggtcagtcatgtgccctgcaagggagagaagaaagacaccagtgagaaacagatgagggatgtccagcctccttccttggggcacagaataccagcacagaagcaagtcccctgggataagaacatgtcagctctctgrggattatggggacttggagttaaagggggcctaggcactcatggggctctatctcgcaacttcaggaagaaagaggcagaggcaccaaggggatgtttgagataagtgcactggatgtcactcaagaagcagccctaaatctcattctccgactgttacatagctggtcatgacactggggcatggatatcctgggggctcaccacaggataaaaagctctgaactttaggtcggaaggataggaaaagcttgatcctcaggatacaaaggatttgctgctcagaaccactctctggtccatgggcaaggtggtcaaaaagaccagagagcccaagtgcagcctgcacttcccaggaagaaagacccaattcagacatctggctccc

SEQ ID NO: 690481 - DNA, 1349 bp, Homo sapiens
atgtaatatacatatatatcaaagataagtaaaattcagcacacaaagaaaggctaaaagtctctaaaggaactcaaaaaggggcaagatcaataaagactagaaaagtttctataattggataaggatactttgaggatatacaacttaagtctaatcctgagagatgtggatagacaggaaagaggagggacagtctcccagaaggaaacagactcagaaaaggaaaaatgggcacaaaaaagtagcatcagttttayttcccaaataacctacactatttattctaaactgcttttataattggctaaaatgccaattgggtgattaaaaatgtaaaatccttaaagtctttaattgttgagagctgatgacttaccattttgtaaaaataaaaatatggcttttcctaacatagctaaatgtaccttaatgtgcatgctattattaaaatgatggcttatttctgaccactataatatgcaatcctattatcttaagtgctggctgcatatccaccttccaagaccagccatgtttttgtgattaatggtatccctttatttatgatctagaatgatggcattgctaaaagaaagggctttaaacagatttcaaattgatgcccaccttgctttataaatgatctaataaataacataaaacaatacatttaaattttaaaatgcaagacttaatttgaagatatatattctaacttcaatacattttaagtttagaaaaataaaagcacatcacattaagatataaagtcttaatttatatctttatactagatgaagcaagtcgcgttgacttatgaaggatggtaccaaaaacatttggataaatgtaaccacccctctgaccttgttaaacactagattttgatgcttggacatattgctcatgtgaataggagaaaacttcatttcattgataaactctgtttaaatattaagaattggcatttctctccagccaattgtttttaaaatgcacacttaccctgcattgttgctgactgcagttagtccttttactccagttttcagtaaagcatctataagattctctggaattccacatagcccaaaacctatattaagcccaaaaaataaacaatttgtaaagggggtaacaatgttctttcagagaagtgtgtgttattctttttaaaagggaaataaaacaaagcacattattagatctactaagcaaaatacacagatatatctcagcagctaagtaaatggtcatatagctgtatccaaatgttttgcaccattatatcacatatcactgcccagtctttgaaccacaagtataagccaagtgcaaacagttta

SEQ ID NO: 690482 - DNA, 1978 bp, Homo sapiens
tgacaggcacagtgccaggttctggagactcaagtaatcaagacagacctgattgctggctgaccttgaagcacccaccatctagtgcagtgtctctcaaggtgtggtctggtgaccacctgcatcaaagaagtcttgaataataacatgtattaagagcatattatatgccagccactgaactaagtgctttacatggattatmattttattctcagacaaaccctatatttgacctattattattatccccactttacagatgagaaaactgagacaagagaagctaattaccttgcccaagatcatactattataaaacagcaaagccatgactctaacctggaaccccatgcctttaacttacattaaaaagactgattcctacagcccagagtaactgaaacagaatctctgggcctggatcccccaaattttacatttttaattggttccctaagtgactgtaattcctacaagtattgagacctaatggcctagagatcaagtcagacaatgcaacaagcaattataaaaatagcatttggtaagtgttgtggaagggaaaaatacaggatgctaagggaatgcttagcttagatgtggtcagggaatgcttccgaagggaatcgctcacacctgcacaaaggtaggcattttccattttcttttatctctatctgggagcttctgagaaagctttcaagtaacagggccagagtaaagaaagctgccaggcctttgaagaagtaaaagaaatccattgtggctagagggttggaaggtgagactcttccttaagagatgaggccaaagtgacaggcagaggtgagtcagggttagcagtggctctgtattagatctggaagggttttatttataactcatgttcagaatgtggacaataagtagaggttaaaggattctaaaaagtggagtggcatggtgaggttgggtgtttgaaggtcacaggtttcaacggcatatgcattctatgagcacaagggttgtaaattgttctctacattgaggtcaccactgtggttcctcctgtctcaggaggctacaaattccttcccaacagttgggacactgttttctctaatacattcctagaatgtcaccaccctatctcccccgccgccaacccttggcttgttcacatgccaagccctttacacggcatcacacttgattcttacaactatatttacatgtaaagaaagcaagagtcagagaggttaagtaatgtgcccaaggccacagagctgtaggtgtagaacttgaaaacaggtattttttgttcccaaagctcttgcaattaccactgtacttaactgtgtccaagtctatacaatcaaagtaaaaccagactttcctagtgttcctatataataaaacccacatggagatttcaacaggtttcaattctccccttaatcttccatatcacaggtagctatgaatgaataaaaactatttgcaccagataagactagttcagctcacaatgacagaaacacaactcaaagtgacttaagccaacaacttaaatggctcatggaaataacaagcctgattttgagcccagtaggtcataaggccttggtcactcccactccatctctgctttgactctctctgtgtggcttatctgcagtgagctctcccctggtgacaggttagacaatagcagctgcagcttgcagcttaccttcttagccacttccactagaaaagtgcctttcacagtggattcagagaaagttctatccaagagttccatttgttagatctgggcccctccagagggagtaaagtcaaccccacttgatcacatggtctacatggtctaagagtttttactcttagactaactcttagattacttttcactctgactagcactccaaagggaaatgagatgctgttatcaaaggaagaattgtgtagtaagcagggggaaaatagtttctag

SEQ ID NO: 690483 - DNA, 1065 bp, Homo sapiens
agaattatagttttgtaaccatcagtctggatgtagtgtggggactggatgagatagagccgagaggggttatggagaaactcacagtatgtcaggaataagctactgcttttacttggcaatgatgggagtttagatcaggatggtgccagtggagatggatcaaaggaaaaatgatcatgacttgaactggatttgaagaaagaaaagggtatatggaataggcttatgcagtaaaagtaactgcttgttggggcgggggggttaaaacaaccgcaatactccacaaggccaaatactgctcatgactcaggcaactggcattctaagtgtaaataagtctaaagacagaattgtgaatattttatgttgctctgaggcctcacacttgcctcccagagctaatctaagacaaaattctaagaaactatggaagtcctctttctggttaagctatagaaagacataaacattgtcattttcatcataaaaaaagaaaacaataagctaaaaattatatatttctttaaagtcatcaaacwgcaatagacacacacacaaagtttaaataaacgaattccagtaatgagcatacccttcaaagacgagcaaaaagtggtaactcttttcatactcagggcaagttgccttgcttgagtacaggcaggaggaagagcagccctgacatgagataaagtttgctggaatgaggagaaatcagccaaactttcaacaatggtgtgggctaatgtgaaatactggaatctgaaagactcccaaacacaaaaataaatctcttggaacaacagttctcccccgtgggaattttgcggaatcagtggcagttggggcagagctggaaagtagagagagctccccaacccttgtgctgcttacattccagagcgtttctgaagttgaatccagaggtgaaattaaactcactagcgctataccaaatacccttctagttctaatcttgaaaggaccaaagagattagccctgtagacagatgtgaaacaagaagttggggggttacgctgaaaggccaagagaaatcttca

SEQ ID NO: 690484 - DNA, 1065 bp, Homo sapiens
agaattatagttttgtaaccatcagtctggatgtagtgtggggactggatgagatagagccgagaggggttatggagaaactcacagtatgtcaggaataagctactgcttttacttggcaatgatgggagtttagatcaggatggtgccagtggagatggatcaaaggaaaaatgatcatgacttgaactggatttgaagaaagaaaagggtatatggaataggcttatgcagtaaaagtaactgcttgttggggcgggggggttaaaacaaccgcaatactccacaaggccaaatactgctcatgactcaggcaactggcattctaagtgtaaataagtctaaagacagaattgtgaatattttatgttgctctgaggcctcacacttgcctcccagagctaatctaagacaaaattctaagaaactatggaagtcctctttctggttaagctatagaaagacataaacattgtcattttcatcataaaaaaagaaaacaataagctaaaaattatatatttctttaaagtcatcaaacagcaatagacacacacacaaagtttaaataaacgaattccagtaatgagcatacccttcaaagacgagcaaaaagtggtaactcttttcatactcagggcaagttgccttgcttgagtacaggcaggaggaagagcagccctgacatgagataaagtttgctggaatgaggagaaatcagccaaactttcaacaatggtgtgggctaatgtgaaatactggaatctgaaagactcccaaacacaaaaataaatctctyggaacaacagttctcccccgtgggaattttgcggaatcagtggcagttggggcagagctggaaagtagagagagctccccaacccttgtgctgcttacattccagagcgtttctgaagttgaatccagaggtgaaattaaactcactagcgctataccaaatacccttctagttctaatcttgaaaggaccaaagagattagccctgtagacagatgtgaaacaagaagttggggggttacgctgaaaggccaagagaaatcttca

SEQ ID NO: 690485 - DNA, 601 bp, Homo sapiens
acctacttcacctgtaatctccatctcttttcatggtaatgctattatatcaaagactttcatctatttttgattactgctatatccctaggaactaggctctggtacattcattcaacacatacttgctgaatgaatattaatgattatagcactggactaggtgcaatggctaacacctgtaatcccagcactttggaaagccaaagtgggaggactgcttgtgtccaggagttttagactggcctaggcaacatagcatgaccttgtctctataaatcaaaaattagccaggtgtagtggtgcatgcctgtagtcctagctacttgagaggctgaggtaagaggatcgcttgagcctaggaggtcaaggctgcagttacatgtgattgtgtcactgccctcagcctgggcaacagaataagacctggacacacacacacacacacacacayacacacgactatagcactttattgcatccaggtaacacactcataacaaagttctatttctgaggccaggtgtggtggctcatgcttgtaatcctaggattttgggataccaaggtgggaggattgcttgaggctaaaatttcaagg

SEQ ID NO: 690486 - DNA, 982 bp, Homo sapiens
tgagatttacaggaaattaaatctaaaaccttacacttctgaagctggaggcaccatagagctgtgaagttcagtataaagtcacatctgtgctcaatactttataagaaaagttactctgccttagtcttcctttactatttttgtcttacttgattaaaattttgctgttgtattaactaataaattcaaaggaaatgttctgattagtttctgtcataactgggaacgatagtaagagtaccttggaaagtatgatagtctgttgcgtaacacttgctgggtagtagatatcaattctctgcctgtttcaatctcattgtgtctaaaggtgtgaacctcttaccatctggatactttagtttccctctaaattaaaaagaaaaaaagcaaatcttacctgtatagtacctacgcaaagattttggaagatagtgggaagtcattaaagtgcttttcaccaatttatgcaatttactagttgaaatttgtaactatttaaaaatcattagttttaaaaaatactattttaaaatagtaatttactatttaatatttaaaaaccattggctcttttaatatatttcattgcttggtattagaattttttatttttagaatagagtatatttaaagatgacttttgctgttaaatttgacaggcgtggcaggaggccaatctaataagcccaaagggagaattcgcagagtatgcaggttaaaagagccctggaactgactttctgtgaagcctaggctatccatatacattcctgctgagtggagatttgcttaaagttgactgttttcttccttctgtaccatctgattccaatctgcacctgtcttttatagctagagacygttggatggcagcttaaccttcagatggctcactctgctcaagcaaaactaaaatctcctcaagctgtgttacaactcggagtgaacaatgaagattcaaaggtaagaaatggtatcc

SEQ ID NO: 690487 - DNA, 627 bp, Homo sapiens
gagccctcactaaaaactgccaagcgcggcagccagcccaaggcaacaagtggctcagcaggaaaatcagaacacagcccccaagaaacaagtcacagggaagggaaacattacccctcaggaaacaaggtctgcatgctaagagggttaccgtgcctaggtccctctgggaaaacagagtagccctcttaaaatatcaactgtgccagggtcttattaagtaaggttaaagaggagagaggggagttcttacaccaaccacatgccgaattccatgcccccacctcacttgtcaaaagagatatagactcactgtcacttagtaaataacaacccagtaaagtgggtaattcttggtctgtcacaaatgagctgtaagaaattcacaggacttctcttggcctcagcttcctcttttgagaattgatggtgttaggctacctgacctctaaaattcttgtttcccatagaagatgaggcagagcgggcattggatgtaacttgaagatcggcttttgcaaatgcaattttagggggayacagggagtaaattcagaatacagagaattgaggcagtaggaaatgaaagcaagagttttagctttcaaattttccaaatttttcatg

SEQ ID NO: 690488 - DNA, 1260 bp, Homo sapiens
tgaaacaattttccaaggcaagaaaacattgaattacggtcccatcacattggttatgtgggtgtaaaaacctggactagacaagaatgttgtaattacatttacttttggaattaagtgctggatgtattttataactaaggcaaaagaagaaaataaatttaagtataaggcaataaagcagttgaactgttccaataatatctaaaacaaagttttggttacatagcttgagaggactgtcaattaataacacttttccaaaaagtgctctataattgcagagccctgagaaaatagaatgaagcaatcatatttggttatatgttgcatttataccatttgatatctcctcctttgcaaaataaatttccccttgccagctgtaattaggcactgagataaaactgccttaatattctgcatattttattagggctgccagcagctgtcggatcactggctctgttctcatgtacaatgaaaacatcaaagacatctgtggtttgccctaaaattagtgccagaattggccttctctccattgtgtaaccagctttgctatttgcataactaacaagggaacctccagacattgctgctcggttcatgagggaaaactacgaaaggcagactttggaaagtggccggtacggcttgtccccataaggcttaagtgcatggggtttggaatcacacagacctggatccaggcttcagtttttaccatttatctgtgactttgggcaagttatttctcagccatattgccttttttgktataatgagaaatagtatttattgttttgaagaagagttaagacaatgtatgtaaagcattagcatgtgcccaggcctcctgggaagcactcattaagagttagcaatcttcagcctggtgccgtggctcatgcctgtaatcccaacactttgggaggccaaggcaggtggatcacaatgtcgggagttcaagaccagcctggccaagatggtgaaaccccatctctactaaaaacacaaaaaattaggtggatgtggtggtgggcacctgtaatcccagctactcaggaggctgaggaagagaattgcttgaacccaggaggcagaggctgcagtgagccaagatcgcaccactgcactgcagcctgggtgacagagtgagactctgtctccaaaaaaaaaaaaaagagttagcaatcttccttctttcatctagtgcccttttctaagaagtcataactacagtggctttaaaacaca

SEQ ID NO: 690489 - DNA, 622 bp, Homo sapiens
tctccatatcatcataaacggcacataggaggtattcagtaaatgtttgttgaataaatgaatgaataaaatgatacaaaaataaataagacactaggcatactgcaataggactcctgtccctacagtcycctaatatttacaactagggctgtctaatgaccttcttccacagcctctaatttcagtgctgttgttagcccaggagactaaggaacaccaggtcagttgcttaatgtcaaaaaagcctttctgattgttctgcaattatcataatgtcttggctttttcctctacaatgcagctctttctggatatcccagaacctaccactaataaattaatttcatggtactgaatttcaacctgcctattgctggaagttaacactgccatcagacctccccagaggtagcagcatatggaaaacgcaatgccctcagacaggagcatgtcttaaaaagacacctgtctggaaggtggatggttgatctagaatgttcactctgtacaccaaaatcatactcatagttgtcagttcagattatatgtgatcctgctccctatgatcatatctacaagaattaacttgaaattttattaaaaatagctataggactat

SEQ ID NO: 690490 - DNA, 657 bp, Homo sapiens
ttacagaaaacagaagctgctaataagacttaaatcctccaacatgcatagaataataacctaaatttctttaggacttcaaagtgggccaggcgcagtgggtcacgcctgtaatctcagctctttgggaggccaaggcaggtggatcacttgagctcaggagtttgaraccagcctgggaaacacggtgaaactctgtctctacagaaaacacaaaaattagccaggcattgtggcaggcgcctgtagtcccagctccataggaggctgcggtgaggggatcactttcaacccgggaggtcaaggctgcagtgaggtgtgattgcaccactgcactccagcctggatgactgagtgagaccctgtatcaacaacaacaaaaagacctcaaagtgtgtggttttggtcacttgagaaaaaaatgatttgggcagagaaggtagaaagaataattgggttcatgtttttcactacttatttattatctccatatagaaggccaaactcacccccaaaatttttttgagtaaatttttttacctgttcatttttccaccttttatgcacaataaaattcactctctcgtataccaatctaaaaacagctgtgtgggccaggtgagtggctaaagcccgcaatcccagcactttaggagg

SEQ ID NO: 690491 - DNA, 820 bp, Homo sapiens
gaacacagaacttttataatcaggaaaaaattaagctactctaattctgaagaaaagaaaagtgtagccacaacayaatgcagtaacaagctcttcagagtccttcaaaagctctggctatgctaaagagattccaggaaggcatttgcaaaactgagaaaggattaacatctaaattgagtgcttcacttcactataataacaatatatcttttcaaaagatctttgaaaatgaacattagctgcataccattcatacaatccacatcaaatttacccaaatcgaattaaaattttatacttgatgtattaacatagtcatattcctcaaatatacatccagtccaaccaaagtatgtccagttactgcattcttcttttgggatcctacaactactatgtccaacgttttcaggcaagaacaaagataaaatgtatccttaagaaacattatccttacaaggtcctaaattgaaccaattttcttctatctaaaactacagttttaagtattaaaagaatacaagttataatagctactatgcatggactaccatgccattctggacattgaacaaagttgatcctaacctctcatctactcaccttagctggttggttacttattggttagaactatccaacagagatacaatgcaagccagaaataaaccacccatataatttttataacatatatacaagttatagatacatatataaccaatgtaaatatgatttttctcgtagccataagtgaaaagaaacaggtaaaaataaagtttaatagattttatttaacccaatatatctaaaataa

SEQ ID NO: 690492 - DNA, 625 bp, Homo sapiens
ttaaagacatacctcttaaagatatttaaataataagaagtaaatattatataattatccacataatttgcatttctggcagtctccattttatatagatccagatttccatctggtatcattttttttctgactcaaggacttcttttaacatttcttataatgcttatctgctagcaataaattccttcagattttgtatgtctgaaaaagtctagtctttatttttactttctttttaaaagagacttttgctggatattagttgacagttttttccctttcagatgctgctccaatgtcttcttacttgcatttttccagtgaaaaaatgtgatgccatccttatttttattcttactcatgtaacatcttttatctgcttttaaggtattttctttgtactactttgttctcaagagaaaaaaaaaaccaaaaggatgtgtgtttatatgyatatttatatgtatgtataggtgcatgtatggatataaatatatacctttgtttatatatatatatataaatagagacagagaaatactttaagaaattggctcacacaattacagttgctataaacccaaaatctacagtttgggctggcaggctggagacccaggaa

SEQ ID NO: 690493 - DNA, 616 bp, Homo sapiens
tcttgatggcagcttcctccaaagaggcctccaaaaagacattatgccaggttcagaacaatgacaactcaaagaagcttgatatccaaaaaattagccaacctaacaactaattcatcagaaaatagactagtgcacaattctggtaaaacgtattattaaaaaatttcataaaaacaaacacaaaacataacttacaagtaagaaaattatatacagataatcttttacactataattcaaaactgctcctctagcaatagtgctagaagataactctgataagtgaagaaaagcatactttgwgttactcttacacatattttagaagctattttgattgaaaagacttaagctaataaagtttatataacttcattgcacattactcaaaagatattcacagttttataaacaaccaataaagtacctacttccaccagaaatcctaaaccttggataccactaaacttcacttgaacacctgaactggcatcctatctctagctatgtaacaatagccatgtcaccatacctttgatcttcaggtaatttagaaacagaatatggaaaaagattcctacctgtcatataagggctgttataaggctaacag

SEQ ID NO: 690494 - DNA, 653 bp, Homo sapiens
ggtttttggcctcccaaagtgctgggattataggcatgagctataatttcctatcaccactttgcaagtgcttgggaatattaattctcaccgtgagttgattttctatatgtgtctatgaaaactcagctataattaaagaattaaaaagcaattcaaagagagtaaatgcttactggwttgggggagagccctatgactatttgagattactaaagatattttatatttgattcccatccaaatagacatgatcttgcattgtaaaatttttaaacagtatttataggggaatgtgattatcagactacagttgttcctgtttgaagatacctatgtgcacctgtacagtgtgtgtgttctacttgaatgcttccatggtttagacacacattgatttaaaacaacaaaagttttatataaaaagaagtatctcaagaatacctcaaagcaagttaagtcagtttaagataactgatttaaaacaagagactgctgctagcagaagtgttgttttgggaatgcacttcattttttccacatctctcatgtcagactaactctgaacttagtaaaatctgatttagcactctacctatagtgcatgtagagtgaagctgaccatttctgaaatagaatcagagcttttattg

SEQ ID NO: 690495 - DNA, 597 bp, Homo sapiens
agcacacccagctaaatttttgtatttttagtagagacgggtttctccatgttggtcaggctggtctcgaactctcaacctcaggtgatccgcccgccttggcctcccaaagtgctgggattacacgcrtgagccactgcgcccggcctagtttgtgctttttacttaccagttaggggttatattactgtgtaacaaaatggacggttatttctattcattaacaagattcaagtaatagcctctttagccacatattccttaataacacctttagaccttataggggtaattattttctatatacttttccaatgtatttgaaagtttgttggctcttcttccgtaattatactatatcctcagtaaagaaagtttggcatacagaaaagttgaaggaagaaaattttcaatcactgttgttccactaccaagaaataatacttggaggtatttcctttcaatcttcaacatgaggatgctaatgtccccctcataaggggccttaaagtcactgactctgtgcactatttcatgagaacattgatgtgggtatttaaccgaaagaaaacttgagttttcttcttttccttttta

SEQ ID NO: 690496 - DNA, 1416 bp, Homo sapiens
tacctgttgaattcagtaagaccttaaatgcccaggggaactctctggccttggcttagtaagcaatagaagtcactgaaggtcttgaggaaaaaggagggagaagaacgccgtaggttagagaagcaaatctggaagtatagtgtagactgtgggagaagagttcacgctggcgattagaggcatgtgtgagtttcgattgaatgtgtgggcagggcttacagatatgagatgactctgagatattctttttttttcttttttttttttgagacggagtctcactgtgtcgtccaggctggaatgtagtggcgtgatcttggctcactgcaagctctgcctcccaggttcacgccattctcctgcctcagcctcctgagtagctgggactacaggcgcctgccaccacgcccagctaattttttgtatttttagtagagacggggtttcactgtgtttgccaggatggtctcgatctcctgaccttgtgatccatccacctaggcctcccaaagtgctgggattacaggcttgagccaccgtgcctagccaactctgagatattctaaaggagtggggggcttacagagaggaatcatggacaggctagatggtatctttgaagttatctgatccaatatactacccaatacgatatgtctacatttaacagtccatagcttacattagagttcactctgtgttggtcattctatggattttgactaatgtcatacatccaccattacagtatcacatagatatcaatttctttttcagagacagtgtagactaatgctgtatcaatgaaggaattttctttgactaccagatatctgtttctgtaatgttatcagtggattcccactgttctgccagaagytttgaatgttcttcctgctttgcaggcagtttctccctaaagaactactgaatattatgtcatactcccaacagggtaatatatgtgatgtgcactgtaaaactttccaaaagttattaaaatactgagttccaaatgcacctggccccaaaggttgtggatttggagttgtggatctatactccctagtatccccagcaggatctgggagaggacctcagaatcaaacaacttcatatttctgcagtgaaagaatctctgcacataaatactcacactaagtgggataaagagagataaatatctctacaccactttcagtcaagttttgttgtgaaagggaaaacttattttcttaaaaaaaaaagattttgtcttttcaaagcattttggatttcagaattgtagataagggatggtggacctagacaacacatgacaaagtgatataaatgccactgtaaaaaagactatggcactccagcctgggcaacagagtgggaccctgtctcaaaaaaaaaacaaaaaaaaaa

SEQ ID NO: 690497 - DNA, 1416 bp, Homo sapiens
tacctgttgaattcagtaagaccttaaatgcccaggggaactctctggccttggcttagtaagcaatagaagtcactgaaggtcttgaggaaaaaggagggagaagaacgccgtaggttagagaagcaaatctggaagtatagtgtagactgtgggagaagagttcacgctggcgattagaggcatgtgtgagtttcgattgaatgtgtgggcagggcttacagatatgagatgactctgagatattctttttttttcttttttttttttgagacggagtctcactgtgtcgtccaggctggaatgtagtggcgtgatcttggctcactgcaagctctgcctcccaggttcacgccattctcctgcctcagcctcctgagtagctgggactacaggcgcctgccaccacgcccagctaattttttgtatttttagtagagacggggtttcactgtgtttgccaggatggtctcgatctcctgaccttgtgatccatccacctaggcctcccaaagtgctgggattacaggcttgagccaccgtgcctagccaactctgagatattctaaaggagtggggggcttacagagaggaatcatggacaggctagatggtatctttgaagttatctgatccaatatactacccaatacgatatgtctacatttaacagtccatagcttacattagagttcactctgtgttggtcattctatggattttgactaatgtcatacatccaccattacagtatcacatagatatcaatttctttttcagagacagtgtagactaatgctgtatcaatgaaggaattttctttgactaccagatatctgtttctgtaatgttatcagtggattcccactgttctgccagaagttttgaatgttcttcctgctttgcaggcagtttctccctaaagaactactgaatattatgtcatactcccarcagggtaatatatgtgatgtgcactgtaaaactttccaaaagttattaaaatactgagttccaaatgcacctggccccaaaggttgtggatttggagttgtggatctatactccctagtatccccagcaggatctgggagaggacctcagaatcaaacaacttcatatttctgcagtgaaagaatctctgcacataaatactcacactaagtgggataaagagagataaatatctctacaccactttcagtcaagttttgttgtgaaagggaaaacttattttcttaaaaaaaaaagattttgtcttttcaaagcattttggatttcagaattgtagataagggatggtggacctagacaacacatgacaaagtgatataaatgccactgtaaaaaagactatggcactccagcctgggcaacagagtgggaccctgtctcaaaaaaaaaacaaaaaaaaaa

SEQ ID NO: 690498 - DNA, 636 bp, Homo sapiens
tcttgaccgctttcagtttttagtgatttcctaaagctgttatcaacattcaygtgcaggtttttgtgtggacataagttttcaaatcgattggattggtcaattcttttatgacgtgaaactcaaagggaaaagtggatctttttcatctaaacctggtaggagaggataaatcactttccagtggtttgtgattcctttataattatataaaactaattcttttcatttctatccaacttatttatttatttatttatttattttgagatggaatcttgcgctgtcgccaggctggagtgcagtggtgcgatctcggctcactgcaacctccacctcccgggttcaagccattctcctgcctcagcctcccgagtagctgggactacaggcgccaccaccatgcccggctaattttgtgtatctttagtagagacggggtttcactgtgttagccaggatggccaccatctcctgaccttgtgatccacccgcctcagcctcccaaagtgctgggatcacagacatgagccacggtgcccggcctctattcagcttcttaaaattatcatgttatcaacatttatcctcttcttctgccactaccacccttagttttaactataagcagctgta

SEQ ID NO: 690499 - DNA, 636 bp, Homo sapiens
tcttgaccgctttcagtttttagtgatttcctaaagctgttatcaacattcacgtgcaggtttttgtgtggacataagttttcaaatcrattggattggtcaattcttttatgacgtgaaactcaaagggaaaagtggatctttttcatctaaacctggtaggagaggataaatcactttccagtggtttgtgattcctttataattatataaaactaattcttttcatttctatccaacttatttatttatttatttatttattttgagatggaatcttgcgctgtcgccaggctggagtgcagtggtgcgatctcggctcactgcaacctccacctcccgggttcaagccattctcctgcctcagcctcccgagtagctgggactacaggcgccaccaccatgcccggctaattttgtgtatctttagtagagacggggtttcactgtgttagccaggatggccaccatctcctgaccttgtgatccacccgcctcagcctcccaaagtgctgggatcacagacatgagccacggtgcccggcctctattcagcttcttaaaattatcatgttatcaacatttatcctcttcttctgccactaccacccttagttttaactataagcagctgta

SEQ ID NO: 690500 - DNA, 600 bp, Homo sapiens
ggagagaatgaataaactgtgggacctccatacagtgcaatactacttaccaaaaaaaaataggaactactgatactgtcaagaacttggacgaatctcagggcattttgctgagtgagagaacagtctcggccaggtgcggtkgctcactcctgtaatcccagcacgatctcggctcgctgcaacctccgccttctgggttcaagtgattctcctgcctcagcctcccaagcagctgggattacaggtgcctgccaccacacctggctaatttttgtatttttggtagagacggagtttcaccatgttggccaggctggtctcaagctcctgacctcaggtgatccgcccaccttggcctcccaaagtgctgagattacaggcgtaagccacctcgcctggcctagatatccgttttttaaagtaaagttaaatttttacatcacgttacatataaaaataaattttacctgcattaaacaaccaattgtataaaacaagattataaaagtatcctccagatacatatgtgcctatgtgtatgtgtttgagtatagaacagagtgtttgttggtgcattgtttgtaatagcaaaaagaa

SEQ ID NO: 690501 - DNA, 626 bp, Homo sapiens
ctttatttatcagttttcaaaatagtgaattgcttctccagcatcctccatatgtgaccaatgagtttttaaaagaataattatgaattcatgagtttaaatttatttgatgtgttttaatccctactaatgcccacattgtctcatctttggccagtgagagaattgcttggctcttgagtcctttgacaggctcacactagtcttttatagtttccttgctttttggtatagtctgatattccagcttcatttggcacattttctgtcccaggtttggaaacagctatttctccaatgtatcctgtgttttttagtggaaatgatgttttcaaactacagtcaagtttataggtgtttccagtagacagagccaggaattttaaaaaataaaatamatgatgaattcatactgatacttctaattcaaactcaggatcacagggtttttgtttaacattatcaatcttatgtcatctgtatcttctttctccatgaagaaactggttgcttctcaaggacaccaacataattattcatttgctttgtcccacagaacataacccccaaaaataactgtatcaacactataccaacaatgtgtttactgcagacaatttataatt

SEQ ID NO: 690502 - DNA, 690 bp, Homo sapiens
caagatttccatatacagtgacaatagaatgatcttacttgattatagagaaacaactttatatttaaaaaaatacgtggttcactaaaatttatattaaaatacagtatgtcattttatttttttgtaatattttcccaatatttcccaatttgtagcacttttcatcaaaataataagcttttctccctatagtgataatcctacatgtaagattagctggggktttttttctatcttttttgcctgcttttcatgtgttttatgacctgtttctgatataaaaccagtatgtgtaaatgtgataataaaaattcttaatttacctgaactctgcttcctaaataaatgccatgtttctgtgaattcttcattcttagtatctcatatatactcttgggggtgaaaaaaaaggtagacttttaatcatttcctcatttatggtgactctttgaatatggtattgttgacctggctgcccacttgatgggtatggaaaatcagaatctgggccatgtattctggcctgtaaatctatattgagaacattgttttttctaaaataatatgaatgttatgatcatttattctattaatgtatttgtgttatgtgctttgaaaaaaatttgctaattagataatccttggcaagaaagtttacacatatttttaaagattttgcagttttat

SEQ ID NO: 690503 - DNA, 615 bp, Homo sapiens
gaaaggcaacattttaaaaaaatctcatgctttcatctctcatgagttcccactgtcagtagcagcagcaatgatcctataatgcaggaagtttggcaagattgagagttatgaactgtatagaataaatcagataygcaaggagaaaaggacacaaagggcttgtcttcagttcaaccccagttcaactgtcactgggggttctgttatgaaaacaagcgctgtttctgcaaggtgcagacagggcaatactcctatataaatctgctcttgatttaacaacaaaaataccttcataaataaggaaatcgttccagtaagtatttggcatgccaatgatactaaaaatccattaatgcatctgagaagtgattatacctccctgaattggggccaacaagatgattctttgaggtctccaacaagagaataatataaccaagcagagaacttggctgtttaattagcaagcctgaaaaataatgacttgtgagtgtgccaaccaatgctgacctactctctccacccacattctctgatagagactttgatgtttttcctccaagagttttttaaagtgttatgaaaacacagcttcaatacaagtttcctaac

SEQ ID NO: 690504 - DNA, 594 bp, Homo sapiens
cagctaatttttgtatttttgtatttttgtaaagacgaggtttcaccatgttagccaggctgatcttcaactcctgacctcaagtgatctgcccaccttggcctcccaaagtgctgggattacaggcatgagccaccacacccagccaataacacccatttcaagtctgctgtcaacatgacaaaattaaaatatttaactgaatgtctatgttactatgagttctatatttctatgagattccatgagttccagaggcaatgtgaaactgaagaaaatactttaaagctgtcaagattcatcacatttgcaaagctcaagaaaccaaacaacctgcagctcatgagttctcaaattgtccactagagcagttaaatttgatgtgttgttgtaaaaatagggttttttttttttgttttttttttttgagatggagtgtcactctgttgcccaggctggagtgcagtggcacratcttggctcactgcaacctccgcctcccgggttcaagcaattctcctgcctcagcctcctgagtagctgggattacaggcacctgccaccaagctcagctaatttttgtatttttagtcg

SEQ ID NO: 690505 - DNA, 1319 bp, Homo sapiens
tctgggcataaatgacaaactacagactcagatataaaacttctttttgggcctagcgtggtggctcacacctataatcccaacactttgggaggccgaagcgggcggatcacttgaggtcgggagttcgagaccagcctggccaatatggcaaaaccctgtctctactgaaaatacaaaaaatagctgggcatggtggcgcagacctgtaatcccagctactcaggaggctgaggaacaggaatcacttgaactcagtaggcggaggttgcagtgagccaagatcatgccactgcactccagcctgagcgacagagcgagactccacctcaaaaaataaaataaaaataaataaaactgctttatgaaccgtaattgcacagtgcagctagtaagggcgtcctgggtgctcctcgcagctcccctcacccctggccgggtccccgacctgcctctctacctggcagggagatactgcggccttctgaatcccagacctagaccagtgcccaccacatacaagtcacacagcacatagctgctcaattaaatttaaaatgaaatgatcaagatcatatcaccctcctcaaaatgtactatttgaagtcracagtatcttctcaaacaaacatatgggcttcagctgcaccgatttccagttttgttttattcctagttgttagttactctggggaacaattaaccaagcaagtatttaaacattgaaataagtccatgtacttttaacttctggtttgtaatgggaagtagcattatttctgaacatcattaactaaactaagctagacctataaacatttatctttgtagaattcaaaaacggtaagactactgggagagggaatattatgttcattgctgctggaatcccttcaccaaaggcacccggcaagatgctgagggtccataataaatatgtctgtgaaaccaaggaatgaactctacaagattgcacatggaatttatctttttggttgttttgtttgtttttggagacagtctcgctctgtcaccgaggctggagtgcaatggcacaatctcggctcactgcagcctccacctcccaggttcaagtgattctccagcttcagcctcccaagtagctgggactgtatacaggcgcctgccatcacgcccaactgatttttgtattgttagtagagacggggtttcaccacgttggccaggatggtcttgaactcctgacctcaggtgatcctcccgcctcagccttgcaaagtgctgggattataggcacaagccactgcacccagccagaatttatcattttttaaaat

SEQ ID NO: 690506 - DNA, 587 bp, Homo sapiens
tgcccgatatcgcactgttcaagtcgtggagctggaatgatcacctaacagtcctaactccagccctatccagcttttggcagatcgcaggtacataaatgcttctatctataccctaggagatccctctgcctaggcaccacctaaaggggctctaggttggcttgraactaacagaaacccatttctctaaatcagtcaaagttacttaataattattctttaatgtacttcctccaatgacaaaagtagtacatatctattgttacagcttagaatacaaattagtacaaagaagaaaataaaaatcatccttaatcctatcccccagagataactggttgcatgtgagtggtaatccttctagattgtgtatatatatttttaagtcaaaattaagctactgtataacttaatgacattgttctttacatatacatacacattttctaagagaaagagaacagtatcatgaactcccttgtcaccatcacccagctttagaaattatctaaaggtaattaaaagtccaagtgtttccatgctccctttttggggaggaatacgtaggaggtaagagcgtcccc

SEQ ID NO: 690507 - DNA, 603 bp, Homo sapiens
ccaaagcgtgccttcgtaaaacttaagagcatgggattggaagggaggcagtaacatcagcagagcggcaccctgctcggacaattcacctgcgctcctcaaagtttttaaccacacccactcttgcrgcagaggggtgcgaacagtcgggcacatctattatttctgctgacccacgtccatccaccttcctgaaaactcaggtttcctgtggggaaatggccctcatccatacgtggtctgaggagtttggctgagccggactccctgtgccacttccagaggtggacaggtgattcaggtctggccaatcagcatacccctcccctcccccacgctgagcctgtccaatgggaggctaccctggaacccatgctgggactgacaaaaagggatgcccactgccgtgatggatgtccctgaaatgagggtaaggttctggggctcaggaaggtctccaggcttggattagagataataattaccatatcacagatgactaaaagagtctcaaagcacatcagcaccccccaacctgttctgcttcttggttcctcattttggtgacatctccattgctagaaatggacactatcacatgtc

SEQ ID NO: 690508 - DNA, 1397 bp, Homo sapiens
tcatttttgtatttcttttaaaatactgcatatccaatagtgggaataggtttacatgtcagtagactcatagatgtatagaaaaaaaatgtggcaactgaaaagtatcttataaatatactagcatgaggctttttattatggggggtgatgagacgggactcatttctagagaggaagagtcttgttaaataccacagtaatttaaagttgcatcgagtgcctagttcataacatgtttctagagagagatattcaaggaggttaaaagtcactgcctctggtttcaacacaggacctcccatattctgcctcattgagcattagtactgctctactttaacaagtgtagttatacaacctatcaccattatgtatttctgttcattgcattacatgtatatccaaatctaccatcgtatgtcattattatgtttaggtatttcagtgccaaggctaaaggaaaggattcatgatatagaaatgttcctaccttgttaacccactacacaaaatcatgggtgatatcaaatttggacaatgctatttttcatcagtcattggtgactgtgtgataagagagtgatttagagagacagagagtggaaggaaatggtgggaattgaggtggacaagctagaacggatcaaagccttgtaataaatgttttacctatttctgtagactcccaggatggaactgttagatcaggctatctggcccaaatctttattcaagtcatgaatatcctaagcaatattcccaataagcgatttctcaacctttaattgtacaaattcagagaaataatggttacaattaattaattcagtttcttccatttttagacctatgtttattgagcgtaataccttgcctttgttggggttgaaatttccttctctttaggcaacactcattatacatgattaaagtagccaaaaggcaaatcaaatcaaccttttcatgacataactgtcatatgttatatggaagggagatgacrtgtttatatcttagcagcaattcactaacattccaatctgtctggacttaataatatttcaaagggtgttttctaccctgctgctgctcataaaacagattaacagaagtgtattagtaaattgagaaaacatgtcacaagtggaaaccctccaaacctgttttccaaaataaagcattccccgtagttttttttttttttttttgcatcaacatacttatctatagcctgtcacagtgtcccacaaatgaaaccttgcaaagcagaggtgtgttttgggctttacttacattctgcaatgttttcacagaaggacattttacaaggacagcaaaaaaacctaagactttcaatgtcttttagattacacaatcataagggctaatgaaaa

SEQ ID NO: 690509 - DNA, 623 bp, Homo sapiens
ttttccaaatttggatgaagaaataatgttttcatacccaatatgtcaactgatgtgattatattttcatcagaaaacatttggtcaaaagtgtgttctgtatatgtaagtgtatgcgtgagttaaaacaaataggacacaaaattcacaataagtccctctgtgtgtagtggaatcttgtgtaatgaaaccattacgacttgatttctgtactagtggaatcagattgtatgaccataacacatcttgctcatttattttatrtctattaaggctgtttccattttttttgttattgtaagcaatatgaaactgaacattgttgaacatctcttctgacgtgaatgagcttgagtttcttcagagcagttatttggcataatttttcatgtcataggttacaagaaaatattattgtatgatatacaaggataaactgaaaatggtttgttctttttccaattttagcaccattatatttattttttaaattagtttgtatagatatctttatattatggatattaatctcttgtcaattaaatatatttcaaaatttttctctcattctcagatttttttccatgtgctaatggaatacattttaattttaatgtagtccc

SEQ ID NO: 690510 - DNA, 623 bp, Homo sapiens
ttttccaaatttggatgaagaaataatgttttcatacccaatatgtcaactgatgtgattatattttcatcagaaaacatttggtcaaaagtgtgttctgtatatgtaagtgtatgcgtgagttaaaacaaataggacacaaaattcacaataagtccctctgtgtgtagtggaatcttgtgtaatgaaaccattacgacttgatttctgtactagtggaatcagattgtatgaccataacacatcttgctcatttattttatatctattaaggctgtttccattttttttgttattgtaagcaatatgaaactgaacattgttgaacatctcttctgacgtgaatgagcttgagtttcttcagagcagttatttggcataatttttcatgtcataggttacaagaaaatattattgtatgatatacaaggataaactgaaaatggtttgttctttttccaattttagcaccattatatttattttttaaattagtttktatagatatctttatattatggatattaatctcttgtcaattaaatatatttcaaaatttttctctcattctcagatttttttccatgtgctaatggaatacattttaattttaatgtagtccc

SEQ ID NO: 690511 - DNA, 634 bp, Homo sapiens
ttcaaatctcagtctgtgtgaccctagataaaccaaacatttgaataattccatggatgtaatgagttacaatctatatgtgttttccaaaattgatctgggaattctctgaattggaggagactatctgggtctccttttgtacctagcattctcacaaccacttttctctcactctttaaaagcaagggatttctctaatccgtacacatctttccacgtgaatcactctgatgagaaaaacaaaagcaaatatgcaaagcctaaacttgaaatgctgctatccatgaggcctgaagttgcctgcaatcagaacacttcaaacccatggtatgacttgtttctctttggtgtttgtatattttttttcatggcaaagaaaggcagttgacatgtattctagccagtataaccttggccaggcatgatgactactgaccstaattccagaacattgggagaccaaggtgagcagattgcttgatcttaggagttcaagacaagcctgggaaacatggtgaaacactttccctaccaaaaaattaaaaaattaaccaggttttgtagcatgcacctgtagtcccagctacttgggaggatgagatgaggggatcacttgagcacaggagttcca

SEQ ID NO: 690512 - DNA, 474 bp, Homo sapiens
tttttcaatgtttattatacactttaaattatgagtcaagagcataaattattttatggctcgtttagagataatgtaaacagtattcwctttctacaaactaaactggacccgagcaaagcaaactccagtagaatatgttaactattgtcctcataataatgagtactcatttataactgtgactgttcacttttctcttaagatcttctctgattattgttttaaagttaaatagcaaatggtctcaactccctccaggctaaacaagtaacatgagtatcaatcacatttggaaccaaatgcatattatctatctataataccaaccttattacttatgtatggctcagctatatcatataaattatctcatgatgtaaatatactaacattaacacttactatatgcaggttatttaagctctttgaatctcagtttcattatttacataatgaaggataaattgactt

SEQ ID NO: 690513 - DNA, 621 bp, Homo sapiens
ctttctcaatgtttgtcctaccaccacaccacttcccacccccagagattagaatcagtctggagcgagggccaggtatccagatctttagaagccctctgggtcgttctattgtgatgccaaagttgagagtcactgccacagttcggtgcttttcaaatgttagtgagtgcgccaatctctagggtctagctaaacttcagattctgaatcagtatgtctacagcgtggctccagagtctgccttctagccagctctcagtgatggtactgctgctactccttagaccacacttggtagcgagcttttagagctaactcagctaatgatcttgcctgggtacgctyagtgccccgtgtcctcagactcagtgtggcagatgtcctgtctaaagcacggaaggcgatgtacagagactactttttggaaattttctgggacttttgtggagtgaggtcgggtcatcatagagtaagagccaatcacacattggaccctgaagctagccacttctaattatagctactggacattcacaaattcttagggttccaggaagggcatggaaaagacagaaacatccccttaaatcctacttcagaacaggacatatgattttt

SEQ ID NO: 690514 - DNA, 621 bp, Homo sapiens
ctttctcaatgtttgtcctaccaccacaccacttcccacccccagagattagaatcagtctggagcgagggccaggtatccagatctttagaagccctctgggtcgttctattgtgatgccaaagttgagagtcactgccacagttcggtgcttttcaaatgttagtgagtgcgccaatctctagggtctagctaaacttcagattctgaatcagtatgtctacagcgtggctccagagtctgccttctagccagctctcagtgatggtactgctgctactccttagaccacacttggtagcgagcttttagagctaactcagctaatgatcttgcctgggtacgcttagtgccccgtgtcctcagactcagygtggcagatgtcctgtctaaagcacggaaggcgatgtacagagactactttttggaaattttctgggacttttgtggagtgaggtcgggtcatcatagagtaagagccaatcacacattggaccctgaagctagccacttctaattatagctactggacattcacaaattcttagggttccaggaagggcatggaaaagacagaaacatccccttaaatcctacttcagaacaggacatatgattttt

SEQ ID NO: 690515 - DNA, 1151 bp, Homo sapiens
ggctcacgcctgtcatcccagcacttcgggaggccgaggcgggcggatcacgaggtcaggagatcgagaccatcctggctaacacggtgaagccccgtctctactaaaaatacaaaaattagccgggcgtggtggcaggtgcctgtagtcccagctactcgggaggctgaggcaggagaatggcgtgaacccgggaggcggagcttgcagggagccgagatggcgccaccgccctccagcctgggcgacagagcgagactccgtctcaaaaaaaaacccaaaaaaaaaaaaaaaaaaagaatcctccctttccctgctccgatttacaaaggaaaggaaaaactgaagctcggagaagctcatgggagttgctgggagacacacagctaaaacagtggctgtgcggggtcaaagagcacctccagctccctgcctcataccgtctttttaaatgtgctctttgcagcgggatacggagtcagacgccgactatgaagtaatcgtcccttcctagcatatctatctggaggatctgccagcccgcctgtcccaacccccggcagcttccatcctccatgctgggaaacgtggctcaattcccttggggggctggtagcagccaggagatgaggcaactgcagactttcttgacttctcagtacccattccaaatggtcctcaggggaggcagataccgtgggctgtactggggcctgggttccacccccggggctgtggccttgctatggaaggcagtcctgggagggcatgtggctggttgccacatcacgagacacacagctcttcacccccgagagccttcttgcagcccctaggggtcctcacgactaactggaacagtaaacccttaactctgagaactttccactccctattcccattctattttggggttttacatttcaagggggcaggctttatccacactgaaatcactctccatattttcccagcagtctaacaaccaggtagagaggaatcaaggcggggcggggcgggggggggattgccaagtgttggcaaggcaggtgctrtgatgaaaagttaacttcttccatgtgcatgaacccctcagcaaatctttccaccttcctgggcctgggcttccttgactgtaaagtgaaggaggg

SEQ ID NO: 690516 - DNA, 961 bp, Homo sapiens
tgggtatattccatatgatctgaagaaactttaggggcaaagagtatcatatcaaagaatatgctcttttaagtggcaaaataggtaaatattaaatattattggcttgaatactgtggtggtggtggtgatttacatgtgtatgaatgtgtataagagaaagagaacacaaaaaaatgagatgatttaattaaaatcaagcatattcattataaatatttaatttggctctcagaagatgatcctgtcaaagctgactggctgagaccatggttttgatttaaatattcttaacattttccagcaaaagaagccagcaatgcaaaaaactaaatgacagcccttaataaaatatattttaaattttgatttcaatatttctttaaaatattaactattcaatgtttgtttcattttagctcactaacgtatatttgatttatttaaactattatttgtatcattcatatttgtaatagttatttcattaattattagtaaattattcagaatggtttttttaccaagttcttttagattagtagttttctgtcaaactcctcaaaattttttctgttagacactgaatgttagttattacatgatcacattgataattttagwctttagtgcaatgaaaatttctaaacacataatgtgtcaaagatagacaagttttttcttttccaaatgtagtagtctttcacaaaattgaaggcccttgtgctagagaataaaaatatgaggagtctcacgatttctaaccaatacatttgctacaagtttgatcattatatttaaggcaattcacatcaaaatcttttgcaaccattcttccaatttttgagatttgatttctgtttctattcttaggtttccatctgcctgtgctttaaatattttttcataacctgtctgatatagttgtatttttgaaaaagttctcatcaactcaaaggat

SEQ ID NO: 690517 - DNA, 605 bp, Homo sapiens
tttacaacacaraagcaaaatcacaaaccaatgaaatggtaataggagtgaaagagtcagacttgaactggactggaaggaaagaaaagggagtaaaggcacacatttctaaaacgtccttctttaggcaatgtttacaatcatatgtaaacataaagagggatgagaataagatagaagtgtgtcagagaactcagagaggaaagcaatctctggcaactagagaaagtagttaaagaatgaaattttactacgctaattccacgatcacccactgtgtccttgctacagcttgcaccaagttctatctctatgatcactcacataatgttagaatctggttattattctggaagatagaggaaaatttagtggtcatttgttacctaatgttaaaaagaaaaattaaaaagaaagagaaatatttctaattaactgaaaagacgtacattggagaagatacatggtatttgaccttttgcccatctttgatttcaacaattcagatgaaccctatccaatggttttgtgtcacaaactgacttatactaaagggaggaaatgaattaaaacccctctagtgactatgaattgttagggttttt

SEQ ID NO: 690518 - DNA, 1512 bp, Homo sapiens
cttagcacagttcccactacatagtaagatctcaaaactgatagcaataattattattttgcattatgtatatatatattgagaaagaagagaaaatactgggagcctttaataaattactgccaaatttaacaataccaaaccaacaaaatatcccacaaacactgtaatgactgttgttaatttctcaacaaaaaagtcagtatttaaggataagtctactccagcttcagtcagttacgattgaagacacacctaaaactcattctacacaggccgggcacagtggttcacgcctgtaatcccagcactttgggaggcctatgcaggtggatcacctgaggtcaggagttcaaaaccagcctggccaacatggcaaaaccccgtctctactaaaaaatacaaaaatcagccaggtgtggtggcaggcgcctgtaatcccagctactcatgaggctgaggcagggagaactgcttgaacctgggaggcgggagctgcagtgagacgagatcttgccactgcactccagagtgggtgacagagtgagactctgtttccaaaaaaaacagggctaaagctgggcatttttagagaaaataaattttgaaaaatatagcccattaaatgtataacttcatttgttcacattctcaacatgatggaaagttcaatggtccaaaaataaagtcgaaattaaaataaattttggggcccggtgtggtggctcacgcctgtaatctcagcactttcggagactaaggcaggcagatcatctgaggtcaggagttcgagaccagcctggccaacatggtgaagccccatctctactaaaaatataaaaaaattagccaggcatggtggcgggcacctgtaatcccagctacttgggaagttgaggcaggagaatcgcttgaacccgggaggtggaagttgcagtgagccaagattatgccactgcactccagcctgggcatcagagcaagactctctgtcttaaaaaataaaaaaaataaatgtttttgtttcacaggtctttagttaccttcctcttatctaccatactaaatgacaatttttttcccctcacatttgtctgcttaagatattcaaagacataagattagacggagtacatttccttccgttctggctgtttttactcaaaattgcttcaataactycacattacatatgggatcaagtccccaaagcctatagcatgggatacagggccctgcctagcttgcagcctcaatctcatctcattccattccatacatcccggggcttgctctccccacaactcaatcgctttgtgagcctctcatctgaaaagttctccagctcccctgacacacacacctcacaattgctggcaaaaccctcctacttttcaaataacctcaggggtacttcctccgtaagacattttcggtccctttgcctcccgccctcttctttcatcccatcatctcctcccagtacagacttctactatagcccattatcat

SEQ ID NO: 690519 - DNA, 597 bp, Homo sapiens
gtctatccagatttccttaaggggaagggagttgttttacagattggaattaaacccagggcataaactacaatcattgtattttgatatctttgagaaatgtttacaattacaaccgaagaagatttgggaattttggtcactggggtgaatacatgtgcattatcttgtttgtttttggccataaaaatataaagaaataggctgggcgcagtggctcatgcctgtaatcccagcactttgggaggccgaggcaggtggatcatgaggtcaggagatcaagactgtcctggccaacacggtgaaaccccgtctctactaaaaagtacaaaaattagctgggcgtggtgccgtgtgcctgtagtcccagctgctagggagcccgaggcaggagaattgcttgaactccggaagtggaggttgcagtgagctgagattgcgctactgcactctcaaaaaaaaaaaawaaataaaataaaacaaacaataaataaaggaaataatatgtttgagctattttataataataaatttatgcttacataattgatgttaaaatgtttagcatggggcctggcacatagtagcttcccagta

SEQ ID NO: 690520 - DNA, 1202 bp, Homo sapiens
gggtgttcatgaggattaggtgttgggacaatcaatttgttctaagactgaaggttggctccacctacttatatcgtttattgctgaaaatgattgtgaggaaatgaggctcctactcaataggcaacgagctaaaggcacctagcacagaaggtagtagagcttaggagttgaataatggtccatctaatgctaaaatctgtaccttttccactgtatcacacagaagtaattctaaaatctgtgccttttccactgtatcacatagaagtgaatttatataatttacatcacatatatttcctccagcaaatgaaggccaaggcacatagcctacagagtgatgtgcagtcatggaactcttcccttagtttcctgcccagctcttctcttatgttagaatgctttgagatatgttgtcagtgggaggggttggggtgtggaggtgttaggctccatccagatatctatgtcagcccaagagtaacccttttctatttatagttcaatgaattgtagtaacaaaaagttaggttctgtgcttttaaaagttcttttttttcttttgtagactatgccagttgcaatggctttattaagagatgttcataatctttgtcctaaagaagtcttaacrtttattttagacttaatcaagtacaatgacaacaggaaaaataaggtgaggtacttttatttttaaatcttctacaacagttgtcttagataattttcttaatgaatattacagaactacccaatggtattttgtttctaaataaatatttagtctataaaaatcatcgtacttgatgactgtccacagtccttgacatttctagagatagaggcatgtaaacacgatttattagaataaccagtggataaaaaacaatattagtttttaaatgttcttcaaacctcttgtagtgtggagagagtagtacatcagatttggggtagccagttaaaacttgataaaacctgacagcacaattttatttacattgatttattttttgttcacctaatgatacctagaaaagagttctcgattgggattaacttgttccttgattcatttgaccttttttcttttctttaccattgtgtctttattcatttatttagcaaatagcaattggatgtcctgcttcaaaaattattttatcttacttgttatcattccaacaatcagcaaa

SEQ ID NO: 690521 - DNA, 1970 bp, Homo sapiens
  misc_feature 582, 665, 666, 667, 668, 669, 670, 671, 672, 673, 674, 675,676, 677, 678, 679, 680, 681, 682, 683, 684, 685, 686, 687,688, 689, 690, 691, 692, 693, 694, 695, 696, 697, 698, 699,700, 701, 702, 703, 704, 705, 706, 707, 708, 709, 710: n = A,T,C or G
  misc_feature 711, 712, 713, 714, 715, 716, 717, 718, 719, 720, 721, 722,723, 724, 725, 726, 727, 728, 729, 730, 731, 732, 733, 734,735, 736, 737, 738, 739, 740, 741, 742, 743, 744, 745, 746,747, 748, 749, 750, 751, 752, 753, 754, 755, 756, 757: n = A,T,C or G
  misc_feature 758, 759, 760, 761, 762, 763, 764: n = A,T,C or G
ctattatttcttctcctatctttttaaaaaaggaaaattttaaagaaaggtaaccataggttttttttttttttgagaaaatccaagcttgctttttcaataatgatgatgttgattctgatgttcacttattgagtgcttagtacattcttggtaccataagtgcttttcctgcattttcttattttaagtaatattattattgttattattattattattattatttgagatggagtctgtctcttgttaaccagactggagtgcagtggcatgatctcggctcactgcaacctccacctcctgggttcaagtgattctcctgcctcagcctcctgagtaattgggattataggtgtctgccaccacgcccagctaatttttgtatttttagtagagacggggtttcaccatgttggccaggctggtctcgaactcctgacctcaggtgatctgcccaccttggcctcccaaagtgctgggattacaagcgtgagccaccacacccggccttattttaattaatattattattttatattgggtatcttttaaaaatttattttagattcaaggggtggngtaggtctgcgggtttttacattgatatgttacctaacaggttgggtttggacttctagtgtacccattacccgagtagtaannnnnnnnnnnnnnnnnnnnnnnnnnnnnnnnnnnnnnnnnnnnnnnnnnnnnnnnnnnnnnnnnnnnnnnnnnnnnnnnnnnnnnnnnnnnnnnnnnnnccaatgcatattaaaaggcaacaataatcatgacagctaacatattaatcttcatagctgacagtattctttcatgcattttatcaattcaagttcatctcctttttatattgctgctgacctttaggaagtgtttatcacaccagtgctactccaagtgtggtttgctaactgggcacgatcttggctcactgcagcctccgcctcccaggttcaagcaattctcccacctcagcctcccaagtagctgggattacaggcacctgccaacacacccggctaatttttgtatttttagtagagacagggtttcgccatgttggccaggctggtcttcaactcctggcctcaagtgatccacccacctcaccctccaaaagttctgggatgatagacgtgagccactgcacctggcttcatttgtattattgtatttcatcaaagtatcaggcttcaatgggttgaaagcatacacacacacacacaggtggatcttccccgccaaacctttgagaagcactggccccaaagcaccaaaacagacagaaggcatgaaagaggtaagtgtggagagctagaagagaaaagtgtggagagctagaagagaaagctcacacttaatagttcccacctstaataagtgctttcagtaaattttatttaatcctcccaataacccaatgagattggtgttattatctaaattttacaaaagagggacagcaaattcagagacgataaggagcttgcccaaacatggccaagaatcaaaccaaggtttgtcagaattctgtttttctgaaatatttatgctgaattagttgccatatgagtgcccttttctccttgatcaatatctaaaaaattacagtttatctggaaccagttgctcctgggctcacagtcatggacatgtcctcaggatgtggctcaccaatttttccctaagttaggaaaaaggatctgtcttcttacccagtggagcatggtgtgtgtcatatgtcaaaaggttaaaacaataacagcaaaccagttcccatttcctgttcaaatatacctacctatacacacaccgccccctacacacacctcttatcaggcaagaaaaataaatcatgctctctcactgtcactggaacaatagcatcaggtattttcctaactcgaattttcttttcttttctttatgttaaggtgcttttttat

SEQ ID NO: 690522 - DNA, 593 bp, Homo sapiens
agaatgattaaataatgagatggaagctaaaagaatttgttcatgagactttaaagcttcttattacttcttatcacccgcctgtgtattctgttaggtattggcctattcccatattcatagaatcaggaacatattcaagcaatttatgtattaaaatctgaattaaaatatggtagcatatatggctgaaactaaatcagataatctcaatatttttgtccttttaaagaatatctrggtaccagttattacagaagatacagttctccaaacttgtctgtatatataaataatatgtttagcttttacttgagtattagtgttggctttattacaaagtttatgaatataagaaatagaattttgggatactaaaatgtgaataataagtgagcacagaaactttgatttgttcacgtgttctaaaatattggagcagtgcctgacaaagaggaagtacaggagtcaaataccacttgaatggatgagctataatagtttttgtgcattattcttctctcctcaaaatcagtgaccttcaagttatatttagttggactaagttcacctgacatttaaaaagaaacaca

SEQ ID NO: 690523 - DNA, 2188 bp, Homo sapiens
agccggctccaagcagataattcactggggaggttttcagagtcaaacatcattctgcctgtgttgggggccaggtgtgtcacacaagcatctcaaagtcaaaagccatctggggctgctgcttctgtttctcaggctctggggaaaggaatctccctctcctctcacttgattccaagtgtggttgaattgtctggagcactgggactttttttctcttttccttgatggaccaacagtgcaaatgcaatctcgccatttaactttcaggtcgatttcctttcctgatcagacatctttgtgccccctttaggaaggaaaagaatacacctacgatgtgccaggcactgtgttaggcgcttttatatagatcctcgttaggatgagactaagggatgaggacatctctttataaaaggcccctaagtaatggataaacagaaacacttagaggtgagaaggtctgtcttcaagatccaaggtaagattgccttcagtctgatgtttgttctcaaggacttatcccctacaatattctcccactccatacttctccttctaccccaccatgtgctcccgtgcactcctcagatggtcagaggggtaacccaagtccttagagaatttggggaccaatagaatatgtgatgtgtgaattttctttaaaaaacttaaggagtctttgctaccttctgcttgttgagttgttttggcattcatattaaaagccagcatctcactatttattgacaggttgggctgtgtgtgtgcgcatgtgtgtatacatttccaggcgtgcctgtgtcctgtagctttttaaaaggaaacccagtcatcccactatgaatctggcatcttcttatgcttctagtgttttggccatacatcaaccaaggggtttaatttatccaatgcttgacgacatgttcaggaggggctggatcaaattttgagagggttatgggaaagggagggggagaagaaattgacatttattttattatttattttaaatgtttacatcttctttatgttgtatcaagcctgaatagaaactgatagcattaaaatactccgttcctctctctcttctcgcttccttttttttttttttttaaatttaggataacacatttttgtttctaaagtgatttgtgatttgtgctgtataaactgtataaaaggttctgtttttaaaggtggattttcattcctctggggacagtggtcgccaagacatttacattgtaagagaacacagtggaagatcctgtcctgattctcaaaaattattttctctgtatgattaaaagtttattccatttattttagtttgtgtttacttgattttgaggaagaaaatatttgactttgtgtaaagagtagggtatcagggtgttttttctgccgtgggagatgtgtatatatatagtattttggtgtatagtagaaaataagctttgtgcatctgtatttgagatatgttaatgacgtggagtaaagtcagctgtaagactttggaggcaaacaagttgtatatggttcatatggctctatggggaatttaattaccttttctgggcactttttttttttttttttttttaagtaatggtgaaatggtcccattggagagtctcctaaatagaccttccaggcagaaccgcaagctcaaaatctttgtatagttttgaaaattgaggagtagctttgtttggaagcctttctggtggtggtttttgttgttgttgttgttttgttgttttactatatgtaatacaagcctacagtatttgcactaaagaaagcttgttagaaaaagcttgctgctatggaagaaagaacatattaaaacttctttcccttgcgatttttttgggggaggggggttagcatttccactttcagttgagtagcattttgtagaataaaatgaattaagattgaagagcctctgatggttggtttattctgtcttcccatctctcctttttcttctctttttcttctattcctctctacctttggccctcatgggtaaagttggtttttctgctggtggggtggcaggggggctgggggagctgggaacttcyttctgcttgcttagaacctctttctgcaaagctgtgaggtgggcttctgggagggcatcggggcatgtctaccgccccgtctcattcttctt

SEQ ID NO: 690524 - DNA, 601 bp, Homo sapiens
tttttaaaaaggaaaaaaagattgcttaaaagaagccccttaactctgaaggcagttccatccaccttacaaattcggtgccctgtgaatacacatccatgggtcacagcagggaatctttttaactagaaaaagagcaggagaaggaattcagatcaacatcacggactgcagcagtaaagctggtgcctgttcgcccctttcccctccaggcaggaaagaatcaaggaagaatttcagaatctttttatacaagaaagggattcggtgggggaagggagtgggtacagagatgaagaactttagggtttgctatttcaagcttaaaataaatcccaacgagaaaggatccgaargcttggttttatttttaagatcttatccaaggcagggaactatatctggttttcaggggtgtgtggggtgcaaacggccgggccagcacagtcatttcatcccctgtcgattccccaaaagcaaaaccaaagctcagcatgtgcttctagaactttctatatctggtgttcaggggtgggtggggtgcaaacggccaggccagcacagtcatttcatcccccgtccgttccccaaaagcaaagcc

SEQ ID NO: 690525 - DNA, 655 bp, Homo sapiens
gatccgcctgcctgagcctcccaaagtgctgggattacaggcgtgagccaccgcgcccggcctcccggggtgctgggattacagacgtgagccacggcgcctggccttcttattgtactttctaaatttccccatagtctgcatgtatgacttttataatcataaagtgaaaaataaaatgcctttttaaaaattaattgaagttygagaacatcgtgtcatttgttttaaatcacatagtgaggcatgccacccatttcccctcctgtttatttttcaattaataaaaggcaagggatgtttatgcttgaggcttgaggaccttggctgcttgtattggaatccacgactttagtccaaattgataagtgttctggtatttgtggaggctttttatttattttataaaaaccagcttacacgaaggcacatttctaaagttgaccacgtaggcttcaggataaacagctttctagttagtgcctcgtgaataatacggatatggatttactggaggtgtcttgaatgtgttcttattgcattgttttaagttagtgggaggccaagatgaaagggggaatttcaagataagctgtgtgagtcatttggtgttgcggtggggagttgagagggatggaatttgccttggcattca

SEQ ID NO: 690526 - DNA, 1916 bp, Homo sapiens
tatgttatgttcatcccagggcctccctgctgagaaaggtctgatgctttcaggttactcatgatatcaggtgccaacaggaggatatctactgacatgcacagaacccagaccctggaacaggcagccgtgagactggtcatattccacccacgcattcagtttgccaggaaatggcacagtgaaagtcttaaattcatacttctgtgggactaattgaactctggggtttttatttatttgaggaaatttctgtgaagccctgtggacagattagaaatatttactcacaaaattgtacttcagtctgtctcattctgaccattgtcatcatcatgacagagagaattgtagaaaagtttggtatttggcagtgttttctattttcattactgtcttacttggaaagcttaatactattttattattcaggtgctgtggttgtatagttttcatggatgtgttagtgtttcgctgattctattcttaagttagttttgatttataattatcatgggcttctacggcatttttcacagatacatctgcctggtcattctggtgctgggtcatttgcaatagattcctaattacagattcacttcttgcttgtatagaatctgtacagcatttttaaccctgtccataagtttatttacagagtaaatttgcataagtgttgcaaggacttgttactacttggactaacataatatttctgtttgctctttagagttcgtgggctggaaaagaaagcacattaaaaagatcagagaaggtaaaatatgagtctccacactgaactccatatttgcagtacctggtgtttgcttgcctattctaatcatgtctcttttttagcaaaagtagccatagtcataatccctcttaaccagggaaactgtttcattatggctgcaaaaacacattccaagagggttacgcatgatcgttagctaatgtgagaaggaatacttgttcaagacagccatttcagattactgagttttatttaaataaaggggaagtttctaagccaaagtctctcagttgtgtatcaaatttcttttatttttaaaaaacttctctagctctcaaagcctgtatcaccaagagaagggaaaaaaaaatggcctgagctgtaccatatattgaaaacaatgcattgctcctgcttaccttgctataaaatcatggtaattaccaatccgaacttgctttaatcggtgagtcgtggtttgactgctctcatccaggatttggcaaatgggaagggctatagatggaaaatcytcttggcttttcaggtcttgtggtctctgtcacactactcagctctggtgttgtaacacaaaagcagccacagacaatatgtaaatgaccaaatgtgactgttttcctataaaactttatttatgaaaagaggtgagagtccacatttggcccacagtccatactttaccagtcctgatctaaagtattcattatctacaaggaaaatgaagtaacaaatgagctgaaaaccctaaaaattaggaaacaatttatacattgtatccttatttcagcctccatttgatcagtaccatctacatacatgtgactttgccaaaactgccaggcttagtgctattctagtacagcagccttgggcctgtagacattgcccttatgtggacatgtgtggtgggatgggtgatatctctgtgtagactctgctgcctgtggacagctctgccctcaacttgctgtgctctctgagattcccaccatggcctgtgggcatcggggcttgacatgggtacagctgatgctgcaccattcttatctgtgaagggtctgacatcctcatcaccaaaggacccctcgacctccatcccaggcattgctggaaataagccaacaactctggatcc

SEQ ID NO: 690527 - DNA, 763 bp, Homo sapiens
tttaaaggattattacatttttagatgtgataatgatgttgttattacattttataaagaagtcttactttttagagatgatcatatctttttagagatgtttatrcataaaatgatgaggagtgagggggcatacaaatggaacatggttgactatgagttaatcagtgtgaagctgtatgacagtggcatgagagtttattatatttttctttctacttttgtatatattttaaattatccataatatatttttaaaatgtacaactctttccaatttgactccttaaatttagcagcattaatattgagagttactttaagatatcccctaaaattcctgggattttcatggtcacacatcaggtacccaatagctacatgttcctgtctctaaaatatggtgaaaaacatctgacctgtttggaggcatcacccagttgtttggaggcaaacttgtgcacagtagtgatctcctcggttcactctgagtcatcaattctggagctctcagtttgtggagaaattttctagaaactggagagagaggggtaaaataataggagacatacaataaagccaatgacaccataatggggctgtcaggaggcagaaaaggagacgagcaaaaagaaacaaacaacataaacatatggatacataataagtaagagttacatcagcgtttcccaaacctggctgccaggtagaatcatttgcagcacttgtttaaaatttagatgcccaaatcctgtctctgaaa

SEQ ID NO: 690528 - DNA, 491 bp, Homo sapiens
tggacgtggtggtgtgcacctgtaatcccagctacttaggaggctgaggcaggagaatcacttgaacccggaaggcagaggttgcagtgagcccagatcacaccattgcactccagcatgggcgacagagcgagactgtctcaaaaaaaaaaaaaaaaaaaaagtcaccaygcacagttccaaagcaagggatctcttgagggtgtgtgctcttcttggtcaggtcttcatggtcctatttcaaatgactaaattttaaataaaaacaaccccatttcatctcaatccagaccttaaaaataaaaaaaattaaaacaaccccagtcaacaatgaaagaatacaggacaatcttttaataccatattttaaaggaaagacaatttacaatggccactggacaaggacagcaaaaattcattctccagtcagtggaatgaatcttgtggtcaaactgatctacttccagtcctgcttgctaggaggatatccc

SEQ ID NO: 690529 - DNA, 608 bp, Homo sapiens
tgtgcgttaatttgttggcctaagattacacagctactaaatggcagagccaggatccggtttttcctttgtaccatgcttcctctagtaatattattaatatgtagcattaatatttattcatcatatattatgttaagaagttgtaaagcagacttgagtgtaattgttcaaatattcccatctagtccagttatcagtcttactctctgataaatacatatacagttactaaacttctgagatttatgtacatatgagtagyctaacttatttaatatgaatacatatttataatcacttgtttgtatttaattatagagatgaagagagtaattttttttgtaattaatgtgtcacaatgtttggtttagtttctgtagaaaatgtttcctgactgcaatgagggaaagcggagcacattgtcccctatgtcgtggaaatgtgactagaagagagagagcatgtcctgaacgggccttagaccttgaaaatataatgaggaagttttctggtagctgcagatgctgtgcaaaacaggtagagtaaatgtgacatctctcttctttggaagccaagtttctactctgaaattcttatttgaattt

SEQ ID NO: 690530 - DNA, 630 bp, Homo sapiens
ctccccacaccccttgacccacgcttggtgtccagtcagccggcgagctcggcagcttccccagggacacaaagggttaaatccaggcgaggggactcggtcggatttgcctcctaaacgcattttccagttcattccccagcacaatatgcctgggctggtcccagcctccgtccccaccccacccgtcagaatgggccaccagggccaccccggggtcgggcgcgaggttaacccctcggctgccggcagcccgcacctcgaggaaggacacgcggggcaccctcgggaaagtgggtcatgcagctacttggatggcaggaagcccgcggtgtctcctccagggagagcccccagagctgggagcagagttccgagggggagcccggtcccgcgccaggccgggaggaggctgccccggcctcaccctccaggaaaggaaccgcaggtgagcgaggagccgcctctgccgcagcagccgacyctccgcgcccgctgtggggcggtgtggggcgggagggggcccgagcgtcctgagccgtctggcaaaggggccgcccaaagagacgaagcccccccgccatactccaaacccgcagctccgagactgacgccctccccctggggctg

SEQ ID NO: 690531 - DNA, 629 bp, Homo sapiens
gactataatcggggtgtgcgcggagaggtgagggagggacagcgagtgcttccctagacagcccatccattagtggggcagtggcctgtcrcagctgtccagaggtagatgagcccggaccaggccagagaggcctggggaggcagaccaagaacccctgtctccatcccttcttccccttccctgttccttggccttctgcttaggaactctgctctaattataaatggtttgacaactttaggctaggctctgtaattaaaaataaagaagaagacaggcagcattgtctcctaacgatgcctttaattggtggagttaattttaacggggcctagttcagtgccttggaggaggcaattccagaattggggctcttgctggcatcccctgaaaggctcgcccagcccagcctatttacctcatcagccaggggctcctcaggcggcgggggcaggatctttatttatttatttttatctccagtgctgggcacacagtaagtagaagaagaggtctgtggtgaggaagacccagagcatctggagcttccagccagtcaggaggattgcctgaggccagaagtttgagaccagcctgtgcaacatagtgagaccccgcatctctac

SEQ ID NO: 690532 - DNA, 629 bp, Homo sapiens
gactataatcggggtgtgcgcggagaggtgagggagggacagcgagtgcttccctagacagcccatccattagtggggcagtggcctgtcgcarctgtccagaggtagatgagcccggaccaggccagagaggcctggggaggcagaccaagaacccctgtctccatcccttcttccccttccctgttccttggccttctgcttaggaactctgctctaattataaatggtttgacaactttaggctaggctctgtaattaaaaataaagaagaagacaggcagcattgtctcctaacgatgcctttaattggtggagttaattttaacggggcctagttcagtgccttggaggaggcaattccagaattggggctcttgctggcatcccctgaaaggctcgcccagcccagcctatttacctcatcagccaggggctcctcaggcggcgggggcaggatctttatttatttatttttatctccagtgctgggcacacagtaagtagaagaagaggtctgtggtgaggaagacccagagcatctggagcttccagccagtcaggaggattgcctgaggccagaagtttgagaccagcctgtgcaacatagtgagaccccgcatctctac

SEQ ID NO: 690533 - DNA, 1486 bp, Homo sapiens
ctgttatatggcagctgacaaactcagctacaacaggcccagaaaaaaattctggctcccaatttcctgaagagttggtttttagcattacataaaggaacgatcttttctcttaaataatttgaattaaaaccattttttcataaagaaataaactgtgaagatattttagaagaaatcagtgttcttgtgataaagccaccttaaagtcaaattgaatgtttttaacccctgacttcattactgaaatgcaaacatttcaaaattataactagaaactagaaataaacaaataactagaaaacttctatcttttcactctcraaatattttatgaatagaccacattatattggcaaagagctcttttctagtaaaggtctataaaatagagttgatttcagaatttgtttttaaattcagcagttttattattaatgcccaataaaggcgctgcatgaaatgaaacgcaattcatgtgatacagcacacacatatcacagagccatctctcttgggtaaaatgcttattaaagctcatgtcttaaagcaacctaacagacctgtctttttccagctgctttaaggagttacatggagttttatttatccacttatttatttttggtagtgatacacgctaataggttttagggttactttactgtaatattttgttttttctttatactccctgcttgttaaattgtaacaacttggagcaaatttttctcattttcacactttttctgcctgtaaagtgttacctctgagagcttcttttagaaagtgtcagacagttgtgcttggtgagagaggctcatgtattatactttgttctttataaatctttaactttgttgatgatcatgggtttcagtggatgttgactaacactgttatggactcatataactccactctctaaaagaagctttcttttcctgagtacttcttatagtacggaactagcagtaggtaacttatagcagttacagcaagaggctttatgacagagtattaacaaagccagatctctatgtggccaattatttaatttcattggtccataatttcttcatctttaaattgtaaattatattatatatatattttttcagcgtgcattacatggtactattataactaatgaattgtataaatttgttttttcaaaacactgaacagagaaagaatgttgttatttactatgttacctttccaaacatgtgttgacaccaaaatcacctgggatcctggttaaaaatccagagttctgagttctattccagggattctgattccaaatgtctgtagtgggtccaggaatctacattcctcacaagtgctcaatataatccctgagtatgatctaaggtctataatttttaaaaaagagaatactgctttcaagatattagcttatataatagctgttagtttaaatatttggcgtcatttgtaactgcattggtttaaacttctc

SEQ ID NO: 690534 - DNA, 652 bp, Homo sapiens
gttaaatgaaaaaagaccttcatctggacacatcatttccaaatcacacaaaattcctaaagcctactaaaaagaaaaccatcaaagtatttcacaaaagaatgagaacctgacttatttcagatttcgtatcaataacactggatgctaaaatgtaatgtatcaataacactggatgctaaaatgtaatggagcaaaactgcacacctgatcaaattatcaatcaagtataagtaccatgtgaatatatagtttaaaacaagtaaggactcagatttattagtgactggccacatatgaataaatgcctttcacaaggagctccagtcaaaccaaaaggaartacagaaaagataacatgagatagaagacactgggagacacgaatatagcctaaaatgagggtaagtaagtcatgacttgtgggccaaatacagccaccatctgtttttgtaaataatgttttattgaaacacagccgtgcctattcatttacttattatctatggtttcttttgtgctacaatgacagagtacattgtagctgcgacagaaactgtgtatgtaagttgctgtgatggtgattagatgaccctcaaagccaagaatatttactatctgcccctttaaagaaaaagtgtgctgaacccag

SEQ ID NO: 690535 - DNA, 2365 bp, Homo sapiens
tcttaacagttgactgacttagtgaaacagactgggcaattccacttatggaattgtaacataaaattccatcatatagtttccattaaaggtagtaggtttttataatctgttagacgttctttgcaaactttattaatgtgaatacatttgcttttttaaaaaaattaagtgaacttctaaagaaaatagaaattaaaaatttttaatttaaattttgctttatagtttaattttttagtatcatttagaattatcaattattttactatatccatatatactgtcccagtaacctgtcattctctttaaagaaaaaagtattcattgtcctctttagatatttacaaatatctgatttctaaaaaataaacatcacaaatgtctattcaattaagcttcagttgagttgtttttttctcagaatgattaagaatatagcactttcattagtggtgactttgctctaaaggtctgaaattttcacttaaattactttcagaaccagtttgaggcatcaggctagagacagtttgtagtttgtcattcacttattctgtagactctcactccccataacttttggtcctttccaaaagcaaattcaattttataagatgaagatttgactttgagatcattcaaaagagtgtcagaggggctgggcacagtggctcatgcctgtaatcccagcacttcgggaggccaaggtgggtggatcacttgaggccaggagtttaagaccagctggccaacatggcaaacccctgtctctactaaaaatgcaaaaattagccaggcgtggtggtgcccgcctgtagtcccagctactcaggaggctgaggcacaattgcttgaacccaggaggcggaggctgcagtgagccgagatcacaccactgtactccagcctgggcaacagagtgagcctctgtctcaaaaaaaaaaaagagagaaagagaaagtcacaacattttgaacaatgtcaaatgtcattgctctttagygttccaaaatgacaatttgaaacattaggatataaaagtttggtatgattggttaattactttatagtcatgccctatctttgatttgttagacttcccatgctttaaatcttgatatacgtagggcctttaaaatggtcaactaaaaagtcaccattcctctacgttttttcgtgacttgatttgtaaaacacagaatgggattactgttttgccatgcatctgtatttagcagatgattactagataataattataattttttatgttataaaaaagaaagtatataaactcaaaaaagctcacttttttgtctagattgtttttgctcttatacaatagaatacatatttaagttgtatttttatttgcatttaataatttattaattaaatgtatttctttgtcagatttcaaatgattgaggtgacttgtaagaatttgttttatgccctgttgctgatcaaatcattggtcttccctatagctccttacaaaattatgcaatcagtgttccatttggagtaaacatttagtgtcttatcttgatagagtaattggctacatttctctttctatgcatgaagttgtgtaaaaggaccaattcacatgtataattggcagagagcatggattctggacttaacattttatcccattctcactacttactaattttatgacactggacaagttatttagcttctcagcctcagtttcctcatctgaaaaaatgaggacaatatctacttccaggtttataaatagttatatatattttaaaagcactgtgcacaatagcacatatcaggcatttaagaataaatgtttgtttcctttcctgttcttattttcacatattggtagtttgagactaagttaataactttttaggcagtcaccctaaacatgactttcaagagttattttaggattagtctgccttttactttagtaagtactgtattctctccattgccaggaggaatatttgaaaaaggaaggaatgatttgaacattgtaaatagctaactgaatatagtgtcttgaggacatatttttggtaactgtgtttaacatctccataaaagtgttttttatttatcttcaatcacaggtacgggaaccttaaagatagattttgttggagagctgaatgacaaaatgaaaggtttctatagaagtaagtatactaccccttctggagaggtgcgctatgctgctgtaacacagtttgaggtatgggttattcttctctaaaatattattattcttaaattaggcattctgacaaaggtgtgtttattatgtggggtgattatttgaggctaggtgcccttggccatgattgtattcaca

SEQ ID NO: 690536 - DNA, 2365 bp, Homo sapiens
tcttaacagttgactgacttagtgaaacagactgggcaattccacttatggaattgtaacataaaattccatcatatagtttccattaaaggtagtaggtttttataatctgttagacgttctttgcaaactttattaatgtgaatacatttgcttttttaaaaaaattaagtgaacttctaaagaaaatagaaattaaaaatttttaatttaaattttgctttatagtttaattttttagtatcatttagaattatcaattattttactatatccatatatactgtcccagtaacctgtcattctctttaaagaaaaaagtattcattgtcctctttagatatttacaaatatctgatttctaaaaaataaacatcacaaatgtctattcaattaagcttcagttgagttgtttttttctcagaatgattaagaatatagcactttcattagtggtgactttgctctaaaggtctgaaattttcacttaaattactttcagaaccagtttgaggcatcaggctagagacagtttgtagtttgtcattcacttattctgtagactctcactccccataacttttggtcctttccaaaagcaaattcaattttataagatgaagatttgactttgagatcattcaaaagagtgtcagaggggctgggcacagtggctcatgcctgtaatcccagcacttcgggaggccaaggtgggtggatcacttgaggccaggagtttaagaccagctggccaacatggcaaacccctgtctctactaaaaatgcaaaaattagccaggcgtggtggtgcccgcctgtagtcccagctactcaggaggctgaggcacaattgcttgaacccaggaggcggaggctgcagtgagccgagatcacaccactgtactccagcctgggcaacagagtgagcctctgtctcaaaaaaaaaaaagagagaaagagaaagtcacaacattttgaacaatgtcaaatgtcattgctctttagcgttccaaaatgacaatttgaaacattaggatataaaagtttggtatgattggttaattactttatagtcatgccctatctttgatttgttagacttcccatgctttaaatcttgatatacgtagggcctttaaaatggtcaactaaaaagtcaccattcctctacgttttttcgtgacttgatttgtaaaacacagaatgggattactgttttgccatgcatctgtatttagcagatgattactagataataattataattttttatgttataaaaaagaaagtatataaactcaaaaaagctcacttttttgtctarattgtttttgctcttatacaatagaatacatatttaagttgtatttttatttgcatttaataatttattaattaaatgtatttctttgtcagatttcaaatgattgaggtgacttgtaagaatttgttttatgccctgttgctgatcaaatcattggtcttccctatagctccttacaaaattatgcaatcagtgttccatttggagtaaacatttagtgtcttatcttgatagagtaattggctacatttctctttctatgcatgaagttgtgtaaaaggaccaattcacatgtataattggcagagagcatggattctggacttaacattttatcccattctcactacttactaattttatgacactggacaagttatttagcttctcagcctcagtttcctcatctgaaaaaatgaggacaatatctacttccaggtttataaatagttatatatattttaaaagcactgtgcacaatagcacatatcaggcatttaagaataaatgtttgtttcctttcctgttcttattttcacatattggtagtttgagactaagttaataactttttaggcagtcaccctaaacatgactttcaagagttattttaggattagtctgccttttactttagtaagtactgtattctctccattgccaggaggaatatttgaaaaaggaaggaatgatttgaacattgtaaatagctaactgaatatagtgtcttgaggacatatttttggtaactgtgtttaacatctccataaaagtgttttttatttatcttcaatcacaggtacgggaaccttaaagatagattttgttggagagctgaatgacaaaatgaaaggtttctatagaagtaagtatactaccccttctggagaggtgcgctatgctgctgtaacacagtttgaggtatgggttattcttctctaaaatattattattcttaaattaggcattctgacaaaggtgtgtttattatgtggggtgattatttgaggctaggtgcccttggccatgattgtattcaca

SEQ ID NO: 690537 - DNA, 3051 bp, Homo sapiens
aatgccatgaaatggggacacaccggccccagcaggttgaatggtttccacctgccaagggtgaagggcccatgatgggctattccagggatgtggaggcagactggggtcagcgaccagaggtctctgtgcaatcggcctcctgggatgctcagggcctcagcgatgcccagtttcctacagggaacaagatctctcccgactgctcggttctactccgctcatcactttggctaccgtggctcttcagtctgaacagtgaagccactttaggaataacgcctgttgagcaggagggtgttgggtttgggggatgaggaagatctattgtacgcatggaaaccacgtctctcgcggagggactgtggagtccaccattctgagccgtcccaacaggaggaggcttcattttcctgggtcactgaggaagaacagtgggtccttggtcctggagaacagctggatggaccgtccctcctgggaatactcgaggcaaaaggagggcgaggcctcaagaggaccacgcagagcaagaaatacctggggagaaccctagtgcccggacccctttgaacacaagggaagatagtctcccctcagccagccctccagggctccttcattttccacagctgcccaagggcagcaggctcccccggacaagggaccatgtgtgttcagtggggcccacagcgaccatcaggacccagcttagggcacagaggtgttctgaggaccgtcagtggatctgtaccagtggctctataccagtggctctgccaggaccaggctctgccccatcgggatgggaaacctgggcagatttgggatctagggcagggaggtcacagggttcaggcctgaattccagcacagcacacggcagggctgagagcaaaactcagggtcatgtccggattcccaggccggttactgcctctctgaccccagacgtctcatctgtcgaatggggacatttgggaacagcacccactctacgaagccaccatggagacgaaagagccaatcgtctacacgggcagtgtagaacgggcgcctggtgagtgctcagggatgaccctcctcggtagctgccccacagaggccaacaccgcccgcaccgtagccactgcccccaagtccgcctggagggaagagagcaggtcacgctcacctgattctgatgaatcagctggcctgggtcatgcctctcagggagaaaacctttgagtccacagagctgctcacagataccactgcctgtgtgtaactgctgtagaccactgaggcagaccagagagcagataggtgctaagcaccagtgacattctgaggtcatggcacgaatcacagtggggccttgcccgggtcagcagyacccagagtcagggtcctccgctgcctgaggtgtcaacatgcctgcctgcaatgtgtttgtgcacgtgcgtgcacatgtgtatgtgggtaaacacatctgtgcacgtgtgtgctgcttctctggccaggcccggctgccccactcatgtgtgcacccagttcctcatcactgtcacccccgaggcccagggccagcatcagagcatccatggctgctccctaacctcagccctccctgcccagggtggtcctgggatacacatagcggtggagggaagtgactgctgctgttggatctcagaatacaaaagctagtactattacctaatggtctttttagtgtctctaatggtatcgctttttcatttctgatattttaactgggtatttctctccatgacccttggatattctagctagaggatcctgtggggaaagtgccgggcacacagtaggggctcactcttctagacatgttatctaaaacctggttcatctgtccttccacacagggcctaggggatgccaaattccaggggccagaaagagcttgggataaaaagaaacttcaaggggacggctttgacctgggctgagtctgcctgtgccatccaactggagtctcaagtcctgaggcaggacgtccagatgccccagtgcagggtcctcctgatcaacacctgctcccctgtactcattagcaacctcacccaccctactctcaaagcacacttggctctcgtatccaggagctctgcatctgtagattcagcaacagcagatggaaaatattcagaaaataaattggacggttatgtttctattgaacatgtgcagagtttgttcttgtcattattccctaaagaatccagtatcacgaccatttatgtagcatctgcattgtattacacatcatgaataatccagagatggtctaatgtctacgggaggatgtgcatagctgatatgtaaatactaggccatgttatgtcagagacttgaggatccatggattttggcatccccggggaccctagaactaatccatggataccaagggatgactgtataaactcactcaggaaggcttctcattggaggaaggtcccagttcaggacacacagggacatctccctggactactgtccattcatccatccattcatccattgtctccccccacccccccatctcggactgtcccagtgacagccctagcaagaagagacaagaaacaagttcacgttgtccagttttgaggtaatggaagaagttgcaccagtatgagaatagtgggtcagttttctacaggatgcagaaagcatatcgggcagcctcggggtgcggaaaggagcctggcctctctagcagccacacaggcctgcagtaggatggggctgtggctggccatgtggatcacttgggcctcatgaggggaaaggaaataccaggggggcagaagaggagcatgggggcagctggttgcctaaggagaaggcacctcagggaaggggactgtattcatttgttttcacactgatgtaaagaaatacctgagattgggtaatttataaaggaaacaggcttaattgacttgcagttccggaaacttacaatcatggcagaaggggaaggggaagcaggcaccttcttcacaagatggcaggagggag

SEQ ID NO: 690538 - DNA, 591 bp, Homo sapiens
gatcttcataaatacaccacaaggtaccaaatccttaaactgccagataagggcagaagttgcaagagctccaactaccatatgagggtatttcattctgaactaggctgcaagcatgccaccataggggccctagagggccgtgacagggtgattttcagctcctaggactgttcttttcaagtgtttgattagctctgcaaaatcagccagaccttgctctgatgtcaggagatccaagtgtccagaatccttgaatgggtcatcacagggcagggactctccgcagtatcgctgttccgcatacaccaacatagctttcagttcctcagccccatcccayatgaaccacgtattactgcagaaccagatgatgtccccgtcatatttctttcagtatttatttgctattagatactgctgttaaacagttttcacagtatgaaatccaaaatgatcaaccctctgttggaagtggagaaccgagttgttcttggcaacagccgggtgggacgtggagttggctggcgagtgcaggctgccgagagcccttaaggctggctggagggctgtggtggtccagggcaccag

SEQ ID NO: 690539 - DNA, 591 bp, Homo sapiens
gatcttcataaatacaccacaaggtaccaaatccttaaactgccagataagggcagaagttgcaagagctccaactaccatatgagggtatttcattctgaactaggctgcaagcatgccaccataggggccctagagggccgtgacagggtgattttcagctcctaggactgttcttttcaagtgtttgattagctctgcaaaatcagccagaccttgctctgatgtcaggagatccaagtgtccagaatccttgaatgggtcatcacagggcagggactctccgcagtatcgctgttccgcatacaccaacatagctttcagttcctcagccccatcccacatgaaccacgtattactgcagaaccagatgatgtccccgtcatatttctttcagtatttatttgctattagatactgctgttaaacagttttcacagtatgaaatccaaaatgatcaaccctctgttggaagtggagaaccgagttgttcttggcaacagccgggtgggacgtggagttggctggcgagtgcaggctgcygagagcccttaaggctggctggagggctgtggtggtccagggcaccag

SEQ ID NO: 690540 - DNA, 1104 bp, Homo sapiens
tgttcaaaatgttaaaaaaagaagaagaaaaaacttataaacaaaacatattattgagagtaaacacaaattgttgagctcctaaatgaagtagttttggaaacagcagtgccaggccagtggagatgggctaagtttcaggatggcctgaaatctccctatttgtcaaacagccctcccagagctgtgcctgagaaggaaagttcatggacctttcatgtgaccccaaaggcaatcaatcccagtgaaagtggtcctccttcccattctatcatcctcttgggctaggtctgtcgagagccctgtggcccctccttctccagcttgggatgcagaggcgcttcatctgggctggatggacttgtggttctcactggtcacccaagagctgtgccatcaccctctgctcccagggctgctcctctggcacatttccagccagtccagctgcccctttagcttgccccatggtccaatgtctctttactcctttacrttagctgatgaatgttcattgcctcactgttttttcgttctactaatctggaatttcatgtcattcccacagccccagcccagtcaatacactcaatgcaatatcgtaattcatatccctaaaccccacttttcctttcttcatctggataattactttatcctgtatgactcaagtcactccaggaggctttccttgacacatcctagctgagctcagagtccctcttgtaagaatcatggcagccggtacaccttgattagactgtaaattccttgtgtgccagcgacagtcagagctcttaggcatctttgttccaagcacagtgcctgccccacgggagtcctaagaaagatttgtgccatttgctgctgtctctcccactgctgggcactagctttgactccactgtctgtcctactgaaactgcacgtactagtttgggcagtggttccccaacctgactgtacattgacacttcctgaggagtgcataaaaataccagttccctgggccaagtcagtcagaatctccggggtagtattttttcagaactccccagattgttcttctgtgcatccagagttgagaaccaccagtttaggaca

SEQ ID NO: 690541 - DNA, 1104 bp, Homo sapiens
tgttcaaaatgttaaaaaaagaagaagaaaaaacttataaacaaaacatattattgagagtaaacacaaattgttgagctcctaaatgaagtagttttggaaacagcagtgccaggccagtggagatgggctaagtttcaggatggcctgaaatctccctatttgtcaaacagccctcccagagctgtgcctgagaaggaaagttcatggacctttcatgtgaccccaaaggcaatcaatcccagtgaaagtggtcctccttcccattctatcatcctcttgggctaggtctgtcgagagccctgtggcccctccttctccagcttgggatgcagaggcgcttcatctgggctggatggacttgtggttctcactggtcacccaagagctgtgccatcaccctctgctcccagggctgctcctctggcacatttccagccagtccagctgcccctttagcttgccccatggtccaatgtctctttactcctttacattagctgatgaatgttcattgcctcactgttttttcgttctactaatctggaatttcatgtcattcccacagccccagcccagtcaatacacycaatgcaatatcgtaattcatatccctaaaccccacttttcctttcttcatctggataattactttatcctgtatgactcaagtcactccaggaggctttccttgacacatcctagctgagctcagagtccctcttgtaagaatcatggcagccggtacaccttgattagactgtaaattccttgtgtgccagcgacagtcagagctcttaggcatctttgttccaagcacagtgcctgccccacgggagtcctaagaaagatttgtgccatttgctgctgtctctcccactgctgggcactagctttgactccactgtctgtcctactgaaactgcacgtactagtttgggcagtggttccccaacctgactgtacattgacacttcctgaggagtgcataaaaataccagttccctgggccaagtcagtcagaatctccggggtagtattttttcagaactccccagattgttcttctgtgcatccagagttgagaaccaccagtttaggaca

SEQ ID NO: 690542 - DNA, 1961 bp, Homo sapiens
tctctatcactgtatttaaattttatgtaaacgaagttacacaatatttattcttatggactggtttgttccactcagcaacatggttttctcctgccatttcctgttttcagtattttgcagcagagtgcccaacatagaacataatcgcaaatattccactgcagaaaagaggtgctagtgcttaagcacaaacgggagacatgattattttgctttaaataaatacttaaacacagctcaggtcctgcaagtatctggactctaggtctgagtagtggagctgagtcccacttgggcccacaatgatatcatgattccccccttcctctcagtgatcaatacgtggcatcgagtgccaatggtcaaacgtgatcgcaatgagctccttttctagagccttccgcaactctctacggacacgactagccaggataaagaccattagaattgttcggtcagtggtccgtaacagttaagtattttaaggctgtccatggcgaaaccctgtctctacaaaaaatacaaaaattagccaggctggtggcatccgcctgtgatcccggctactcgggaggctgaggtgggaggatcacttgagcctgggagaagaaagaaagagagagagagagagagagaagtattcttcatgggtctcttggttttttttatcggggagacagatgcatttaggtgattttcttcagctcatcctgcaggaccagcaggtccctgtttctgaggaccacatgcccttgaagaaagctttgcccctttcctctctgaagatggtcctccaacaatcgagggtgcctgtgtactcgaggtcagcttctttgcctcgactgcatctgcatcccatccacctaggcaggcagatcatttgaggccaggagttcgaaaccagcctggtcaacatggtgaaaccctgtctctactaaaaatacaaaaatcagccaagaagggtcacacgtgcctataatcccagctaccaaacttaaaaaaaaaaacctctactatatcttctgaataataatttgaatattatttctttgtctcttaggtcactcatcagcaaacatatatagtgtgtctgccttaggtaaagtaactgaccaggttcaaagatgcctctgatatgaaccaaatcactgaccctcgcaaaacatgttgctttaagaaattgcctttgtatgagagtaatccctataggagcatcttaagttccttaaattttttcctctcaataaacccagtagtaattgtaccctcctgacagtcttcagagggcaacagaaattacttagagttaagaaattaaagtgagtaaaggatacaaattatttacaggataagactttatgtgcaaaatacatctataaagtttacttcgtcaaagtctgacctgtttgcttagcctctctattcttccctccatttcctctttccattcccacctttcttcttagtgccaatattttcctcaaacaaaggcttttctcattaactgcctgcattgctttgcctccagccctctgagtctgtgttctctttggtcattgttttccatcagcagaagcacagacaygctctcttctaagtattcaaggcatgcctgacttcccaagatgatcttcccaagtcactgaacgtaacatcaagaacttttgcacattttagagtacatacacgggaagccacatcccagaaatctacatggcaacctcgctaggtaactcttaactctgaaacccatttcagaaacactgcctggagttcaagggcagagctggaattatagttcaaagctttggggtggtctgttatgcaattaaccaactcactttgttattaatagtatcacgaatcattatgcaagccaggtgtgcttgtaagggaagcaccaagcactgcttcaaccatttaattatttatgacactttccccctttttaactaaag

SEQ ID NO: 690543 - DNA, 602 bp, Homo sapiens
taatctgggtcaggggcctctcctacacactcctgacactttctgtgatttccccagcatgggaatgggaatgttcacaccttattatatctgatcacatacctgcctcctctcttcagctttgagctccactgagggcagggacgatgcagccccctctggctagcacagtgctgctgagcacatactcggcccttgctagaagtgtgcagtatgaatggacaatttcccatggcctagaaaatttagtccaccctctaggcctggcctgccrcaaaaatgatccagttttgaaaattacttctgtagctcttgctccgttcatggtgtccttaaactcccactcaactccaagctaactagtcttttccaaataagtcttaacgttcataatcatagcaggagctttgcttttactgtttactctgcttggaaaattctttccctattgaaatcccattattattcaaagcctaagtcacgtgagagctcttttaatttcttaggtggacgttgtccatcttcccctaccctgcaattcacaatagttgccacctgccgctttgtctttaaactaattatgtacctgttctatttctctt

SEQ ID NO: 690544 - DNA, 1480 bp, Homo sapiens
ttactctgagatggggaatcactggacgcttctgagcagaggagtaactaacatgaaatgattggcactttaaaggctcactctggctactgtgctgagtagactgaggaggctcaggcagcagtggagagaccagtgaagaaacagctgccatcatccaggccaatgacaggctggcccagagagacagcaacgaaggcagtaagaagtggttggaccttggctgtattgtgaatatagagcaaacaggattttctgataaactgaatgacaasaggtttttggcctgagtatctaaaagaatggaattgcaatttttaaaaatgaagactactccattccctcctgtctcctctgggaccttgctccatgaggaactgccctctcttctgttttaacctcaatctctcccctgacctcctctctctagcctggtgcctcttcccatcagcctactgatatgctcaagcatctcccaagctatgatctctccctttcttttcttatgaacatttctcaaagaaatagtttagacttggtgctcccactcaccaactcactgtaatctataattccgtttccatcactcttctgaatgctcttgcagaggtcaatgccactccactggccaatccagaggacactttccagtctttatcctacttgacctctctgggatatttgaccctctttacttccaactttttaattttgttggatcccatgtctgcgagacactgcattctactgattctcctcccacctcgctggacattccttctctgtcacctttaagggctctccttactaagctaccccttaaatgttgctaagcctaaattccatcctcagcccactactcttctgactcttgactagtgatttgcaaacttgaatacaagtatccctgtatggacagcttcaaacaaatcaatgccatgatacttaacttccctagatatctttccttaaaatgatttgcccaagtttctcaaagccattagccaactttaatgaaataaaatttttaaaaagcataccctttgcccaactctcactgtggtgcgtccaccagggtgtaaagaacaccagagccttgtatatacactcatagtacttcctgtctttcactgacatgtgtatttcttttaaggaggaagcacggtgttaggtgatatactggtccatgctgggatgttctgaattcaagtatatagtagagtcgagtggtaggagtaaaggcaattttggttgcgcgtggtggcttgcgcctgtaatcccagcactttgggaaactaaggcatcacctgaggtcgggagttcgagaccagcttcgccaacatggtgaaactctgtctctaacaaaaatacaaaaaagattagccgggcttggtggtgtgcacctgtagtcccagctactcgggaggccgaggcagaagaatcgcttgaaaaaaggcgacagaggttgcagtgagctgag

SEQ ID NO: 690545 - DNA, 1480 bp, Homo sapiens
ttactctgagatggggaatcactggacgcttctgagcagaggagtaactaacatgaaatgattggcactttaaaggctcactctggctactgtgctgagtagactgaggaggctcaggcagcagtggagagaccagtgaagaaacagctgccatcatccaggccaatgacaggctggcccagagagacagcaacgaaggcagtaagaagtggttggaccttggctgtattgtgaatatagagcaaacaggattttctgataaactgaatgacaagaggtttttggcctgagtatctaaaagaatggaattgcaatttttaaaaatgaagactactccattccctcctgtctcctctgggaccttgctccatgaggaactgccctctcttctgttttaacctcaatctctcccctgacctcctctctctagcctggtgcctcttcccatcagcctactgatatgctcaagcatctcccaagctatgatctctccctttcttttcttatgaacatttctcaaagaaatagtttagacttggtgctcccactcaccaactcactgtaatctataattccgtttccatcactcttctgaatgctcttgcagaggtcaatgccactccactggccaatccagaggacactttccagtctttatcctacttgacctctctgggatatttgaccctctttacttccaactttttaattttgttggatcccatgtctgcgagacactgcattctactgattctcctcccacctcgctggacattccttctctgtcacctttaagggctctccttactaagctaccccttaaatgttgctaagcctaaattccatcctcagcccactactcttctgactcttgactagtgatttgcaaacttgaatacaagtatccctgtatggacagcttcaaacaaatcaatgccatgatacttaacttccctagatatctttccttaaaatgatttgcccaagtttctcaaagccattagccaactttaatgaaataaaatttttaaaaagcataccctttgcccaactctcactgtggtgcgtccaccagggtgtaaagaacaccagagccttgtatatacactcatagtacttcctgtctttcactgacatgtgtatttcttttaaggaggaagcacggtgttaggtgatatactggtccatgctgggatgttctgaattcaagtatatagtagagtcgagtggtaggagtaaaggcaattttggttgcgcgtggtggcttgcgcctgtaatcccagcactttgggaaactaaggcatcacctgaggtcgggagttcgagaccagcytcgccaacatggtgaaactctgtctctaacaaaaatacaaaaaagattagccgggcttggtggtgtgcacctgtagtcccagctactcgggaggccgaggcagaagaatcgcttgaaaaaaggcgacagaggttgcagtgagctgag

SEQ ID NO: 690546 - DNA, 1231 bp, Homo sapiens
gttttcgcccccatttctgagatgtattttttgacctccgctgactttatagtgttgtgtttgcagggtttaccctttggaagcggatttaattcttgctgtttttaatcagttgaaaaacattagtacygggtcttacctaaaagcttaaaccttcatacgtgcattagaatcaatgaagcaccttataggaaagcagagtcctggactgcaaccccgtagactctgatttagtaggtctcagggagaggcccaaggaatctgaagtttttggtaatatttaagccgattctaaagcaggttctgctgatcattctgggaaacactgattttaaaagattgcatggattagcctagattagcatgaatctattgggtttgttaaacaagagcctttattaaaataagaaggtatccgtgttaatttataaaatttaacacacaatttagaccagagcaagatttaaaggactataagcactgaatactctgtgatgtgattccattaatcgatatctgccaagatgccgatctacgcaggcagtaccattgcaggaccatggtgtcacatgcacagccatcataacctgcaagcgtgtaactgcagaatggtcagtagagcctggaacaagataaatctctaactaagaagtgtgagccttaaaggagcacagattattagtgattgatcacttaaatgtagctccgggacttcagtgttaatattgctgtcatgtagctctataaacaacgttctctatttattttatttaaaagtggtcaagagaattattaatccgactgtgtggttccatagccttgtcttagaatgagatcagaattcagtgttgtgtaggtgtatacttttgatcttcccagggactgggcccctttaaagtataggtttttagcatcatttaactgttcatgcaaccacagtgatttcccctgagagagaccctggcagcatttctagtttctgcatttcctttctgttgcctgccacacaggtggggagcagagaagcgagggtaccagaggattccagtgatgctgtgggtgtgtccggggtgactggatagcagtgcagcatggaggtagctttggggtcttccacgtcttactgcctgggaatggatttcctactttcccgttactaattgtgtggcctttggtaaattattgaacctgggagcctcagtttcctcctatgaaaatacgaatcattgac

SEQ ID NO: 690547 - DNA, 609 bp, Homo sapiens
aagggaagacagaaaagatgataaaatattttytgcagagtattagtatagggtttggcctcttgattcatcaaagagaattgtcctaaatattatcccttttattaagggattgggtttttttttttttcaactgttcctatttttttttttggtttttgaataatttaaataaaaatctgtagacaatctgggaaacttcagtggtaaaacctgcaccgcataatggttggtgtgtaatgtcatggtatatgtattttggttgttaggttcaaagattcatattttttttttgacatgcttactttttagaagtgtttttttttgagatggagttttcgcttttgtcgcccaggctggagtgcaatggcatgatctcagcttactgcaacctctgcctcctgggttcaggcagttctcctgcctcagcctcccgagtagctgggatttacaggtgcctgccaccatgcccagctaatttttgtattttcagtagagacgggatctcaccatgttggccaggctggcctcagatgatccacctgcctcggcctcccaaagtgctgggattacagatgtaagccactgtgcctggcctagaagtgtctt

SEQ ID NO: 690548 - DNA, 609 bp, Homo sapiens
aagggaagacagaaaagatgataaaatattttttgcagagtattagtatagggtytggcctcttgattcatcaaagagaattgtcctaaatattatcccttttattaagggattgggtttttttttttttcaactgttcctatttttttttttggtttttgaataatttaaataaaaatctgtagacaatctgggaaacttcagtggtaaaacctgcaccgcataatggttggtgtgtaatgtcatggtatatgtattttggttgttaggttcaaagattcatattttttttttgacatgcttactttttagaagtgtttttttttgagatggagttttcgcttttgtcgcccaggctggagtgcaatggcatgatctcagcttactgcaacctctgcctcctgggttcaggcagttctcctgcctcagcctcccgagtagctgggatttacaggtgcctgccaccatgcccagctaatttttgtattttcagtagagacgggatctcaccatgttggccaggctggcctcagatgatccacctgcctcggcctcccaaagtgctgggattacagatgtaagccactgtgcctggcctagaagtgtctt

SEQ ID NO: 690549 - DNA, 609 bp, Homo sapiens
aagggaagacagaaaagatgataaaatattttttgcagagtattagtatagggtttggcctcttgattcatcaaagagaattgtcctaaatattatcccttttattaagggattgggtttttttttttttcaactgttcctatttttttttttggtttttgaataatttaaataaaaatctgtagacaatctgggaaacttcagtggtaaaacctgcaccgcataatggttggtgtgtaatgtcatggtatatgtattttggttgttaggttcaaagattcatattttttttttgacatgcttactttttaraagtgtttttttttgagatggagttttcgcttttgtcgcccaggctggagtgcaatggcatgatctcagcttactgcaacctctgcctcctgggttcaggcagttctcctgcctcagcctcccgagtagctgggatttacaggtgcctgccaccatgcccagctaatttttgtattttcagtagagacgggatctcaccatgttggccaggctggcctcagatgatccacctgcctcggcctcccaaagtgctgggattacagatgtaagccactgtgcctggcctagaagtgtctt

SEQ ID NO: 690550 - DNA, 635 bp, Homo sapiens
  misc_feature 10: n = A,T,C or G
ccaacagatntgagtcctccttcctgtggacctcactggtgtgcagggctgatcatgtgggcaggcttgtgatatttatttatttatttaatttatttatttttgagatggagtttcactcttgttgcccaggctggagtgcaatgtcgcgatctcggcttactgcaacctccgcctctggggttcaagcgattctcctggctcagcctttcgagtagctgggattacaggcacccaccatcatgcccaactaattttttttaatatttttagtagagatggggtttcaccatgttgtccaggctggtcttgaacacctgacctcgtgatccacccgccttggcctcccaaagtgctgggattacaggagtgasccaccatgcccggtgtgatttttatttattatctgcctcccctagaagaccagagatccttaaaagcagagccaatatctttttttgagacagggtctcactctgttacttgcttaggctgcagtacagtgaggctcactgcagcctcgacctcctaggctcaggtgatcctcccacctcagctacctaagtagctgggaccacaggtgtccaccaccacacccagctaattactttgatttttttttagtagcgaggagt

SEQ ID NO: 690551 - DNA, 670 bp, Homo sapiens
tacatactttcatgtacatgtaatttagcccttccaaaataaggcctgtttatattccccgtgttgctaatgaagaaataaagagttaggtatgtagaatgactatgtaagacagccactgagcagaactaaggttctcagttctcagactgacatggaggtgagatataccaagttcagttcttaaaaaacttttaaaaatccagaatgcatcatgtattttacccataaaatagtcctgtttttgagaacttacttcggtcttgattagttcctttcaaagtttattttacacgattcagaggcaacacttacatctcttttttttttttttttttttttttttaaraaaaagagtctcactgtgttgacccaggctggcctcgaactcctggcctgggctcaagcagtcctcccacctcagcctcctgaatagctgggaccacgggcgtgtgccatcttgcctggctccatcttatgtctatacattcatttcaggggataagaataaaagtagaggtaacaaaatggcctaaatatacccatcaaataaacaggttgataaattttaaagagtttgttctggtaactgtgaattgaagctgagaatgcactggacagaggaatattaaaagctggcaagagggaaggtaaggtaccaggcattaag

SEQ ID NO: 690552 - DNA, 670 bp, Homo sapiens
tacatactttcatgtacatgtaatttagcccttccaaaataaggcctgtttatattccccgtgttgctaatgaagaaataaagagttaggtatgtagaatgactatgtaagacagccactgagcagaactaaggttctcagttctcagactgacatggaggtgagatataccaagttcagttcttaaaaaacttttaaaaatccagaatgcatcatgtattttacccataaaatagtcctgtttttgagaacttacttcggtcttgattagttcctttcaaagtttattttacacgattcagaggcaacacttacatctcttttttttttttttttttttttttttaaaaraaagagtctcactgtgttgacccaggctggcctcgaactcctggcctgggctcaagcagtcctcccacctcagcctcctgaatagctgggaccacgggcgtgtgccatcttgcctggctccatcttatgtctatacattcatttcaggggataagaataaaagtagaggtaacaaaatggcctaaatatacccatcaaataaacaggttgataaattttaaagagtttgttctggtaactgtgaattgaagctgagaatgcactggacagaggaatattaaaagctggcaagagggaaggtaaggtaccaggcattaag

SEQ ID NO: 690553 - DNA, 632 bp, Homo sapiens
tgtagattgaacctgagtccaggcagtgccatgccaaagttacacttcttactgatctgccctatagcaaatgatctgttgtataaagtaaccctggacattggcaattgatggatattctacactgggatcaagttccttcaggaggggtaaagcgagtcccaactctccaaatcttgttggcttagctagattccctgctcttctggactgcatgtcactggctatactttcagcatcctcacataaggatcaataccccaagacctgcatgagtcctcctaggactttcttctggggatttaggggccctactgttgtaaacaggactcaagtagtcaactataaaatcccagaaatcccagaactcctcaaagtgagtatgcagattaacmctttgtttgttttgcttgttcgttttgcttgtttgttgtctctattttaatcaaaccctagaaattcagaatgagaatatcctcaaattgataatactattggaagcaggtgagggaatttcagagacagtgaggtttatcctacagttctgacccagagtccattagcagtaacctgactgccccataaatgacctcaaccatcttagcctagtggtctccatggtaaccatcaaa

SEQ ID NO: 690554 - DNA, 608 bp, Homo sapiens
tgtagtaggctaaagaaggcagcaaactctttcctatgccttctcccattaaaagatgaagtctggaaaaaaaaaaaaatcgcttgaacccgggaggcagaggttgcggtgagccgagatcaccccattgcactccagcctgggcaacaagagtgaaactctgtctccaaaaaaaaaaaaaagtgaagtctatttacccctcctttaatctgggttaggcctgtggttcactttgaccaataggacacagtagaagtgatactagggcagaagaagacttgtagcttctggctggctctcttcgaatgcttgttcttgggacatccctctgggaacacaaccttcccgtggggaggctatgtgtaggcaggtgctctagatgacagcccaggtgacagccccaggtccgcactcgttcaataaagttttgctctactgtgcttggacatccagctcagtagagtcttcagaagactacagccacagctgacatctawctgcaactgcatgagagacctcacgtgagaatcacccaatggagctctgtcaaccctaggatcacaagcaaccatagtaaagtgttgttttcagccactctgtgttgggat

SEQ ID NO: 690555 - DNA, 664 bp, Homo sapiens
gttacataaataatacattgttttttgcacatgagtaatccaaaatgtatttaatttggtcacataaaatatttagtagagaaagttaagtattcgcatggtttataatatgatataacctgtttcttttccacaatttttcaatataatagcatccttactgttaaaagaatattattttaatatttggagatatccatattcttcaatctattgcattttggagaaaaatatgacttattttgcaaggttatttctggagagatagctactgtcttatatttttagaatatgtttatgccagagttagattataatttaccaaaatgttaagtataaaaaggccaactaaaaataaaagtatctgatgtggttgtggtagagattattttgtactgtggatacatatgcaggacacatgagagagaaactggtattttcccttaattgccartggcctaactggactagagctgagaagaagtaaacaaaaaactaaggctttgatgctttctaaactggattagttctatttgacattagatcttattgacaaaacaaacaaacaggcaaaaaaagccccttctttttatttgtttattataatttcaccttcaatgcagcttgattaatcttccctcagataattgtttttaaatttgac

SEQ ID NO: 690556 - DNA, 664 bp, Homo sapiens
gttacataaataatacattgttttttgcacatgagtaatccaaaatgtatttaatttggtcacataaaatatttagtagagaaagttaagtattcgcatggtttataatatgatataacctgtttcttttccacaatttttcaatataatagcatccttactgttaaaagaatattattttaatatttggagatatccatattcttcaatctattgcattttggagaaaaatatgacttattttgcaaggttatttctggagagatagctactgtcttatatttttagaatatgtttatgccagagttagattataatttaccaaaatgttaagtataaaaaggccaactaaaaataaaagtatctgatgtggttgtggtagagattattttgtactgtggatacatatgcaggacacatgagagagaaactggtattttcccttaattgccaatggcctaactggactagagcygagaagaagtaaacaaaaaactaaggctttgatgctttctaaactggattagttctatttgacattagatcttattgacaaaacaaacaaacaggcaaaaaaagccccttctttttatttgtttattataatttcaccttcaatgcagcttgattaatcttccctcagataattgtttttaaatttgac

SEQ ID NO: 690557 - DNA, 664 bp, Homo sapiens
gttacataaataatacattgttttttgcacatgagtaatccaaaatgtatttaatttggtcacataaaatatttagtagagaaagttaagtattcgcatggtttataatatgatataacctgtttcttttccacaatttttcaatataatagcatccttactgttaaaagaatattattttaatatttggagatatccatattcttcaatctattgcattttggagaaaaatatgacttattttgcaaggttatttctggagagatagctactgtcttatatttttagaatatgtttatgccagagttagattataatttaccaaaatgttaagtataaaaaggccaactaaaaataaaagtatctgatgtggttgtggtagagattattttgtactgtggatacatatgcaggacacatgagagagaaactggtattttcccttaattgccaatggcctaactggactagagctgagaagaagtaaacaaaaaactaaggctttgatgctttctaaactggattagttctatttgacattagatcttattgacaaaacaaacaaacaggcaaaaaaagccccttctttttatktgtttattataatttcaccttcaatgcagcttgattaatcttccctcagataattgtttttaaatttgac

SEQ ID NO: 690558 - DNA, 632 bp, Homo sapiens
tctaaatacctggcctagtaaaacccaaaacacataagtatcttggaactgacagaagtcaaaacataatccagaaatttaaagttttttagttgttctcctatagtagaaaaaagaagcatggaaatctgaatctattatacactgattcctatacaaatataagtaaatgtrcttttgaaatgatacatctctctctggagaaagcttctgattggtatgctattgggcactgtcaatggctttgtcttgctaagtgtttacatcagtaacttagatgtacatgcataggacattcttatcaaatataggctggatacaaagctggaagtgccaaagaataagatactctacctactgcaggcatttaacataaatagatgcaattgactaagcagggataaattaaaagtcctgtgtttataagcaaagaatccaatttcacaagtatacaacatgtgagtcatagcttagcgtgtttggatgcaatgctgatagatcacacagcaacattaagcagagtacgaaagtccagattccacaacctaacttgagaactgtggtgacatcgtaaccgacccagaggcaaacatgaacttcaaaccatcaaaacatcaaagcacagtctccag

SEQ ID NO: 690559 - DNA, 674 bp, Homo sapiens
tttgtctataagagttgaaccagccttgttcctaagcaagtacagccatataacttctaattggagaatgtgtgggagcagctaagtgctcaggtgtccaatcggacaagcatagattggaatttggacttccgtgtgtatcagctctatgaactttgaccaggactcaatctttctgagcccccatttccccgtcagtaaaatggagatttataaaatggtttgaagacaaatgagctaattttgttacacattgtttggcatatattaaatggtatagctattttctacaaaagacagaacacagtatggaatttgttgtagattttggcacttttttatttgtgcaagttaattttggtatccacatttggattacactgtttttatacccatgtgaagtagatcacacctttccaactgattaatgccgttttagaatacacatactattattttgagaggaaaaataatggtagtagtctgatcgtcatgttcataagggaaaaaagagaagctgaagtgtgtgtctaccaaagcccaaacrtttccactgctgctcaattcacaacccagacgagattgaaacagcagggtcattagggtctccaaaggaagaaaattccatgtttatttctgatttattgatttcttccattattccagcttctggg

SEQ ID NO: 690560 - DNA, 315 bp, Homo sapiens
ttaagccaagtttcttaatgtagaaattcaatggtctctaacacacgggtatctctctctctctctctctctctctctatctctctatctctctctcacatacacacacgtgcatacatacccatgaaagtttccaagtccttctcatcttaacacctgctgccttttgtgaaattrttaaatggtgctattttctaaagtggctggtgagcttctctgttgatcacatttctcagttgaggactaagaccctgtatatgccaggtcagtgtcacataaaaatccaacagaagttccattggcctgactacttga

SEQ ID NO: 690561 - DNA, 990 bp, Homo sapiens
tagaatgaaaacaatggaatcttctatcaaatgccattagctcaggactcggagtgtcatggagaagacgtctaaaccatttggcccactcaaatgaaggacaagaatgttctttcctgtggcaccaaggccaaggaatcattggttaaataaaattaggtgtaagatgctgagtaaagttgaagtcctgaacttactttgattatttgcatgggtgaacctgatgaggactcacctcctaatgacaaagcccattaatagggattgtttggttttggaggcaagagatggaaagctgataaagtcrgagaaattaagaaaatcacgctaagtgattttgttcatccatggtggagcttttagaaacaaacaaacaaaaagcaaacagaactcttcttctgagaagcatagtaacttcttcctttcctttctgtactgcaggtatttatactgtagttattttttaaaagatgtgaagattctgtgtaatgcaaaaattcacaacatatcacagccaatgccccaagcaaacaaaaggggaaagtttttagctcctacatgtttcctgtgagattttgaaatacaacttcagactactaattacagtgaagttagatgaaaccaaagggctaaccattgtgttgattcaatttcacaagggactgaggtttcagtgagaattcaattcattttatttcttctgcaggttaagttactgtaagtatagagtggattctggtaacatatgtctatgtttttttcattggatgagttttgcaaagttgcctcagagaatttccaaattgaaaagaagagatgtgtattggtagtttttatagacagagtgcacctaaatacagaaactgtatctagatcaacacaaatctctcaccacccatgggaaataattcaagagtgtatgctagaccaatagtgggtcaggaacattatcttcataagaaagatagcacattatacttacttctgatt

SEQ ID NO: 690562 - DNA, 559 bp, Homo sapiens
tcacaattcctcacatttcctttacatttggcaaaggaatcagacaataaatttttatgggaaagtattattcttggcaataaagataacactgtatttcaagtcatayattcttagggttaagtaagagtttttatttttaactatattttaatttttatactaagagatttaaatgtgtttttattatagttgcagctcaaagttggttttactttgaagcatttcctgaacttcaaggcagaggcaaatattccaactatgatattccccaaattatacaaatatgtctattactatactgattatatttattatgttgattgattatagtcattttgagcataggctttttcctgtttgatattacaaccctaaggtaatgcacatgaaggtaggaaatgtattttaatcatttctatatattttatttatttatttatttattgcttaatttaatttaagtttgagttctgggatacatgtgcaggatgtgcaggtttgttacacaggtaaacatgtgccatagtggtttgctatacagatcaactcatcacct

SEQ ID NO: 690563 - DNA, 645 bp, Homo sapiens
gattccatactcttggctttccttgaggtgtctgaattgttccttgtaaccaggaaacttgtcatgctattactaagagccatgcattctcctggtcaaggtattagttttcttgtttacatttctctataacatagcatacagtcataatccaggatatacccttcatgtgtctgattaatttgagttccaggttatctaaatgggcttcacctaaggaagagcaatcacactacaggaggtttttctttagctttttggtaattggccttaaaaatatataytttttacattttatgaagataatacctgcattgtctttattaagttttttattatttaggaaaactgggctttaaagaggttaaggttttaatatccatgcaactttctgtactgcttttgagccttttatcactctggataataacttattttatagtgactggtgattctgtttttttaaattatttttatttttttaatttttttttaaagacaggatcttgctgtgttgcccaggctggtgttgaacttctggcctcctgcactgaccacccaaaatgttgggattacaagcatgaaccaccatgggggctggggcctgtgattgggttttgatcaattgttttgaaccttttaatg

SEQ ID NO: 690564 - DNA, 2066 bp, Homo sapiens
gctttaaaagctggctacatttgacccacttttgtttgtttggttggttggttagttggtttatctatttatttttcattgtattttttaaatttatttttagagatggagatctcactatggtgcccaggttggtcttgaactcttgggctcaagtggtcctcctgtctcagactcccaaagtgctgagattacagacgtaagccaccacgcctagcctgtttgttttttaacgagaaaattattccttttctgttcatgaaaacatgttgatgagtcttcttaagctataaaaggtgagcctaaatagaaaatgagctgcataacataggaacaggaatttggggattgttcccttacagaataagacgtaaggagccgggcatggtgcctgtaaaatcccagcacttcggtaggccgaggcgggcagattgcttgagcccaggcatttgagaacagcctgggcaacacagtgagacctcatcaaccttgtctctactaaaaataaacaattagccaggtgtggcagtgtgygcctatggtcccaactactagggaagctgacacaggaggatcacttgagccgggaggtcgaagctgcagtgagccaagattgcaccactgcactctagcctgggcaacagagtgagaccctatgttaaaaaaaaaaaaaaaaaaaaagacgtaaggacggtgtggtctccaagccttggagaagaggaaagatggagacatctctcccaaggagaatagaacccagctacaaggctgtgatgtgcaatctagaaagtacctggtgaagaagtggtccagagtgaaggtagggcagcaattgcctcttctgagcttctgtgcatcagcattttcttaagtgtctcccgtgacactcattgatgagcccattgaatcttcaaaataaacatgaaataaatggaagtagaaaaaaagcagaaagtgaagcatgctatctgtctgagctgttttctaattcccctctatgattcctaattccttagtaaatgtcccttatctgcacaagtgttattggtgctttgaggatttcaggaaaaggaactgtacatactgttgataaagcaaatcaaaaatagcagccatcacaattcccattgcaggagggttggcaaatggagagatgaaaatgcaccaagagcaggaatacagagtaagaagcaaacaagagaatacaagtcctcccactccctgccccaggatcctctgagacttttgaagaggctgctggacttcccagcatgtgaagtagatgagttccagctattttatttgactatcctagcagaggttggtagtacccttaccttacccacttcagtgaataacacctgctggtttacaaatgccaggcccttcattttctggtttggggctttctcttctcactgcagcctttttgatgacgattgcagtgggatggaagaacaggggaatcaaagcacagcctccgcttgcacctcagagcaaccctcaaccaatgactgatgggagccagtatataaataccccagctcccttgccactaatgaggggccaactctgagctgtacttttacatttgcttcagacatttccctctgggtgaagctctagtcactcttggtgacagctggcttgataaagcacctttaattggctgccttccctccccagtctcactacccccaacccctctgttcacttcccaaataaaacatctgcttcaaattccttgtctcaagatctacttctggtggaacccaaactaagacatattacatgaaagagcaactctatgaagctgaagaacttgggaacattcagatgacacctggggaatctgatgaagcaggaaatccttctcagactccatgtaagcctcaaacaggattcagcataacttacatgtgtgaatgtttccatactagcggccctttccatgcccaaatgcaaatctctttccacttgcaaatgacctcaagtgttctttcttgcggggtgaaccatctgctctactcctaaaaaaatccaatagaagaagccagatggagtcc

SEQ ID NO: 690565 - DNA, 549 bp, Homo sapiens
cactactttaatatttttactacattatagaatgtttagaaaaatgagaaaggcaaaacaaagaaaaagaaacatcaccagtaattactccagccagataccatcctaaatgacatttggaggccatgtctcccctgctggggtttcccttgacygtatgatgactgacactagaaagttcacccctccccaatctgacccgtatacgaatggctcaaagccttgttaagaccacccttgggagaatacgaggcagtgagtgagtacaacgtcaataaaaggaatactcagggtcatttaagagggcaagcgtggcagggttggagtggggagggatattatttctacctagaacctgtgtcctcacctggcccgcagcctgagactgtaagactctaaggaatacgggggacttagtggggctctagactaagcgggagacacaggccaggggcttgagagtcaaggcatctgactttgggaggccaagggacccagagaaagaaaagtcagggtgctcggagtagaggtcagtgagacctgggtttg

SEQ ID NO: 690566 - DNA, 643 bp, Homo sapiens
gctcaaagaataaccatcccaaaattaagtagctaaagtggtagactgcacagtcatctcactccagggcctgggcacttaaccatcaccattctatactgcccatctgggtcctcagctctggttgtttggaaaaggccttccttcaacctagaaaatatgtacaattgataaatccccrtaagtcaactttaaattaaactaggactaacaaaataaatcaatacttatcaatccctgagcatagacgcaatgaaacactatttctttttctttttctctttttgagatggagtctgcactgtcgcccaggctggagtgcagtggcgtgatctcagctcactgcaagctctgcctcctgggttcacgccattctcctgcctcagcctcctgagtagctgggattacaggcgcccgccaccatgcccagctaattttttgtatttttagtagagatggggtttcaccatgttagccaggatggtctggatctcctgacctcatgatccgcctgtctcggcctcccaaagtgctgggattacaggcgtgagccaccatgcccagccgcaatgagatactatttctaaaactaagaaaagattcctagatcttttaaaatcctatgaaaatttttacacaaaaa

SEQ ID NO: 690567 - DNA, 643 bp, Homo sapiens
gctcaaagaataaccatcccaaaattaagtagctaaagtggtagactgcacagtcatctcactccagggcctgggcacttaaccatcaccattctatactgcccatctgggtcctcagctctggttgtttggaaaaggccttccttcaacctagaaaatatgtacaattgataaatccccgtaagtcaactttaaattaaactaggactaacaaaataaatcaatacttatcaatccctgagcatagacgcaatgaaacactatttctttttctttttctytttttgagatggagtctgcactgtcgcccaggctggagtgcagtggcgtgatctcagctcactgcaagctctgcctcctgggttcacgccattctcctgcctcagcctcctgagtagctgggattacaggcgcccgccaccatgcccagctaattttttgtatttttagtagagatggggtttcaccatgttagccaggatggtctggatctcctgacctcatgatccgcctgtctcggcctcccaaagtgctgggattacaggcgtgagccaccatgcccagccgcaatgagatactatttctaaaactaagaaaagattcctagatcttttaaaatcctatgaaaatttttacacaaaaa

SEQ ID NO: 690568 - DNA, 1192 bp, Homo sapiens
ctaaatgaaatgaatgatgcttacctgttaattataacaggcctagaaggcccgtcccttgaaatgttttattaactttaaaccctgttcttctaagtgctcacaattatgttacataattgtgtaacataaactctgtaactgagtttataattcatactgtcccccaaccagcagttcaaaaaggggagttttactaagagctattaactgagactgagtagtgcagagtccagcttgaagaaaaccttggatccttgctcaggaagagagacgtgagctctctgaaagagggcggtggtmgcagtaaaaaaagctttcaataggaaggaagcaaatgacttaggtaaaatattggtatagtcatcaaataacaaactagaggaaattgtggggtgggtcaggaaaaaggttaactgaaaagaccttcaaagtggatgtaaacaacctgactagagtaaatgaacttgtgggtctgggttgccataagcaaaaatctgatgagtatgagaaaatggacagcacaagtacttaaaagacctggtgatattcacgcttttgatagcttttggtcattttgtaagctttaaatcttgcagaggaggttggccccagagaaactaaatacagatatctggagcaggtttaccctgaaacttgcagatagaatggagacacattaacgttagcctggcctcataatggggtgggaaacctgttttactatatggcagttctgccagtaagtacccctgttatcttggtctaaaagcattttatacttcaattaaaaaacacatatttgccgggcacggtggctcatgcctgtaatcctagcactttgggaggccaaggcgggtgaattacttgaggtcaggagttcgagaccagcctggccaacatggtgaaaccccatctctactaaaaatacaaaaaaaatttagctgggcatggtggtatgtgcctgtaatcccagctatcaggtaaacagaactggtatagttaattatagcagtaaataggaggctgaggcacaagaatcccttgaacccaggaggcggaggttgtagtgagccaagattgagccactgcactccagcctgggtgacagagtgagaccttgtctcaaaaaacaaaacataaataaacaaaaaaaccacatatttgctttagttcaggttgaaaatatatc

SEQ ID NO: 690569 - DNA, 636 bp, Homo sapiens
cagcagttcaacattcccttgaactcccatggtttctcattcagttaatttggtatgggacctgaacatttctatttttaacaagctctcaggtgcttctaatactgctggtccagagactacatttygaaaactgatgcactaatccaactcccttaaatgataaatgagaaaactagattggaacctagagagaaatgggttgcaatgtaggcattctatttgctagagcaatacccatagcctccttcaagccaaggcttatttctcttctttcatgaagcttctccaagcaaaggcagcatgaggaagaacaaaggaagagaacttagtaaagcaaaggcagcaccagtaaatgaggatagatctgatgtaaaatttgtggattaaataaaaagatttacttgttttaaagatctccagggggaagtgagaggttctataatctcccttgctaacttcttccacatctaaaaacattattcaggacattcctgctacaaacttaagcccattttccattgctaatgaggcattctatattatactactaaggagctgatgttggaaaataaatgtgtctatgaagtaaccacattttaaaaaacaaaattgaaataaaaataattaaatgca

SEQ ID NO: 690570 - DNA, 855 bp, Homo sapiens
gaacggttctgtcctgctggtgtttcaggcaccactggggtgtgaaaaaaaaaaaaactgcagatagctcagtgtctgcccaaatggctgcccagttttgtgcttgaaacccagggccctggtggtgtaggcatccgagggaatctcctggtctgcaggttgcaaagaccatggggaaaatgtagtatctgggccagaatgtacagttcctcacagtacagtccctcctggcttcccttggctaggggagggagttccctgaccccttgcacttcctgggtgaggcaacaccccaccctgttttggctcaccttccatgggctgcacccactgtctaacgagtcccagtgagatgagttgggtacctcagttggaaatgcagaaatcaccctatacctataccattctttcctagaactatacagctttgatttgctcttaggcagaagtttgtatagttgccagcttaggatctttctcatatgcaaagtggattaatataattttttattagattttactgtatttgtggctttcacttttctcctactgccagaaagtgacagaggactagacggaccccttccacactgccccacttcactgcagcctcttttccttccattcccaatcttgaagaaaactagattttaggaatgaaacatctgtaggtttaaaaagtaaattagcacagtaggaaaagtctgttgtgtagrgatggacagagttaggtttgaatgactgccatttaggagccgctcaaccttgggtatgttgtttaccttcccaagattttgtcaggtgcaaatgacaaaagaaacccaactgaaaccaccctaggcaagaacttaagtt

SEQ ID NO: 690571 - DNA, 884 bp, Homo sapiens
aacaactcttttacattccrttttgtaaaagatgaccttgaaattgaccacaattaatttcctgtggtcatacagctcagaagtgatagcagcagaattcaaacctaagcctgactctgaatcatccactctttagggcatgtactgattcctctgaagaagtctaacagatgaaggtggaaaagtaaagagaagaaaatatgttttacatttggacatttttgctgaattatagctcaaattgaacttcaccagttgtcatcaaatgattaccatgaagtatatttttatacatattatgtgttgaacatctaacatagttcttaaaaagtataaaaatatttttccccaaatacgcttttacttattactttaaatttatacttttttattgtgccaccaagcattattgattacttactactctgctagtagcattgcacttattctcatcttatacagactattatgagataagttgattttcctctttcacactttgaaagaagacaataggaaaggacaaccttttctgtcttttcaagaatagaaagaaaaatctaacctttgtgctactaaaattcttctttgttaactacatgattactgactaaggagtctgctatcattttttaaaagttcaaagaaactaagagtatttctgggcaatttcaatatctgtccctgaaaagtctgaactttattccttcccagaaggtccacccctacatttattaggcctttggcaaaagtacaaatagaaatacacaccataaatttaaatatttgttatcaatcaaactgttaaataatacatactcttatgtcttcccttgacaaatatagctttataataacttagatgaccatgttagaacttctgg

SEQ ID NO: 690572 - DNA, 884 bp, Homo sapiens
aacaactcttttacattccattttgtaaaagatgaccttgaaattgaccacaattaatttcctgtggtcatacagctcagaagtgatagcagcagaattcaaacctaagcctgactctgaatcatccactctttagggcatgtactgattcctctgaagaagtctaacagatgaaggtggaaaagtaaagagaagaaaatatgttttacatttggacatttttgctgaattatagctcaaattgaacttcaccagttgtcatcaaatgattaccatgaagtatatttttatacatattatgtgttgaacatctaacatagttcttaaaaagtataaaaatatttttccccaaatacgcttttacttattactttaaatttatacttttttattgtgccaccaagcattattgattacttactactctgctagtagcattgcacttattctcatcttatacagactattatgagataagttgattttcctctttcacactttgaaagaagacaataggaaaggacaaycttttctgtcttttcaagaatagaaagaaaaatctaacctttgtgctactaaaattcttctttgttaactacatgattactgactaaggagtctgctatcattttttaaaagttcaaagaaactaagagtatttctgggcaatttcaatatctgtccctgaaaagtctgaactttattccttcccagaaggtccacccctacatttattaggcctttggcaaaagtacaaatagaaatacacaccataaatttaaatatttgttatcaatcaaactgttaaataatacatactcttatgtcttcccttgacaaatatagctttataataacttagatgaccatgttagaacttctgg

SEQ ID NO: 690573 - DNA, 884 bp, Homo sapiens
aacaactcttttacattccattttgtaaaagatgaccttgaaattgaccacaattaatttcctgtggtcatacagctcagaagtgatagcagcagaattcaaacctaagcctgactctgaatcatccactctttagggcatgtactgattcctctgaagaagtctaacagatgaaggtggaaaagtaaagagaagaaaatatgttttacatttggacatttttgctgaattatagctcaaattgaacttcaccagttgtcatcaaatgattaccatgaagtatatttttatacatattatgtgttgaacatctaacatagttcttaaaaagtataaaaatatttttccccaaatacgcttttacttattactttaaatttatacttttttattgtgccaccaagcattattgattacttactactctgctagtagcattgcacttattctcatcttatacagactattatgagataagttgattttcctctttcacactttgaaagaagacaataggaaaggacaaccttttctgtcttttcaagaatagaaagaaaaatctaaccttygtgctactaaaattcttctttgttaactacatgattactgactaaggagtctgctatcattttttaaaagttcaaagaaactaagagtatttctgggcaatttcaatatctgtccctgaaaagtctgaactttattccttcccagaaggtccacccctacatttattaggcctttggcaaaagtacaaatagaaatacacaccataaatttaaatatttgttatcaatcaaactgttaaataatacatactcttatgtcttcccttgacaaatatagctttataataacttagatgaccatgttagaacttctgg

SEQ ID NO: 690574 - DNA, 884 bp, Homo sapiens
aacaactcttttacattccattttgtaaaagatgaccttgaaattgaccacaattaatttcctgtggtcatacagctcagaagtgatagcagcagaattcaaacctaagcctgactctgaatcatccactctttagggcatgtactgattcctctgaagaagtctaacagatgaaggtggaaaagtaaagagaagaaaatatgttttacatttggacatttttgctgaattatagctcaaattgaacttcaccagttgtcatcaaatgattaccatgaagtatatttttatacatattatgtgttgaacatctaacatagttcttaaaaagtataaaaatatttttccccaaatacgcttttacttattactttaaatttatacttttttattgtgccaccaagcattattgattacttactactctgctagtagcattgcacttattctcatcttatacagactattatgagataagttgattttcctctttcacactttgaaagaagacaataggaaaggacaaccttttctgtcttttcaagaatagaaagaaaaatctaacctttgtgctactaaaattcttctttgytaactacatgattactgactaaggagtctgctatcattttttaaaagttcaaagaaactaagagtatttctgggcaatttcaatatctgtccctgaaaagtctgaactttattccttcccagaaggtccacccctacatttattaggcctttggcaaaagtacaaatagaaatacacaccataaatttaaatatttgttatcaatcaaactgttaaataatacatactcttatgtcttcccttgacaaatatagctttataataacttagatgaccatgttagaacttctgg

SEQ ID NO: 690575 - DNA, 884 bp, Homo sapiens
aacaactcttttacattccattttgtaaaagatgaccttgaaattgaccacaattaatttcctgtggtcatacagctcagaagtgatagcagcagaattcaaacctaagcctgactctgaatcatccactctttagggcatgtactgattcctctgaagaagtctaacagatgaaggtggaaaagtaaagagaagaaaatatgttttacatttggacatttttgctgaattatagctcaaattgaacttcaccagttgtcatcaaatgattaccatgaagtatatttttatacatattatgtgttgaacatctaacatagttcttaaaaagtataaaaatatttttccccaaatacgcttttacttattactttaaatttatacttttttattgtgccaccaagcattattgattacttactactctgctagtagcattgcacttattctcatcttatacagactattatgagataagttgattttcctctttcacactttgaaagaagacaataggaaaggacaaccttttctgtcttttcaagaatagaaagaaaaatctaacctttgtgctactaaaattcttctttgttaactacatgattactgactaaggagtctgctatcattttttaaaagttcaaagaaactaagagtatttctgggcaatttcartatctgtccctgaaaagtctgaactttattccttcccagaaggtccacccctacatttattaggcctttggcaaaagtacaaatagaaatacacaccataaatttaaatatttgttatcaatcaaactgttaaataatacatactcttatgtcttcccttgacaaatatagctttataataacttagatgaccatgttagaacttctgg

SEQ ID NO: 690576 - DNA, 691 bp, Homo sapiens
tgtcatttttgccagctggtgtagatgttaaaaattactgtcactcttccgcctgctactttattttgcacctgctgttacttgagttacaggcatttcacacatggtaatttaataaggttagttcccatgacaatgtactagatattatcccattgagggttaaagyggttttataaggtcttgagggagaatcactaaatataaaacttgagattaaaaatttaataccttgcagacatcacatttttctaattaaaaatttttaaaggagtatagaagaaatgacatttagtcacatatcccaaaacaaaaatgagacttttatgattgaattatttgtaccagtcaacttctctacatagtgtcatttgtaattaaaacaaacatttttaattgcctggtataacacctgcagataaatatatattaagagctgtgaacagtggttcaatatagtagtcaagagacatgttactatttaaattcgaatttaaattaattaaaaggaaacaattaaaattcaattcctccatcacatgggccacgtttcagatgttcaattgctgcatgtggctagtagttaccatataagacagagcagatatagattttccttttcacagaaagttctactggatgaggctgtgatatttccaattcctggtcttaggtaaacttggccttaaag

SEQ ID NO: 690577 - DNA, 1057 bp, Homo sapiens
tccatcttaaaatttataaattgttcaaccttgaaaattctgcctacatattcactttgggattgttatttttggttataaaaataggtgaatttgtatcaagtagagaattgtaaacataagcagaaatataatgttcataaatacaaggcaaagtagaaattaaaggataccaaattgcaagtcagcaaagctggttcctagtcccatcttattccccaaatatctaaccttggatggttctcctaaattttcctggatttaatttatcatttctgagatgctgtggctgtgaatcataaagttctggaaggctgtacaatatttataaagaatctgcacatttgcattgatatcaaacattatctacaaacatagtaaactactggtgcactactatcagtctgagtatagtcaggatcacaaaggccatgaaagataatttaacagaggaaatttaatgaaggaaatagtcacaaagatgttgaggaggtgaaaagccaccagggtatggaaagaagcccagagtttaacagcagcattagctgttttgtaccagcatcagttgaagtaaacttccaaacattcgcactctttctttcatagacctaaggacattaaagaagaaaaaaatcctccctaaacatttggagtattcttcgtaagttgcttaatatcagtaagattaaaaggtaagtagtgtggctcacgcctgtaatcccagcacttgggaggtcaaggcgggtggatcacgaggtcaggagttasagaccatcctgaccaacatggtgaaaccccatctctactaaaatacaaaaaaattagctgggcgtggtgcacgtgtctgtagtcccagctacttgggaatctgagggaggggagttgcttgaaccaggagacagaggttgcagtgagaggagatcatacaactgccctccagcctgggcaacagagtgagactccgtctcaaaaaaaaacaaaaaaaaaacaaaaaaaaagtgagtagtggaataattcaggacttgaagaagcacaccactggctcatgacagtgaca

SEQ ID NO: 690578 - DNA, 1057 bp, Homo sapiens
tccatcttaaaatttataaattgttcaaccttgaaaattctgcctacatattcactttgggattgttatttttggttataaaaataggtgaatttgtatcaagtagagaattgtaaacataagcagaaatataatgttcataaatacaaggcaaagtagaaattaaaggataccaaattgcaagtcagcaaagctggttcctagtcccatcttattccccaaatatctaaccttggatggttctcctaaattttcctggatttaatttatcatttctgagatgctgtggctgtgaatcataaagttctggaaggctgtacaatatttataaagaatctgcacatttgcattgatatcaaacattatctacaaacatagtaaactactggtgcactactatcagtctgagtatagtcaggatcacaaaggccatgaaagataatttaacagaggaaatttaatgaaggaaatagtcacaaagatgttgaggaggtgaaaagccaccagggtatggaaagaagcccagagtttaacagcagcattagctgttttgtaccagcatcagttgaagtaaacttccaaacattcgcactctttctttcatagacctaaggacattaaagaagaaaaaaatcctccctaaacatttggagtattcttcgtaagttgcttaatatcagtaagattaaaaggtaagtagtgtggctcacgcctgtaatcccagcacttgggaggtcaaggcgggtggatcacgaggtcaggagttacagaccatcctgaccaacatggtgaaaccccatctctactaaaatacaaaaaaattagctgggcgtggtgcacgtgtctgtagtcccagctacttgggaatctgagggaggggagttgcttgaaccaggagacagaggttgcagtgagaggagatcatacaactgccctccagcctgggcaacagagtgagactccgtctcaaaaaaaaacaaaaaaaaaacaaaaaaaaastgagtagtggaataattcaggacttgaagaagcacaccactggctcatgacagtgaca

SEQ ID NO: 690579 - DNA, 1521 bp, Homo sapiens
tctttaaattttctttttaacttcttcattgacccattgattgttcaggaacacagttatttaatttccatgtatttgtttattttctaaaatttgtcctgttattcatttctagtttcataccattgtggttgattaaacagrgacttgatatgatttcaatttttttaagtttgttaagacttgttttgtggcctaacatacgttctatcctggatcttgaaccactacagacatttcaatagttgaggaaaaagtacacagaagaaatctaatacacaaaggtaaaccttaatacagaaaataaactcactgtttgggaagcgttattacaattaaacatcaggctgttctgacagttcacattttataagacattgagtggtttgatgaaaacctagggattctgattcctaattaaatgcttttttggttctaacattctatgtctattttaaggttatagataatttaaataagttgcctcttagatttgtcactcctaacaccaaaaagatgtctccaaaccttaaaaaaaagagaaataatagttgggaaggattaatgtaaccagtagaatgcatcatcagttttcattaacctcaatagcataatacagcaagatttcttaatgttataatcattaatttttttcttcccataaactggtcctttattttattttcatgaactttttgttcaatgactcacaaatgattattaattttatgttaggagggtattactttatttcttgattacattacttaattacatgactttgagtcaagatatatatttgcctcaacaagctttataatgcttattaaatctttctttaaactttttccctaactaaagagaatacaaattctctttgccctccttttctttctgattagattttatcccctctatttaaaataatgtaactaggcagcaatataatattgtgttggagttttggtttctttgaaactgagttaatatttgatttcccttgagattctgcagttatatttcaaaggcagttaggcataattgtatattttgaacaagaaaaaaaggcaaactttttaaaattttctaaaacttgatcaagtcttaccttctacaatttttaaatgggaatttacttaaaaaccaaaacaagaatgaactattttagtctgaaatatattatttaataaataatttataagttgatatttgaagtgcttaaataaattttgaatttagaagcctatcagcatttataaagttatgattttcatcttttttatatctgctctgtaaagttgtattttaagacctgtgagttctactgtttacacagataaaggagcagtggaaagaaagatgtggacctacagggctgatttcataaattcattatattttctcagggcacttcccatacaatagtcatctattatttgatgtaataatcatcatttttaaatgtgaaatctttaaataaattaatttaccttgctagggattgctttggagaatcaaatt

SEQ ID NO: 690580 - DNA, 1521 bp, Homo sapiens
tctttaaattttctttttaacttcttcattgacccattgattgttcaggaacacagttatttaatttccatgtatttgtttattttctaaaatttgtcctgttattcatttctagtttcataccattgtggttgattaaacagagacttgatatgatttcaatttttttaagtttgttaagacttgttttgtggcctaacatacgttctatcctggatcttgaaccactacagacatttcaatagttgaggaaaaagtacacagaagaaatctaatacacaaargtaaaccttaatacagaaaataaactcactgtttgggaagcgttattacaattaaacatcaggctgttctgacagttcacattttataagacattgagtggtttgatgaaaacctagggattctgattcctaattaaatgcttttttggttctaacattctatgtctattttaaggttatagataatttaaataagttgcctcttagatttgtcactcctaacaccaaaaagatgtctccaaaccttaaaaaaaagagaaataatagttgggaaggattaatgtaaccagtagaatgcatcatcagttttcattaacctcaatagcataatacagcaagatttcttaatgttataatcattaatttttttcttcccataaactggtcctttattttattttcatgaactttttgttcaatgactcacaaatgattattaattttatgttaggagggtattactttatttcttgattacattacttaattacatgactttgagtcaagatatatatttgcctcaacaagctttataatgcttattaaatctttctttaaactttttccctaactaaagagaatacaaattctctttgccctccttttctttctgattagattttatcccctctatttaaaataatgtaactaggcagcaatataatattgtgttggagttttggtttctttgaaactgagttaatatttgatttcccttgagattctgcagttatatttcaaaggcagttaggcataattgtatattttgaacaagaaaaaaaggcaaactttttaaaattttctaaaacttgatcaagtcttaccttctacaatttttaaatgggaatttacttaaaaaccaaaacaagaatgaactattttagtctgaaatatattatttaataaataatttataagttgatatttgaagtgcttaaataaattttgaatttagaagcctatcagcatttataaagttatgattttcatcttttttatatctgctctgtaaagttgtattttaagacctgtgagttctactgtttacacagataaaggagcagtggaaagaaagatgtggacctacagggctgatttcataaattcattatattttctcagggcacttcccatacaatagtcatctattatttgatgtaataatcatcatttttaaatgtgaaatctttaaataaattaatttaccttgctagggattgctttggagaatcaaatt

SEQ ID NO: 690581 - DNA, 1320 bp, Homo sapiens
tttattaacaacctcttgaaaattatttgcagaatctgcatttttggtcatattttttgaagttccacctctttcaagattgataaaaacatatgtttatcttccagaacgaagcctatgttaaggcgaggttcaggacagattcctttgaaaaatgtttctcgagaacttacaagacaaaaaaaaaagaagtactaattgcaaaaaactgaaagcaattacctaaagcttaaatggtgataggtaagatgaaaatcctctgtccccgagaaggaccacaaacatatataaaattatcaaagaggctcaagcttgttaacttgttaataataatttgtagagggccatccgccctaatctgtctccctcacaaatgggctatagcagccttctgctctggaaaacatattttcctatatgccccatccactgaggggctttctcaagcagcaaaggtgcttgaactatacctattggaatcattgagatgatttgttttcactgaaactgtgttttctttttcttttttttgttttttttgctccaagattgttgctgatgattaatctttacaaattttatgtcaggagagcttggcaaatgtagtgccattttcaaatgactaaaaaacataaaattcacttttattaatgatatttttaaaggactctggattcaaattattggaatatttcatgttgacgtttaaaaataatttggctcacaaataaactttttaacctaaagacttttaaaaaatcagatgactgattgtgaaaattagtatcaaaatgtatgatatgtaaaatagactatctgatttcagaattcacacagaaattcaatgggccaaaaattgcccagataatcttgaagaacaaaattggagtgtttatcctatcaagtgtcaattctggagcagaattgacagtccaaaatgatccacagagatatgtttacctaattcatcacaaataatatgtgagagcactaaagtgagaaagcgatggtctyagtaacaaattctatttgaactatcagatatccatgtgagggaaaatagatgttggcacctagatgacacagaaagcaattccatatggattataaatggtatatgtttagctttgtgaaagtaaaacaataaagcttttggaaaatagcataaaaggacatctcttaagtttgggatgagcagagattatcttaaacaggcaacaaaaacattaaatgcaaagaatacaaaggttaagtttagcataaacctgcctccctacgtattttaagttcagactaaaggtttcaccatacatagtgaac

SEQ ID NO: 690582 - DNA, 1320 bp, Homo sapiens
tttattaacaacctcttgaaaattatttgcagaatctgcatttttggtcatattttttgaagttccacctctttcaagattgataaaaacatatgtttatcttccagaacgaagcctatgttaaggcgaggttcaggacagattcctttgaaaaatgtttctcgagaacttacaagacaaaaaaaaaagaagtactaattgcaaaaaactgaaagcaattacctaaagcttaaatggtgataggtaagatgaaaatcctctgtccccgagaaggaccacaaacatatataaaattatcaaagaggctcaagcttgttaacttgttaataataatttgtagagggccatccgccctaatctgtctccctcacaaatgggctatagcagccttctgctctggaaaacatattttcctatatgccccatccactgaggggctttctcaagcagcaaaggtgcttgaactatacctattggaatcattgagatgatttgttttcactgaaactgtgttttctttttcttttttttgttttttttgctccaagattgttgctgatgattaatctttacaaattttatgtcaggagagcttggcaaatgtagtgccattttcaaatgactaaaaaacataaaattcacttttattaatgatatttttaaaggactctggattcaaattattggaatatttcatgttgacgtttaaaaataatttggctcacaaataaactttttaacctaaagacttttaaaaaatcagatgactgattgtgaaaattagtatcaaaatgtatgatatgtaaaatagactatctgatttcagaattcacacagaaattcaatgggccaaaaattgcccagataatcttgaagaacaaaattggagtgtttatcctatcaagtgtcaattctggagcagaattgacagtccaaaatgatccacagagatatgtttacctaattcatcacaaataatatgtgagagcactaaagtgagaaagcgatggtctcagtaacaaattctatttgaactatcakatatccatgtgagggaaaatagatgttggcacctagatgacacagaaagcaattccatatggattataaatggtatatgtttagctttgtgaaagtaaaacaataaagcttttggaaaatagcataaaaggacatctcttaagtttgggatgagcagagattatcttaaacaggcaacaaaaacattaaatgcaaagaatacaaaggttaagtttagcataaacctgcctccctacgtattttaagttcagactaaaggtttcaccatacatagtgaac

SEQ ID NO: 690583 - DNA, 1320 bp, Homo sapiens
tttattaacaacctcttgaaaattatttgcagaatctgcatttttggtcatattttttgaagttccacctctttcaagattgataaaaacatatgtttatcttccagaacgaagcctatgttaaggcgaggttcaggacagattcctttgaaaaatgtttctcgagaacttacaagacaaaaaaaaaagaagtactaattgcaaaaaactgaaagcaattacctaaagcttaaatggtgataggtaagatgaaaatcctctgtccccgagaaggaccacaaacatatataaaattatcaaagaggctcaagcttgttaacttgttaataataatttgtagagggccatccgccctaatctgtctccctcacaaatgggctatagcagccttctgctctggaaaacatattttcctatatgccccatccactgaggggctttctcaagcagcaaaggtgcttgaactatacctattggaatcattgagatgatttgttttcactgaaactgtgttttctttttcttttttttgttttttttgctccaagattgttgctgatgattaatctttacaaattttatgtcaggagagcttggcaaatgtagtgccattttcaaatgactaaaaaacataaaattcacttttattaatgatatttttaaaggactctggattcaaattattggaatatttcatgttgacgtttaaaaataatttggctcacaaataaactttttaacctaaagacttttaaaaaatcagatgactgattgtgaaaattagtatcaaaatgtatgatatgtaaaatagactatctgatttcagaattcacacagaaattcaatgggccaaaaattgcccagataatcttgaagaacaaaattggagtgtttatcctatcaagtgtcaattctggagcagaattgacagtccaaaatgatccacagagatatgtttacctaattcatcacaaataatatgtgagagcactaaagtgagaaagcgatggtctcagtaacaaattctatttgaactatcagatatccatgtgagggaaaatagatgttggcacctagatgacacagaaagcaattccatatggattataaatggtatatgtttagctttgtgaaagtaaaacaataaagcttttggaaaatagcataaaargacatctcttaagtttgggatgagcagagattatcttaaacaggcaacaaaaacattaaatgcaaagaatacaaaggttaagtttagcataaacctgcctccctacgtattttaagttcagactaaaggtttcaccatacatagtgaac

SEQ ID NO: 690584 - DNA, 1102 bp, Homo sapiens
aaaaacacttataaatatgtaaagacaagccacaaagtgggaaaaagtatttataagacacatatctctatccaggacatataaagaactcttacatgccaatagtaaaaaggcaaacttaattaaaaaatatgggcaaaatgtgtgacaaaagaagatacatggatgacaaataagcatatgaaaagttttgcaacatcaaaatcattagggaaacgttaattaaataaaacaccaatacaaacctactagaacaagtaacatttaacwactgctggcagaattgtaccctggtaaaatccagttggaaaacactttctagtacgtacaaaagctcaacatatgtatattacataattcatcaatttcattcctaggagacatatatatatatgtcttaaatagtgttgttttttcaacttttaagctcaggagtacatatatatatgtctatgtctcctaggaatgaaattcctatatatctatatatgtgcgtgtatatatatctgtatgtgcatatagatacacatatataagaattttcatcttagcactattttaatagccagaaatttgaaataactaaaagccctaaaagtccatcaacagtaccatgaataaataaatgttgttatattgaaacatggaatgtgacacagcagtaaaaagaaagaactaaaagctgcatttgatacaggcaagaggcagggagatactgggtagaagagggcggttccctgacaaaggccccaccctcaagcctggaaacccatggcccctaaatcagaacaggcattcctgtttcatgcccaaatgttgcctttcagcctgccatgccaccctgctcaatagccatataaattccaaacccccggctccatgagcagaagataagaagagcagaggagcagaagagcagtgcatcagagaaggagagaagagaaggggcatctgaatgtcacagactgtcagagaggagatcggccactggatggccacactccagggaaagatcatgttcccactccatcccctttccagcttcccatccatcccgctgagagtcacctctatccagcgataaaatcccagcatccaccat

SEQ ID NO: 690585 - DNA, 1102 bp, Homo sapiens
aaaaacacttataaatatgtaaagacaagccacaaagtgggaaaaagtatttataagacacatatctctatccaggacatataaagaactcttacatgccaatagtaaaaaggcaaacttaattaaaaaatatgggcaaaatgtgtgacaaaagaagatacatggatgacaaataagcatatgaaaagttttgcaacatcaaaatcattagggaaacgttaattaaataaaacaccaatacaaacctactagaacaagtaacatttaactactgctggcagaattgtaccctggtaaaatccagttggaaaacactttctagtaygtacaaaagctcaacatatgtatattacataattcatcaatttcattcctaggagacatatatatatatgtcttaaatagtgttgttttttcaacttttaagctcaggagtacatatatatatgtctatgtctcctaggaatgaaattcctatatatctatatatgtgcgtgtatatatatctgtatgtgcatatagatacacatatataagaattttcatcttagcactattttaatagccagaaatttgaaataactaaaagccctaaaagtccatcaacagtaccatgaataaataaatgttgttatattgaaacatggaatgtgacacagcagtaaaaagaaagaactaaaagctgcatttgatacaggcaagaggcagggagatactgggtagaagagggcggttccctgacaaaggccccaccctcaagcctggaaacccatggcccctaaatcagaacaggcattcctgtttcatgcccaaatgttgcctttcagcctgccatgccaccctgctcaatagccatataaattccaaacccccggctccatgagcagaagataagaagagcagaggagcagaagagcagtgcatcagagaaggagagaagagaaggggcatctgaatgtcacagactgtcagagaggagatcggccactggatggccacactccagggaaagatcatgttcccactccatcccctttccagcttcccatccatcccgctgagagtcacctctatccagcgataaaatcccagcatccaccat

SEQ ID NO: 690586 - DNA, 1102 bp, Homo sapiens
aaaaacacttataaatatgtaaagacaagccacaaagtgggaaaaagtatttataagacacatatctctatccaggacatataaagaactcttacatgccaatagtaaaaaggcaaacttaattaaaaaatatgggcaaaatgtgtgacaaaagaagatacatggatgacaaataagcatatgaaaagttttgcaacatcaaaatcattagggaaacgttaattaaataaaacaccaatacaaacctactagaacaagtaacatttaactactgctggcagaattgtaccctggtaaaatccagttggaaaacactttctagtacgtacaaaagctcaacatatgtatattacataattcatcaatttcattcctaggagacatatatatatatgtcttaaatagtgttgttttttcaacttttaagctcaggagtacatatatatatgtctatgtctcctaggaatgaaattcctatatatctatatatgtgcgtgtatatatatctgtatgtgcatatagatacacatatataagaattttcatcttagcactattttaatagccagaaatttgaaataactaaaagccctaaaagtccatcaacagtaccatgaataaataaatgttgttatattgaaacwtggaatgtgacacagcagtaaaaagaaagaactaaaagctgcatttgatacaggcaagaggcagggagatactgggtagaagagggcggttccctgacaaaggccccaccctcaagcctggaaacccatggcccctaaatcagaacaggcattcctgtttcatgcccaaatgttgcctttcagcctgccatgccaccctgctcaatagccatataaattccaaacccccggctccatgagcagaagataagaagagcagaggagcagaagagcagtgcatcagagaaggagagaagagaaggggcatctgaatgtcacagactgtcagagaggagatcggccactggatggccacactccagggaaagatcatgttcccactccatcccctttccagcttcccatccatcccgctgagagtcacctctatccagcgataaaatcccagcatccaccat

SEQ ID NO: 690587 - DNA, 1102 bp, Homo sapiens
aaaaacacttataaatatgtaaagacaagccacaaagtgggaaaaagtatttataagacacatatctctatccaggacatataaagaactcttacatgccaatagtaaaaaggcaaacttaattaaaaaatatgggcaaaatgtgtgacaaaagaagatacatggatgacaaataagcatatgaaaagttttgcaacatcaaaatcattagggaaacgttaattaaataaaacaccaatacaaacctactagaacaagtaacatttaactactgctggcagaattgtaccctggtaaaatccagttggaaaacactttctagtacgtacaaaagctcaacatatgtatattacataattcatcaatttcattcctaggagacatatatatatatgtcttaaatagtgttgttttttcaacttttaagctcaggagtacatatatatatgtctatgtctcctaggaatgaaattcctatatatctatatatgtgcgtgtatatatatctgtatgtgcatatagatacacatatataagaattttcatcttagcactattttaatagccagaaatttgaaataactaaaagccctaaaagtccatcaacagtaccatgaataaataaatgttgttatattgaaacatggaatgtgacacagcartaaaaagaaagaactaaaagctgcatttgatacaggcaagaggcagggagatactgggtagaagagggcggttccctgacaaaggccccaccctcaagcctggaaacccatggcccctaaatcagaacaggcattcctgtttcatgcccaaatgttgcctttcagcctgccatgccaccctgctcaatagccatataaattccaaacccccggctccatgagcagaagataagaagagcagaggagcagaagagcagtgcatcagagaaggagagaagagaaggggcatctgaatgtcacagactgtcagagaggagatcggccactggatggccacactccagggaaagatcatgttcccactccatcccctttccagcttcccatccatcccgctgagagtcacctctatccagcgataaaatcccagcatccaccat

SEQ ID NO: 690588 - DNA, 1102 bp, Homo sapiens
aaaaacacttataaatatgtaaagacaagccacaaagtgggaaaaagtatttataagacacatatctctatccaggacatataaagaactcttacatgccaatagtaaaaaggcaaacttaattaaaaaatatgggcaaaatgtgtgacaaaagaagatacatggatgacaaataagcatatgaaaagttttgcaacatcaaaatcattagggaaacgttaattaaataaaacaccaatacaaacctactagaacaagtaacatttaactactgctggcagaattgtaccctggtaaaatccagttggaaaacactttctagtacgtacaaaagctcaacatatgtatattacataattcatcaatttcattcctaggagacatatatatatatgtcttaaatagtgttgttttttcaacttttaagctcaggagtacatatatatatgtctatgtctcctaggaatgaaattcctatatatctatatatgtgcgtgtatatatatctgtatgtgcatatagatacacatatataagaattttcatcttagcactattttaatagccagaaatttgaaataactaaaagccctaaaagtccatcaacagtaccatgaataaataaatgttgttatattgaaacatggaatgtgacacagcagtaaaaagaaagaactaaaagctgcatttgatacaggcaagaggcagggagatactgggtagaagagggcggttccctgacaaaggccccaccctcaagcctggaaacccatggcccctaaatcagaacaggcrttcctgtttcatgcccaaatgttgcctttcagcctgccatgccaccctgctcaatagccatataaattccaaacccccggctccatgagcagaagataagaagagcagaggagcagaagagcagtgcatcagagaaggagagaagagaaggggcatctgaatgtcacagactgtcagagaggagatcggccactggatggccacactccagggaaagatcatgttcccactccatcccctttccagcttcccatccatcccgctgagagtcacctctatccagcgataaaatcccagcatccaccat

SEQ ID NO: 690589 - DNA, 590 bp, Homo sapiens
tctagccatacaggtctcaacctgaaaatagtttggttcttagagaaaataaaattccccaaatcaaactacttttgacttagttatttgtaacttgttattcttttcaaaattgctaaatattgttatttgccttaatgtaatagaaaaacaaacaaacagaaaaccgaatgtattctgagttaggagacctgagttcyagtgtgatctgtgtttccgggtgaacttggaggaggcgtttacattcccatgtgtcacttggctcatttgtaaacatgagagtggtggattttatgtaagatattccatagcttcagtaaatattggtacagacagttaaagttaggtaaaatagtaaaactgatttaaacatgactacagtgcctgagaaaatttttatgtatgaaacactcactctttaagatgaaaagataaattgccacatacgaaaaaagtatcaaagcaagacaccaagacaggaatcatgccagacagtaaaactgttcatatttataaattttgaatctaaaacataacttgttattttaggaataagcatgagtatttttcatttctaaactgtagctgca

SEQ ID NO: 690590 - DNA, 1379 bp, Homo sapiens
atctttaatgcatactactggtatgtgttatagtttaaaagttgtgtaaaaacaaagcatttacagtttttgccatatgttattgttttctttttctttttttttcttttttgagacacggtctcaccctgtcactcatgctagagtgcagtggtgcgatcacagctcaccacagtctcaaaatcccggggtcaagcaatcccccgacctcagcctcctgagtagctgggactacaggtgagcaccaacatgcccagctaattgatttaatttttttgtagaaacaaggtcttgctatgttgcccaggctggtctcaaactcctgggctcgagcaatcctcctgcctttgcttcccaaagtgtagggattacaggcatgacccactacacccagtcgttaacattttcaaataacatgagacccacaacagctctagttcataaaaattacattgmgatttttcatttatctcagtgtcgtgccatcaactccttgaattatccatgttctctgtactttttaaatagtagaatgctgagaaagcttgtgtctgcaacaaatgtatgtgaattatgtcaataaaaacaatcataaataacttcttagtcaaaatttcttgtcgttattttaagtttgagctttttatgtaaaacatcaagattttacatcaaattaaaaaggctgatgcaatcaaagacatcaaaaaagacttcaagtatcagggtatagtggattgacagataataatctaggcaaggaagttaagaataattggaaaacatcacattagactttgaaacatatattgtgatgcacatgtacatgtgcagtttttcatgtagaaagatggcacaaacgtccttccattaataagaccctaaacttgaatggatttttatttttttatgatcattctatgatcaaaatatacagcccagatgtagctaataacagtattccctatatttcctctcccctttttttttttttttttgagatggggtctcactctgttacccagactgcagtgcagtagtatgatcttagctctcagcttactgcagccttgacctccctgggctcaagtgatccttctacctcagcctctcaagtagctgggactacaggcatgtgacaccatgcccagctaatttttgtattttttgtagagacagggttttgtcatgtttcccaggctggtcttgaactcccagactcaagtgatccatccaccttggtctcccaaagtgctgggattacaggcatgagccactacaccaggccttccctatatatttttaaacaatatacatctgagcattctgaagagagttctttccacctgttatgggctgagttgtgtctcgcacctgcaaat

SEQ ID NO: 690591 - DNA, 1379 bp, Homo sapiens
atctttaatgcatactactggtatgtgttatagtttaaaagttgtgtaaaaacaaagcatttacagtttttgccatatgttattgttttctttttctttttttttcttttttgagacacggtctcaccctgtcactcatgctagagtgcagtggtgcgatcacagctcaccacagtctcaaaatcccggggtcaagcaatcccccgacctcagcctcctgagtagctgggactacaggtgagcaccaacatgcccagctaattgatttaatttttttgtagaaacaaggtcttgctatgttgcccaggctggtctcaaactcctgggctcgagcaatcctcctgcctttgcttcccaaagtgtagggattacaggcatgacccactacacccagtcgttaacattttcaaataacatgagacccacaacagctctagttcataaaaattacattgagatttttcatttatctcagtgtcgtgccatcaactccttgaattatccatgttctctgtactttttaaatagtagaatgctgagaaagcttgtgtctgcaacaaatgtatgtgaattatgtcaataaaaacaatcataaataacttcttagtcaaaatttcttgtcgttattttaagtttgagctttttatgtaaaacatcaagattttacatcaaattaaaaaggctgatgcaatcaaagacatcaaaaaagacttcaagtatcagggtatagtggattgacagataataatctaggcaaggaagttaagaataattggaaaacatcacattagactttgaaacatatattgtgatgcacatgtacatgtgcagtttttcatgtagaaagatggcacaaacgtccttccattaataagaccctaaacttgaatggatttttatttttttatgatcattctatgatcaaaatatacagcccagatgtagctaataacagtattccctatatttcctctcccctttttttttttttttttgagatggggtctcactctgttacccagactgcagtgcagtagtatgatcttagctctcagcttactgcagccttgacctccctgggctcaagtgatccttctacctcagcctctcaagtagctgggactacaggcatgtgacaccatgcccagctaatttttgtattttttgtagagacagggttttgtcatgtttcccaggctggtcttgaactcccagactcaagtgatccatccaccttggtctcccaaagtgctgggattacaggcatgagccacyacaccaggccttccctatatatttttaaacaatatacatctgagcattctgaagagagttctttccacctgttatgggctgagttgtgtctcgcacctgcaaat

SEQ ID NO: 690592 - DNA, 644 bp, Homo sapiens
ggtgacagattttcataataatgttctgaaattcagtgctataaagatggcttagatctacttctactgtacatttctaatttttcactatgatttaaacaatttttaacacatgttacatgaataactaaggcaagcatttcctgagcagagtggatcagtcaaaaatatcctttatcctcttcatttttcaagaggagacaggaatgctatctagaatgccaataaatgaagatgcatttttcttgaggaagccactcaaaatagtaagagagaaagtgtcaaaccaagcatttttagatggtttcttaaaatgcagaacttttgcattaaaatattgacttcataatatgtggttgatttgtttttgttttgttttggagttttgttctcgttgtttgtttttctctgtctcattatcatatccttattttatagcctgtagttaattctattcagtcaaaaaacaaaacaaaaacaacaaaaaatgagcctctctgttggcttgcctgagcagacagacagaactctaaggtctttatcatttctttctttttctcacacctcrcatccaactcacccatattaactgaaaaaatatattccaaatctaacaacttttcagtaccctcaatgcaaatcct

SEQ ID NO: 690593 - DNA, 603 bp, Homo sapiens
tcaaatttccagtgacatgtaataaatgaataaaacacaattccatgcttttaaagtttaatatttcaagcaaccaaatccttttgaatacatatggagcattctattttgctaattcctcatggtttctcatttatactcagtgatgtgcttgactttcactgtaaaactacaaatcacacagaagtcatattcagtcttttatcatccaagattttctgttctcaacaataatatattcacttgtgtggaaagtcttccatcagtaggtcttgaaaagtgcaggatctcaaactctgagtgtacctcagtgaggccactacatataatacataatggcagtatttaggcttgatgcctccaattgttactagacaatatagaattagaaacatcagaaagaactcttttctaaacaaaggagcagctttcaaaatgtcttcaaaccatatctttttttctttctttcttttttttttgaaacaaggtctcactctcttgcccaggatgtagtgtagtgacatgaggctcactgcagcctcaacytcctgggttcaggtaatcctcccacctcaggtccctgagtagctgggactacaggca

SEQ ID NO: 690594 - DNA, 587 bp, Homo sapiens
caaagtgctgggattacaggtgttagccactgcacctggcccaaacctcaccatcttatcaaagtttctacttagaaatcagagtcccttagaaatgatgtaagcctctactccagacttccttctctctcatcttctagtccttttctaggccttgggcaggccagtggacactgctcaggmataccatctattcccatctagggacccttctccttccccacacagtgaatggcacactcctcacagttctgcctattgggaagatcttccctccctactgtctttgagggtcacctctgggtgtgactggaatgcagctatcccctattttcagcagacccttccataagcccacttcaggcctattcctcctcctcgtcctcctcctcctcctccaggtggctatatcatttttgatttaatattttatctggggtgggcagggagcattttcagaggtttccatagtttttccccattgtgattgctcttacccagatcagtaagatgaggaaagaacagcaaagcaaactgagaaggagcattttaaggagaagagagtgatcacctgtgagactgatcca

SEQ ID NO: 690595 - DNA, 587 bp, Homo sapiens
caaagtgctgggattacaggtgttagccactgcacctggcccaaacctcaccatcttatcaaagtttctacttagaaatcagagtcccttagaaatgatgtaagcctctactccagacttccttctctctcatcttctagtccttttctaggccttgggcaggccagtggacactgctcaggcataccatctattcccatctagggacccttctccttccccacacagtgaatggcacactcctcacagttctgcctattgggaagatcttccctccctactgtctttgagggtcacctctgggtgtgactggaatgcagctatcccctattttcagcagacccttccataagcccacttcaggcctattcctcctcctcgtcctcctcctcctcctccaggtggctatatcatttttgatttaatattttatctggggtgggcagggagcattttcagaggtttccatagtttttccccattgtgatwgctcttacccagatcagtaagatgaggaaagaacagcaaagcaaactgagaaggagcattttaaggagaagagagtgatcacctgtgagactgatcca

SEQ ID NO: 690596 - DNA, 3470 bp, Homo sapiens
tataattaacatccaacatggccttggggtatagaaacatttcttaaacaagattcaacaagcagaaattattaagaaaaagtgatccataaatttgactatactaaattttaaattttgcatagcaaaaaaataccaggagataaaaacataagataaagataaggagaaaacattttcaaatataactaacaaggaattaataaattatctttctttaaaacttcctcaagaatgcttatacactatactgctcaggtgatgggtgcaccaaaatctcagaaatcaccacaaaagaatttgtttatgtgaccgacaccacctgttcccaaaaacctatggaaataaaaaattcaaaacattataaaaaatacttatacaccgttggtaggaatgtaaattagttcagccactgtagaaaacagtttggagatttatcaaagaacttaaaacagaactaccattcaacccatcaatctcattactaggtatatatccaaaagaaaagccattctaccaaaaacaygcatgtgtgtgtatgtttatgatagcactattcacaatagcaaagacatggaaccaacctaggtacccatcaatgatggactggataaagaaaatgtggtatatatacaccatggaatactaaacagtcacaaaaaagaaaaaatcatatcctttacaacaacatggatgcaggttagaggctattgtcctaagtgaattaatgcaggaaaagaaaataaaatatcatatgttctcacttctaagagagctaaacactggatgctcatggacataaagatggcaacaagagacacttgggattactaggtgggaaaggatgggagaggggcaagagttgcaaaactaactattggtactatactcactacttgggtgacaggattaatcataccccaaatatcagcatcatgctgtgtacatgtaacaaacgtacacatgtacccccaaatctaaaataaaagtggtaattataaattaaataaaataaatctcccttaaattaataataaaaattaattcagttcacagttgaggggaacagaatggtcaagtaacaaaatgatgcttaactttggtagtaatcaaaaaatgtaaatttttaaaactcctcaaatagacaaaaaatttaaagcccagcaatatcacataatggcagagatgtagaacaataggagctctgatataatgctcatttttatcttttaacaaaaaggctttggagagtaatttagcaaaattctgtaaaagtggagctgtgtatattctaaaacccaagagtctctaggtgtctgttctactgaaaatcttgcatataagcacaacagacatgtacaagggttatatagcaattatttataatagttaaaaattagaaacaacctcaagatgcctcaataagaggatcactgaatcctgttatttaagtggaattatattctatataaaattgaattctattcattcagtgaaatggtacatagtagttaaaatattgatcccaccatatgtgaatcaacagacaaatctcaaaaaccaaatagtgactggaaaaagtatgctgttttttgtaaatgttttttgtgtttaaaacacacaaaaatgttacaaacataacatgttatttagtttaaaatggaaagtgaagagaaatggaaaagaaaatatatgaagtacatatcacaaaaaatatcaaaattgtgtgtgcttgaaatgcttcatgattttttaacataagtgtttaggtacagtctctgcagagatctgaaactactatgggtcagacaaggaagctttccttccatgttcacagtcaatgggctggtgcccaggctagtggggcagttctgccatgtgcaactgagtgtttccatctctaacacccaccactacatctacagaatatgcaatgtagagcaggaaaatgtccaggaggaagtgcgttatgccttttaagggcacaacctgaaattgccacacatttcttcctctcacttcccattggccagaactttgccacttgaccatatcttgtaagagaatgtgagagatgttacctctggctgggaaaccgcatgcccaactaaactctccagttcaattattaaaggaagaagagaagaaggaatacagctggaccattagcttcctccaccacagggtgaatagggtggaaccacgacataggtgcagcactggcatttatagagaggtaacttgtccttttgccttaatctcaggatgcagccccacagcgtccctgctcatctttcttctcatagcttccttgtccctagtcttactcagctccccctcattccaaaagcaccttccacaaacaagacactctgagggactggtggttcaaagatggcatgacatggaccctggcatcaaaagaaaatcacttttatgataaccatgttcaccacaaaaatggcagcatacgtggtttaatctaagcattgggaggtcccgtgagccagccatgggagtctgtgaaagctgccctgtgatgcctttccaggcttcacagagaaagtagccccggaactgaggctaggaaactgaatagggggctgtcagggagatgaatggggttctgaccaaaagaaataaaatacgaaaaggtaagagaatgagaagcataacacgttcagaaaaacaaagaagttcagtgtggatgtaaattaacaaggcagtgaaccggagacaaggctagccaagttaggtggaggtcagatcatggagtttttcattcatgcagagaagctcagactttctcctgcatatgtggagggaaccattaacaaatttagaacgaggaagggacaaaattagatttgctggaaagatcactctcattgcaatgtggagaatgaaccagaatagagacaaaggcagaggagaccattccagggatgcagaaagatgagttcaatttgtgacttgtctggtttgaggtccctgtgggacacccagtggggatggcagtaaatatagtgttggacatccaggcctggagctcgagaaagaagttctggcttccacagtgtgccattccttcagtttgtagtttctggcacagataaagagtttttaagccctagcactctctgcttcctcagttcatggtggctgctctgccactccatgacagtcagaatcctggtattggggcctgtctaccactctagttaagtggccctacattatacagcactgatgacagcatagtgctaggaattcatacctagttaaacaccttactaatggagcaaagtcagccaaagggagacctctggagtgcataccaatctctgtgtttggccctgtcatgtttagcaattttattagacaacatgaagacagacaagccatctttaaccaatttcctggtgatgcaaagatagaagaagcaagtttgtggatgccagaataagaat

SEQ ID NO: 690597 - DNA, 653 bp, Homo sapiens
ccattcctggttttgtttgaacgtccagcgtatatccaaggaagaatgcagaattactcaagtagcttctcctgatggctagtttaggcaaggttcaaggtacaagactagacaagtactgactttatcaagcattgtcaaatagacagttgggtgaaaatcctttccccaaagctctttgttatgatgtctgacttagatgctacaagaatgtgaagtgtttaccaatgctttttctgaaacctttgctccaaagatatgatgatcattaatatgtcctgtcctgccttcttgaggaatgcattaccagtgcttaaatatgaatattgtgcttgtacctcaaaatgacagctcaagaaatgcaaggggactatggtgtcaactgccaatcccaacaagtcatccttccataactggcagcaaatctgcagttgtacaggtctgcagcaacctcaagtcttgcctcctcagaagaaagaatttgtctgaggrgcataaggtagaaggagagactgaagcaagttttatagcagaaatgaaagtttattaaagagcattagaggagcaggaacagaaggaaataaagtacacctagaagagggccaaacaagtgcatggtttgacattttgacttggggttttatatgttggca

SEQ ID NO: 690598 - DNA, 652 bp, Homo sapiens
atttatataattataaccaatgttatgaggctaaagcatgagaagagtgacaggcacagacaagcacttaagtaagaagttgtttgctatggtctatttaatgtattacagtttgagcaagaacagtgttcagatttgtgcacattaattataatattaaagctgacatcgctgagaatatacaacatggcacatgtatacatatgtaactaacctgcccgttgtgcacatgtaccctaaaacttaaagtataataaaaaaaaaagttgwtctgatgaacaactttacaacaggtgtaaatatactgtagaagaccctgaaattgtatatgttttcaagttttgaataaacaacctaactaaaggaaaaaaatagtaaatcaaacctaggttctctaatttgtaaatttctgtctatggcactgggaattatctctgtttaagatatagggattatctctgttgtgggtgacccagacctcactaccagtgccctgccctacagactaagcttaagtataatagggcaggtgcataaggaccaaggaaactctgatgtagagaaaactggtaattggagcaaggtgcaaatagggcaggcagtacttactgcccagccttctgtagccacaactatctgataacttgtgact

SEQ ID NO: 690599 - DNA, 619 bp, Homo sapiens
aacaaatgttttttttaaatactccatgttgctttaactaaagatgtatgtagtgaaagtattaaaatgtcttggtattgtttgaatatttctgaaagttacatgtttgatacttaaaatttacaaaataataacagcagtgatgcaggaaatagaaactgtaaatagcttacaaacaaaaaygttgggccctgatattgtgtcaaaaattgcatgcatgtgcaaattaaacacatatttagacattctctttgttttgtgatcattcttcattcatttcactacagtctcaaactcagagggaattgcggtattccagtttaagcagagaatacaggcattcctgactcagcatggttcccatacacatgaacttcagttaccatggattagttaaataacaactgtcccccaacaacatgattcaaatttcagttaccacggtatattaaatgtgagtaattgcataaagtataaacttcgctgccagctcttcagtccacaaatcactacataaataacagatgtgtaccatgatcagtgaacaatcacatcacttctttcaaagtccgttggtgatcgatcactgagcatttgttattcaggtcacacacagtca

SEQ ID NO: 690600 - DNA, 634 bp, Homo sapiens
ttaatggctcttaatatctaattataatagctgtaaatgccataacascacttgaggtggtgttatgacttttcctcttatttgttcattttccatctgagggaaagattgtgtgacccaggaatttaaaagctgaagatatcactgtccttccaactctgccttttataagtcactggtgactaaaaaagaacaactgatttccctacattcatcaggggatgaaatcagaaagactagattaagagaataaatataatttaaaaattaattgttttttaaagattaattttattaaaatgaaaaataacttttctgcttatatatttaaccaaaccattattgataatttcattggtaaattaatacattaatacatttatattgggagtgaatttgtagacagaagacagatacatatacagaggcagatgctgtttatttatttgatttatacattttgatattgaggtgtgtatacagagacagatatatacagatatataggtatttatcttagagtttctcgaactcagtaccattgctatttctggagtggataattcttcattgtgggaagctgagtggttagtagcttccctggcttctgcccattaggcaggagcagcagtag

SEQ ID NO: 690601 - DNA, 634 bp, Homo sapiens
ttaatggctcttaatatctaattataatagctgtaaatgccataacagcacttgaggtggtgytatgacttttcctcttatttgttcattttccatctgagggaaagattgtgtgacccaggaatttaaaagctgaagatatcactgtccttccaactctgccttttataagtcactggtgactaaaaaagaacaactgatttccctacattcatcaggggatgaaatcagaaagactagattaagagaataaatataatttaaaaattaattgttttttaaagattaattttattaaaatgaaaaataacttttctgcttatatatttaaccaaaccattattgataatttcattggtaaattaatacattaatacatttatattgggagtgaatttgtagacagaagacagatacatatacagaggcagatgctgtttatttatttgatttatacattttgatattgaggtgtgtatacagagacagatatatacagatatataggtatttatcttagagtttctcgaactcagtaccattgctatttctggagtggataattcttcattgtgggaagctgagtggttagtagcttccctggcttctgcccattaggcaggagcagcagtag

SEQ ID NO: 690602 - DNA, 634 bp, Homo sapiens
ttaatggctcttaatatctaattataatagctgtaaatgccataacagcacttgaggtggtgttatgacttttcctcttatttgttcattttccatctgagggaaagattgtgtgacccaggaatttaaaagctgaagatatcactgtccttccaactctgccttttataagtcactggtgactaaaaaagaacaactgatttccctacattcatcaggggatgaaatcagaaagactagattaagagaataaatataatttaaaaattaattgttttttaaagattaattttattaaaatgaaaaataacttttctgcttatatatttaaccaaaccattattgataatttcattggtaaattaatacattaatacatttatattgggagtgaatttgtagacagaagacagatacatatacagaggcagatgctgtttatttatttgatttatacattttgatattgaggtgtgtatacagrgacagatatatacagatatataggtatttatcttagagtttctcgaactcagtaccattgctatttctggagtggataattcttcattgtgggaagctgagtggttagtagcttccctggcttctgcccattaggcaggagcagcagtag

SEQ ID NO: 690603 - DNA, 626 bp, Homo sapiens
gaggcaggcagatcacaaggtcaggagttcgagaccagcctgaccaacatggtgaaacctcatctgtactaaacatacaaaaaaaaaaaattagctgggcatggtggtgcatgcctgtaatccaaactactcaggaggctgaagcaggagcatcacttgaacctgggaggcagaaattgcagtgagccgagagcacgccattgcactccagcctgggcaacagagtgagactccatctcaaaaataaataaataaatamaaagatctttttatctttgcatcttgctaggaagacgatttttttattggcgtaagatggaaatttgcttatgaataaaaggctgtgtacggattcctagtgccaaaaaggtaggttgtttcaatatgtacctgttggctttcaaacccatatgccctcttatataattggctctacgacactagcactagaagtctgaaaactacgtttcccagagactcccttgcctgttggcttgctgtgaattttgtcatttctgggaactagtagaatacccaaagactgaagggaagaaggaagaagcctctgtttatgctcattctccccacctccctccttccaacagtgtcgctgaagtgtttgcatc

SEQ ID NO: 690604 - DNA, 677 bp, Homo sapiens
tttagtactaaatgatgaggcttttagagtgatttttttttaaccacaaaactacattttaaatctttgtttaaaagaaaggccttttcagccaaagcacacatttttgaaagttacacactgaaatctaaaaggtaaatgagaagtttaattagccaatgtcttttcctcttcttaacaatctaaaaaacatatttgctgagcatgcgttaataatccacaagtaatgaattaattctcatgtcagtgggatatccacaaaacctcctttatataactccaaaaatattaatttcccgccacagggcgaggcaaagggagctccctcctctcctgtgcaagcggcctcctcacttgacctttggggccctccrtgaaacatggcagggagctgcagggaggagattgcgctcagcgtgggtggctcattttacaggagcctctaaacccggaggctggggccttagggcatgtcgccacagctttcaaagaccaatctttagcttgaagaaaaagataaattcataacttgcaaactaagaatattgtgtattaagttggtgcaaaagtaattgcagtttttgccattgaaagtaatggcaacccaatgtttacctaccatcaactacgtgtgctttcagttgagttagttaaacgcaattatacaggaattaact

SEQ ID NO: 690605 - DNA, 1344 bp, Homo sapiens
tagctaaaaagtggaaatagcccaaatgtccatcagtagatgaatgggtaaacaaatggtggtatagccatacaatggaatccctacggaatcacacacaaaaaaagaagtactgatatatgctaaaacttggataaaccttggaaacattttgctaagtgaaagaagccagatacacaaagtttcatattttgtgatcccatttatataaaatatctagagttaacccagagagaaaacagattgctggttaccagggctgggtgtgggagctgagggtgggggcggggcaatggggaggaactgcttaatgggtgaggggttttactctggagtgaacgaaatgtttggaactagacagaggtggctgcatccacggtgaatgtactgaatcctattgtcatttcaataggattaattttatgttatgtcagtttcaccccaataaattcgttttcgtttttaaaaagctaatgaagtcttggcactgaaggaataaaaagtacttcattcacaaactaccacaacacacttaacaagctttttagttgaatcaataagttgatgtcattgcttctgagcaggtacacgacatgagttaaataccacgtgtccagattttttaaaactgtggtagacctcttttcaacttgtccattccttctccagtatttccctccatttttatatatgtcatagagcaatatttatcaacagaggaatcagaaaccctagcaggctaatggtacagaatgaaggaaccagcattctttcttcttccccagtagcataaatgccttcagggtcctagttaccattacctttgtctcttgactcacttcataataattactcattttcctttgtttctctctctgccatgatggaaacattatctgtgttgtccaatatggcagacactagccacatgtggctatgaagcacttaaaatgtggctatgtgatggaggaactgaatttttaatattattttactttaatttaaatgttaaggccaggcatggtrgctcacacctgtaatcctaacactttgggaggctgagggaggtggattacctgaggtcaggaattcaagaccagcccggccaacatggtgaaacccgtctctactaaaaacacaaaaattagctgggcgtgatggcgggtgcctgtaatcccagctactcgggaggatgaggcaggagaatcacttgaacctgagaggcagaggttgcagtaagctgagttcgtgccactgcactccagcctgggtgaaaactctgtctccaaaaaaaaaaaaagttaacagcacatgtggctggtaaagtgtgcagaattcatacct

SEQ ID NO: 690606 - DNA, 972 bp, Homo sapiens
ctatagtctatatttaatataacatgcacttaaaaacaatacaaatatttgactcttagattgctaaataatttagggatttggtctttgtaaaatacatattcaactatgctattggatcttctcacttaaagagaatgagttacagaaatttatctctgaacaagagcagctcctctgatggataaaaatactgcaagacaacaccctgtgtatataaaacagtaatggtgattcttccttcactgattatgtacacagagctgtacagaaaaattatctcacatttttgaacatgtagtattcagtctcctagagatatcaagtaaaagaagaatagcaccacagaaatcataattttggttcaggacatatatgcaacaatgtgcataactgtgcacactttttattttattttattttcttagacagggtctcactctgtcacccaggctggagtgcagtggcacaatcttggctcactgcagcctccgcctcttgggttcaagcgattctcatgcctcagcttcctgaggggctgggattacaggtgcacaccatcacatccagctaatttttgtatttttagtagaagcagggttcaccatgttggccaggctggtctcaaactcctgacctcaagtgatccacccacrtcggcctcccaaagtgctgggattacaggcatgagccatggtgcccggccaattgtgcatacctttaaaaatattttccaatgtacatttgttctgctttagattaaacactattttcatagcctgtaaacaaaaaaattataagtattatttgattactcaattgaatattttaataattaaaattttaattttatatatgagacttgtactttccttcagaaaaatatgcatttatattttaaaactaggtaaaaatagataaaaattctaagactttacattactataaacatccatatatatctttcagcat

SEQ ID NO: 690607 - DNA, 972 bp, Homo sapiens
ctatagtctatatttaatataacatgcacttaaaaacaatacaaatatttgactcttagattgctaaataatttagggatttggtctttgtaaaatacatattcaactatgctattggatcttctcacttaaagagaatgagttacagaaatttatctctgaacaagagcagctcctctgatggataaaaatactgcaagacaacaccctgtgtatataaaacagtaatggtgattcttccttcactgattatgtacacagagctgtacagaaaaattatctcacatttttgaacatgtagtattcagtctcctagagatatcaagtaaaagaagaatagcaccacagaaatcataattttggttcaggacatatatgcaacaatgtgcataactgtgcacactttttattttattttattttcttagacagggtctcactctgtcacccaggctggagtgcagtggcacaatcttggctcactgcagcctccgcctcttgggttcaagcgattctcatgcctcagcttcctgaggggctgggattacaggtgcacaccatcacatccagctaatttttgtatttttagtagaagcagggttcaccatgttggccaggctggtctcaaactcctgacctcaagtgatccacccacatcggcctcccaaagtgctgggattacaggcatgagccatggtgcccggccaattgtgcatacctttaaaaatattttccaatgtacatttgttctgctttagattaaacactattttcatagcctgtaaacaaaaaaattataagtattatttgattactcaattgaatattttaataattaaaattttaattttatatatgagacttgtactttccttcagaaaaatatgcatttatattttaaaactaggtaaaaatagataaaaattctaagactttacattactataaacatccrtatatatctttcagcat

SEQ ID NO: 690608 - DNA, 2860 bp, Homo sapiens
taaggctattcagaagaatacttttgttaaacatttggatttttcccttttgtcttcatttaattatttcttagtattgcacaatattaggctacattgccttggtatctctaattaaaaattaaatatcttataatgatatagcttttagggagacttgcaggctaatgatgccgaggcatttctctttgctgttgtcccagacattgcccactcggtttcctaatttagtaacagaaataaaactgtgcacgactgggcaggtttggtatgccggcaccctgccaggaagcatgggtttcttaagcaaatggaccgatggggatttgaggaaaacacagattatgttacatgagctttgcactttgcaaatccctaactatttaaaggaactcggctaacccgctgatacctaaataaagtcagttttgtttaaacatacatacacacaaaatgatatattgtttccttttccaaaattaaaaattacccttcatatttgtgtttttaatttcacattttttgtcaacgtttaaaagctctctcttggttaagtaatgtatgaaaattattgttaattttgttaaattcttttatgtatttgtaatacccttccatatagcataataaaaggagttgataatgtacatatgcattgtgcttctgtgtgaggaaatgaaagaaagttctggcaggttttaaaagaagcctagttttataccttggctctggcaccagcttggctgagtgaccttggtgcctattgtctgtcctgcactgtgagtgtcatgagtgttctgtgtcacgctaacacttcaggttggtctgcagcagtttctttgctgagtgtttgagcacgggctgctttcctatccactgacatgtttccttcttgctggtgcgtcttgtctggcacatctttggtccttttcgggtccattgcctctgagtttggagaagagccttcagccctgaggattagcctgctgcttttctccttcaagccattacgtgtttcttcagcgtctgccattcattgtcagaatggggccagctgttcactctggtgatctttgtttaattgccattagactgtatgtaaacactgggggcaggtaattctgaagcatgttttcattgagagagagagtttatctcatcttttactagacttttggcagatagaaatgaagaattctaatacttgggacactgtgggttgggtagggagaacgatacagggtgcagggtccacatcatgcttaaggcagcactggctacagtgcagaacaaagtggatttaatataaactgaagttgtcaaatcccacggacttgaggaccagtaagatttcccatcccataaatgccatccaaaagtgtgaaagaaagaatactaaacatcaaaaattcttaactgaagtggtcagaacattactaatctttgaaaatagtttttagaaagatctattcctctccttttgaatatctgaataaggcagatagatgcccagtcctagcatcagagaccaaagattctaatcccgttcattcattttttaaaatgtaaaagttgttacatatagaaaagttctcagaccaaaagtatgtactcaataaatttaccttcttcctcatctcatttttctgccttcccagtttatttctatcctcttagagtccacactccatgaagactggctcattgttcctctgccattagccttgcctttgttttcctgacttccaacactcatctcagttttaaagsgaaactaaagatcctgcaattgaaaatcttgttaaggtgcaatatgttatacttgttaacagtaaagacttaattttgtgtgaccttggtcactgtggattccattctggatgtgaggggaagtcactggtggattttgagcagacgagtcctatgatctcatttaggtttaaaagaatgactcagataactgtaaagaggggccagtgatgaaaacttaaacgaggcgccgacaacaaaaactgagacgagttaggaatctgccaaaataaccccagcaagaaatgatgatggcttgcactagagtgttagcagaactgttggtgagaagcagttggattttagtttatttagtgctttataattttcacagtgtctcactcactttcttttaccaacagggcaggttttatccctggttataaataagaattctcgaggctctgagagattatgaatcttacacaacgtgacttagtaaggtagaatcgagacaatgctaggtcttctgattctcagtagtgttttttccaagtcgttaacataaatacttaatctttaaaaaaaaagtctgtttcaaatattttatatgattgaagaaagtaaaatcatgtactagtgacagatcatggtggctcacacctataatcccagcactttgggaggccgaggtaggaggatcgcttaagctaggagttcaagaccagtctgggcaacatagtaagaccttgtctctacaaaagataaaaataaaaaacttagttaggcgtggtggcacgtgcctgtagtcccaactgcttcggaggctgaggtggggggattgcttgactctagaatatttgaggttgcagtgacctatgaacgctccactgcacttcagcctgggcaatagagtgggaccctgtctccaaaaaataaataaatgaataaataatcatgtactagcttataatactatattatttatctctgcataacaaattaccacaaagttagtggcataaaacaacacacatttattatctcaatttctatggatcagcagtctaagcacagcttagctcgatctgcttagggtctcagaaggctg

SEQ ID NO: 690609 - DNA, 2860 bp, Homo sapiens
taaggctattcagaagaatacttttgttaaacatttggatttttcccttttgtcttcatttaattatttcttagtattgcacaatattaggctacattgccttggtatctctaattaaaaattaaatatcttataatgatatagcttttagggagacttgcaggctaatgatgccgaggcatttctctttgctgttgtcccagacattgcccactcggtttcctaatttagtaacagaaataaaactgtgcacgactgggcaggtttggtatgccggcaccctgccaggaagcatgggtttcttaagcaaatggaccgatggggatttgaggaaaacacagattatgttacatgagctttgcactttgcaaatccctaactatttaaaggaactcggctaacccgctgatacctaaataaagtcagttttgtttaaacatacatacacacaaaatgatatattgtttccttttccaaaattaaaaattacccttcatatttgtgtttttaatttcacattttttgtcaacgtttaaaagctctctcttggttaagtaatgtatgaaaattattgttaattttgttaaattcttttatgtatttgtaatacccttccatatagcataataaaaggagttgataatgtacatatgcattgtgcttctgtgtgaggaaatgaaagaaagttctggcaggttttaaaagaagcctagttttataccttggctctggcaccagcttggctgagtgaccttggtgcctattgtctgtcctgcactgtgagtgtcatgagtgttctgtgtcacgctaacacttcaggttggtctgcagcagtttctttgctgagtgtttgagcacgggctgctttcctatccactgacatgtttccttcttgctggtgcgtcttgtctggcacatctttggtccttttcgggtccattgcctctgagtttggagaagagccttcagccctgaggattagcctgctgcttttctccttcaagccattacgtgtttcttcagcgtctgccattcattgtcagaatggggccagctgttcactctggtgatctttgtttaattgccattagactgtatgtaaacactgggggcaggtaattctgaagcatgttttcattgagagagagagtttatctcatcttttactagacttttggcagatagaaatgaagaattctaatacttgggacactgtgggttgggtagggagaacgatacagggtgcagggtccacatcatgcttaaggcagcactggctacagtgcagaacaaagtggatttaatataaactgaagttgtcaaatcccacggacttgaggaccagtaagatttcccatcccataaatgccatccaaaagtgtgaaagaaagaatactaaacatcaaaaattcttaactgaagtggtcagaacattactaatctttgaaaatagtttttagaaagatctattcctctccttttgaatatctgaataaggcagatagatgcccagtcctagcatcagagaccaaagattctaatcccgttcattcattttttaaaatgtaaaagttgttacatatagaaaagttctcagaccaaaagtatgtactcaataaatttaccttcttcctcatctcatttttctgccttcccagtttatttctatcctcttagagtccacactccatgaagactggctcattgttcctctgccattagccttgcctttgttttcctgacttccaacactcatctcagttttaaagcgaaactaaagatcctgcaattgaaaatcttgttaaggtgcaatatgytatacttgttaacagtaaagacttaattttgtgtgaccttggtcactgtggattccattctggatgtgaggggaagtcactggtggattttgagcagacgagtcctatgatctcatttaggtttaaaagaatgactcagataactgtaaagaggggccagtgatgaaaacttaaacgaggcgccgacaacaaaaactgagacgagttaggaatctgccaaaataaccccagcaagaaatgatgatggcttgcactagagtgttagcagaactgttggtgagaagcagttggattttagtttatttagtgctttataattttcacagtgtctcactcactttcttttaccaacagggcaggttttatccctggttataaataagaattctcgaggctctgagagattatgaatcttacacaacgtgacttagtaaggtagaatcgagacaatgctaggtcttctgattctcagtagtgttttttccaagtcgttaacataaatacttaatctttaaaaaaaaagtctgtttcaaatattttatatgattgaagaaagtaaaatcatgtactagtgacagatcatggtggctcacacctataatcccagcactttgggaggccgaggtaggaggatcgcttaagctaggagttcaagaccagtctgggcaacatagtaagaccttgtctctacaaaagataaaaataaaaaacttagttaggcgtggtggcacgtgcctgtagtcccaactgcttcggaggctgaggtggggggattgcttgactctagaatatttgaggttgcagtgacctatgaacgctccactgcacttcagcctgggcaatagagtgggaccctgtctccaaaaaataaataaatgaataaataatcatgtactagcttataatactatattatttatctctgcataacaaattaccacaaagttagtggcataaaacaacacacatttattatctcaatttctatggatcagcagtctaagcacagcttagctcgatctgcttagggtctcagaaggctg

SEQ ID NO: 690610 - DNA, 1220 bp, Homo sapiens
tcttttgtgttttctggtaccaagacctcatagtttgacttttatgaatttctagtatatattgtacttgataaacttagatgcctttttttttcattaaaatatatcccattgaaacttgggtttgcttcaattatgcaggtcaatttgaaaatagcttctatctttatagaactattttatttgttcttaaatatgcgtctctgcctattagcttcttgaatgtcctttaatgaaattttgcagatgtctctttcttactctgtctctctgtcttaaatgcttttcattatgtttgttcaaaatattatgttcttttgtttctgttatgaattatatcattttttgccattatgtttctaagtgactctttgttgtattaaagaatttgtcacttgtcttactctgttttctgttgctcagaacagaatacctgaaatttatgagtaaaaagaatttcttttttacggttatagaggctaagtactccaaagttaaggggccatgcatggtgagagccttcttgctggtggggaatttcaacagagttccgaagctgcctagagtatcacatgatgagggggctgtgtgttagctcaggtctctctcacccttcttataaagtcaccagtcctattctcatgataacccattaatccatgagtggattaatccattcatgagggcagagccatcaggacccaatcacctcttaaaggctccacctttcaatactgacacgttggggattaagtttcaaaatgagttttggagtggacaaacattgaaatcatagcatcacccccattcaaagttctttagttctaccaaattttctgagtccttgcttttttttcttgcaaataattatatatgcaaataatgtgggctcctttgcttttcccttatctatattttactttgttttgttagttgtataatgtgacaacaactacttttacaattagttgcataatgttgcaactaataaagtattttatttataattctaataaagtatactttattagttgcacttctgaaacaaatctaagtaactctcagtggtgtggactkctgtggtgttgtttccaggctacagttcagaagtgtgcaaatgtgagcaacatatggaaacatatcatgtgcaggcttgtgtctgcctccagcaggactctcctaagtactgagctgcaaagaaatatatactatattgtatc

SEQ ID NO: 690611 - DNA, 643 bp, Homo sapiens
ggataaaaacctaatgcacgtggggcttaatacctaggtgatgggttgatagatgcagcaaaccaccatagcacacgtttacctatgtaacaaacctgcacattctgcacatgtattctggaacttaaaataaatttaaattaaattaaaaaaagaaaagaaaaatattttcacattcttttatatgtgttgtaagcaagagacatacagagaggtacagcactttgtaagttgacaagaactgacgtaactgaagttgttaagactatcacttatccatagcctatttgaaacttctaacataagtggcttcaaagcaaatacgtcaaatcacacactgacttgttgattttgttaactgtgctatacaaataagctaaaccatgcacttctaggaaatggaaaatctaaataaaccaatactgtaartattatattaacataaaattatatttttctgtcacatagttgcatgaaattttcccaagattttagaagaaaagctttaaggttttaatttaataataaatatagcacaagacatattacttcagtgataaattgaaacaagagtaataggttaaaatgctgctttttgcataatattttaaatgaagctctaatttattgtttacagttcaaa

SEQ ID NO: 690612 - DNA, 640 bp, Homo sapiens
ttatctcctagatgtttctctttctcgctctctctctctttctctctacccatctcttatatttccagtgctcgcttttactcttaggtagcccagagcacactctgccttgcatcatattggccaatgcaatgagcacataagctccttgagggttaacatgcaattccttatgcaatatattctccacagaatcttgtacagggctctagaaatattaaatgttgaataaattactgccgcgttgcatttaaaatgtaaactcttgcactgaacgaagtttgaaaagagttagaaattgtgaaatcgagttattaaatactaaagaattcaccagagaaaatattgcagccagagtatacatcctcagaggccatattcggaaaccacttggtctttttytaagacacagtcattatttttatagctgggaaagcctgagaaaatgtcctagttcaacatatcacctttttcatagaccgatgccaagctgaaataaattctatgaaaaaataaatattccaacgtgaactagaaaaatgcccttttcttgatccttgtgagttttttttcttagcattgatctttttcctttagttttgtgtactatggtgttagaaaaaataggcacagatgattg

SEQ ID NO: 690613 - DNA, 640 bp, Homo sapiens
ttatctcctagatgtttctctttctcgctctctctctctttctctctacccatctcttatatttccagtgctcgcttttactcttaggtagcccagagcacactctgccttgcatcatattggccaatgcaatgagcacataagctccttgagggttaacatgcaattccttatgcaatatattctccacagaatcttgtacagggctctagaaatattaaatgttgaataaattactgccgcgttgcatttaaaatgtaaactcttgcactgaacgaagtttgaaaagagttagaaattgtgaaatcgagttattaaatactaaagaattcaccagagaaaatattgcagccagagtatacatcctcagaggccatattcggaaaccacttggtctttttctaagacacagtcattatttttatagctgggaaagcctgagaaaatgtcctagttcaacatatcacctttttcatagaccgatgccaagctgaaataaattctatgaaaaaataaatattccaacgtgaactagaaaaatgcccttttcttgatccttgtgagttttttttyttagcattgatctttttcctttagttttgtgtactatggtgttagaaaaaataggcacagatgattg

SEQ ID NO: 690614 - DNA, 612 bp, Homo sapiens
cgccctatcggccaggctggtctcaaactcctgacctcaggtgatccgcctacctcccaaggtgctgggattaaaggcgtgagccaccgcgcctagcatatgtttatttttaatttagaactcatcgtggcttgtctatatacattgraataatgatgtgacacacaaactgttgtgaaaaatgtcagttactttgaatgtaagcattttttccaaaatcacttatgtgtctaaaccaattccttctataaatcagtaagaaaatgataaaacaattcaacaggaaaatgaacaaaggccagaaaactcagagaagaaacacaaatgttcaataaacatataaagatactaaattaaattcatgagtaatcagaaaaattcacatttagatggaatcccttttattcatccataacttcagcaaaaagttggagaatacccagcggtgaaaaggtgttgggaaatgaatgctgtcatattctgctgacaatagagtaagttggcacaaaatttttgaaggcaactaaaattttatatctacatagtcttcaccccaagaattccatttccagatatctatgctacaggaatacttgcacatgttcacaaaga

SEQ ID NO: 690615 - DNA, 612 bp, Homo sapiens
cgccctatcggccaggctggtctcaaactcctgacctcaggtgatccgcctacctcccaaggtgctgggattaaaggcgtgagccaccgcgcctagcatatgtttatttttaatttagaactcatcgtggcttgtctatatacattgaaataatgatgtgacacacaaactgttgtgaaaaatgtcagttactttgaatgtaagcattttttccaaaatcacttatgtgtctaaaccaattccttctataaatcagtaagaaaatgataaaacaattcaacaggaaaatgaacaaaggccagaaaactcagagaagaaacacaaatgttcaataaacatataaagatactaaattaaattcatgagtaatcagaaaaattcacatttagatggaatcccttttattcatccataacttcagcaaaaagttggagaatacccagcggtgaaaaggtgttgggaaatgaatgctgtcatattctgctgacaatagagtaagttggcacaaaatttttgaaggcaaytaaaattttatatctacatagtcttcaccccaagaattccatttccagatatctatgctacaggaatacttgcacatgttcacaaaga

SEQ ID NO: 690616 - DNA, 536 bp, Homo sapiens
  misc_feature 3, 4, 5, 6, 7, 8, 9, 10, 11, 12, 13, 14, 15, 16, 17, 18,19, 20, 21, 22, 23, 24, 25, 26, 27, 28, 29, 30, 31, 32,33, 34, 35, 36, 37, 38, 39, 40, 41, 42, 43, 44, 45, 46,47, 48, 49, 50, 51, 52, 53, 54, 55, 56, 57, 58, 59, 60,61, 62: n = A,T,C or G
  misc_feature 63, 64, 65, 66, 67, 68, 69, 70, 71, 72, 73, 74, 75, 76, 77,78, 79, 80, 81, 82, 83, 84, 85, 86, 87, 88, 89, 90, 91,92, 93, 94, 95, 96, 97, 98, 99, 100, 101, 102: n = A,T,C or G
atnnnnnnnnnnnnnnnnnnnnnnnnnnnnnnnnnnnnnnnnnnnnnnnnnnnnnnnnnnnnnnnnnnnnnnnnnnnnnnnnnnnnnnnnnnnnnnnnnnnntcagataagtcagccaatatattaacacagaaactgttcatttccaccaaaagctgagtcagtatggcagaatgaataagatacaatgaaatcaggaagatacagtttaaaatcttgagtctgccactaactcccactgtaacattgggcgagttacttaaatttctctgaatctcaattatcttaattgaaaattgatttaactttatcttttaaagttgtgagaagagttaaatgaaaaatcaaataaaaaacatcaaaaacgatatgtggtaacttctttaactgccaaataagtcactgcccagtgctctcacctgaatgcataagcacatcttcaaactcaacgtcgccaayccacttcttgagaaaaatacctcatgaccaacattgggaatcaccagtagttcatcattctctgctatcttatgtca

SEQ ID NO: 690617 - DNA, 890 bp, Homo sapiens
gaaagattgcaaaacataatcactgtacattctgacggataagtgaaaaaagttctggaattttcttcaatagaaaatgttaagaggacaatatattgtcaattggtaaggttctttttggggaaaactgaatacaggcagcaacataaatccaatgatttaagatttctatctcaacacattttgaaaatctccacctctatgcttttatcattttaaaaattaaaattcttctatttttcaaaatgtatctttttcataagtttattcttattctattctttttataaagatttaattgcttactatagagcagtagtactcacattttagtgtgtaaaagaaagaagtgaggggcttatttaagagagacattckgaggcctgatgcctagagagtttaattttaaactttctggaatggtccagaaatctatattttattagttatccaagtgattctgaaggaagcagtaagatctactttgaaaggtccactttgaaagcataactgattcctctgaactccttaaaagaatggagaggaatatcttagagtcataacctacttaagactaaaacttttaagaaggcaaatcctcaagacccacttgcccgattttccaaataacaatttccaaaaggtagaggatacaggtcaatgtgacttggctatctgtatttactgatcgataattaccaaagttaggcccctgtcctcacacagactgggaaagaggggctctgtctgtcttgatgatggcctgttaaggggatggctcccagacttttttctttttcttttctttttttttttttttttttttttgagatggagtctcgctctgtaacccaggctggagtgcagtggcataatcttggctcatggga

SEQ ID NO: 690618 - DNA, 890 bp, Homo sapiens
gaaagattgcaaaacataatcactgtacattctgacggataagtgaaaaaagttctggaattttcttcaatagaaaatgttaagaggacaatatattgtcaattggtaaggttctttttggggaaaactgaatacaggcagcaacataaatccaatgatttaagatttctatctcaacacattttgaaaatctccacctctatgcttttatcattttaaaaattaaaattcttctatttttcaaaatgtatctttttcataagtttattcttattctattctttttataaagatttaattgcttactatagagcagtagtactcacattttagtgtgtaaaagaaagaagtgaggggcttatttaagagagacattcggaggcctgatgcctagagagtttaattttaaactttctggaatggtccagaaatctatattttattagttatccaagtgattctgaaggaagcagtaagatctactttgaaaggtccactttgaaagcataactgattcctctgaactccttaaaagaatggagaggaatatcttagagtcataacctacttaagactaaaacttttaagaaggcaaatsctcaagacccacttgcccgattttccaaataacaatttccaaaaggtagaggatacaggtcaatgtgacttggctatctgtatttactgatcgataattaccaaagttaggcccctgtcctcacacagactgggaaagaggggctctgtctgtcttgatgatggcctgttaaggggatggctcccagacttttttctttttcttttctttttttttttttttttttttttgagatggagtctcgctctgtaacccaggctggagtgcagtggcataatcttggctcatggga

SEQ ID NO: 690619 - DNA, 890 bp, Homo sapiens
gaaagattgcaaaacataatcactgtacattctgacggataagtgaaaaaagttctggaattttcttcaatagaaaatgttaagaggacaatatattgtcaattggtaaggttctttttggggaaaactgaatacaggcagcaacataaatccaatgatttaagatttctatctcaacacattttgaaaatctccacctctatgcttttatcattttaaaaattaaaattcttctatttttcaaaatgtatctttttcataagtttattcttattctattctttttataaagatttaattgcttactatagagcagtagtactcacattttagtgtgtaaaagaaagaagtgaggggcttatttaagagagacattcggaggcctgatgcctagagagtttaattttaaactttctggaatggtccagaaatctatattttattagttatccaagtgattctgaaggaagcagtaagatctactttgaaaggtccactttgaaagcataactgattcctctgaactccttaaaagaatggagaggaatatcttagagtcataacctacttaagactaaaacttttaagaaggcaaatcctcaagacccacttgcccgattttccaaataacaatttccaaaaggtagaggatacaggtcaatgtgacttggctatctgtatttaytgatcgataattaccaaagttaggcccctgtcctcacacagactgggaaagaggggctctgtctgtcttgatgatggcctgttaaggggatggctcccagacttttttctttttcttttctttttttttttttttttttttttgagatggagtctcgctctgtaacccaggctggagtgcagtggcataatcttggctcatggga

SEQ ID NO: 690620 - DNA, 890 bp, Homo sapiens
gaaagattgcaaaacataatcactgtacattctgacggataagtgaaaaaagttctggaattttcttcaatagaaaatgttaagaggacaatatattgtcaattggtaaggttctttttggggaaaactgaatacaggcagcaacataaatccaatgatttaagatttctatctcaacacattttgaaaatctccacctctatgcttttatcattttaaaaattaaaattcttctatttttcaaaatgtatctttttcataagtttattcttattctattctttttataaagatttaattgcttactatagagcagtagtactcacattttagtgtgtaaaagaaagaagtgaggggcttatttaagagagacattcggaggcctgatgcctagagagtttaattttaaactttctggaatggtccagaaatctatattttattagttatccaagtgattctgaaggaagcagtaagatctactttgaaaggtccactttgaaagcataactgattcctctgaactccttaaaagaatggagaggaatatcttagagtcataacctacttaagactaaaacttttaagaaggcaaatcctcaagacccacttgcccgattttccaaataacaatttccaaaaggtagaggatacaggtcaatgtgacttggctatctgtatttactgatcgataattaccaaagttaggsccctgtcctcacacagactgggaaagaggggctctgtctgtcttgatgatggcctgttaaggggatggctcccagacttttttctttttcttttctttttttttttttttttttttttgagatggagtctcgctctgtaacccaggctggagtgcagtggcataatcttggctcatggga

SEQ ID NO: 690621 - DNA, 1072 bp, Homo sapiens
gtgagccaagatcgcgcaactgccctccagcctggtgactgaatgagactccgtctcaaaaaacaaaaaaacacaaacaaaaacaaaaaaaggatgagttcatatcctttgcagggacatggatgaacctgtaaaccatcattctcagcaaactaacacaggaagagaaaaccaaacattgcatgctctcacttataagtaggcattgaacaatgagaacacgtgaacacagggagggaaacatcacacactggggcctatgcgggggtgtagggctaggggaggagtagcrttaggagaaatacctactgtagatgatggtttgatgggtgcagtaaaccaccatggcacgtgtatacctatgtaacaaacctgcatgtcctgcccatgtatcccagaacttaaagtataataaaaaaatatgtattttaactttgcacttgggtatgtgtatatatatgtatatgggaagaaattgtgcctactacacaattgcacacataatttgagttctgtgatttcagtataaattacaggggtatgacagtgtaagaatatttatggttaacagcttttgttgatatttttttctgccagaagaagttttcttgttcaaattcatttcttgtgaagaatagggttataaatgtaaaggctgtggcagggaaattgagttaatgatgaaataaggttagagagaaataaggcttagagaaaaattggcagtaggtctttttgaaaaacagggttgtacgtttattttttaatcaatagagataataaagggaagttttttacaataatttgatgaatttggaattttgaaaatgttactgaaaacaagcatctgtcttttaatttgtttttatatttctgtcagatttatcagacttgccattattattcagtatttactatagaaagatgttcatatttaagatccggtatattagttttatctcttgcctctgagacagcctgcacagatagtaaactaaaaaaaaaaaaattaacaatataggcaattttaaaagtaaaagaaataaagcaaatgcatgttgggaaaaaaaga

SEQ ID NO: 690622 - DNA, 1072 bp, Homo sapiens
gtgagccaagatcgcgcaactgccctccagcctggtgactgaatgagactccgtctcaaaaaacaaaaaaacacaaacaaaaacaaaaaaaggatgagttcatatcctttgcagggacatggatgaacctgtaaaccatcattctcagcaaactaacacaggaagagaaaaccaaacattgcatgctctcacttataagtaggcattgaacaatgagaacacgtgaacacagggagggaaacatcacacactggggcctatgcgggggtgtagggctaggggaggagtagcgttaggagaaatacctactgtagatgatggtttgatgggtgcagtaaaccaccatggcacgtgtatacctatgtaacaaacctgcatgtcctgcccatgtatcccagaacttaaagtataataaaaaaatatgtattttaactttgcacttgggtatgtgtatatrtatgtatatgggaagaaattgtgcctactacacaattgcacacataatttgagttctgtgatttcagtataaattacaggggtatgacagtgtaagaatatttatggttaacagcttttgttgatatttttttctgccagaagaagttttcttgttcaaattcatttcttgtgaagaatagggttataaatgtaaaggctgtggcagggaaattgagttaatgatgaaataaggttagagagaaataaggcttagagaaaaattggcagtaggtctttttgaaaaacagggttgtacgtttattttttaatcaatagagataataaagggaagttttttacaataatttgatgaatttggaattttgaaaatgttactgaaaacaagcatctgtcttttaatttgtttttatatttctgtcagatttatcagacttgccattattattcagtatttactatagaaagatgttcatatttaagatccggtatattagttttatctcttgcctctgagacagcctgcacagatagtaaactaaaaaaaaaaaaattaacaatataggcaattttaaaagtaaaagaaataaagcaaatgcatgttgggaaaaaaaga

SEQ ID NO: 690623 - DNA, 1072 bp, Homo sapiens
gtgagccaagatcgcgcaactgccctccagcctggtgactgaatgagactccgtctcaaaaaacaaaaaaacacaaacaaaaacaaaaaaaggatgagttcatatcctttgcagggacatggatgaacctgtaaaccatcattctcagcaaactaacacaggaagagaaaaccaaacattgcatgctctcacttataagtaggcattgaacaatgagaacacgtgaacacagggagggaaacatcacacactggggcctatgcgggggtgtagggctaggggaggagtagcgttaggagaaatacctactgtagatgatggtttgatgggtgcagtaaaccaccatggcacgtgtatacctatgtaacaaacctgcatgtcctgcccatgtatcccagaacttaaagtataataaaaaaatatgtattttaactttgcacttgggtatgtgtatatatatgtayatgggaagaaattgtgcctactacacaattgcacacataatttgagttctgtgatttcagtataaattacaggggtatgacagtgtaagaatatttatggttaacagcttttgttgatatttttttctgccagaagaagttttcttgttcaaattcatttcttgtgaagaatagggttataaatgtaaaggctgtggcagggaaattgagttaatgatgaaataaggttagagagaaataaggcttagagaaaaattggcagtaggtctttttgaaaaacagggttgtacgtttattttttaatcaatagagataataaagggaagttttttacaataatttgatgaatttggaattttgaaaatgttactgaaaacaagcatctgtcttttaatttgtttttatatttctgtcagatttatcagacttgccattattattcagtatttactatagaaagatgttcatatttaagatccggtatattagttttatctcttgcctctgagacagcctgcacagatagtaaactaaaaaaaaaaaaattaacaatataggcaattttaaaagtaaaagaaataaagcaaatgcatgttgggaaaaaaaga

SEQ ID NO: 690624 - DNA, 630 bp, Homo sapiens
tacagacaattagctgggcttggtggcatgtgcctctagtcccagctactcaggaggctgaggccggagaatcgcttgaacccgagaggccgtgagccgagattgcaccactgcactccagcctggcgacagagcgagactccgtctcaaaaacaacaataacaacaaaacacacaaacaaaaaaactagccacaaataaaagcagaggaaattgttatctttataaattaagaaatcaattcccaagcacaataaagcaaacatccaagctattattgtttttatgccataacactagcccaaggtgttggtggattcaattgyatacaatttatttttcataatatagccaccttggatgtgtttattgtgacaatattttttacaaatacatgtaaagagcaagaagttaaattggactaaattactatattcatgataaatgtagaatacctattgcggtggttttaaaatatgcccacatattctttgacatttcccccttcagaagatgaagactaattgctctgtccttgaatatatgcttgacttaacgactgacttctaaaatactaactgaaattaacaaattaacaaataaaaatggcagaagtgacagtgtataactc

SEQ ID NO: 690625 - DNA, 1671 bp, Homo sapiens
ttattagcatcctggcagaggattgcattctgcaccctgaactgggcaatcccttctgatgaatcctggaagctaagattgtaaaaattggggtaaattccccttcccattctcatttatatttttttaatgttgttaattcaaagctagttatttcatggagtttagcataaaaggaactaaaatgtgtcttttaaacaggtaaaaaaaaagtgaaagaaagaaaaacaaagaaagaaagaataaaaggcctacagtgtgttcgacaagtgggctgtgttagcatacaccctgaagtgttaaaacaaaaaagaatggaagaaagagagaggaagggatggacagaggaggaggaaagtcaagaggaagaaaagaaggaagagagggagatgggaaagaaagaagcaaggaggaaaaagagaacttctattacgcaaaccagtttctgataggtcacatagctaccaatgaaagctaaaatctaaataaagcttaaaaattaaaggacttactaggctacttattctaattcttcagatccactttcttaactcaagagtttgagaagtgcctactattgttcacttcaggtgcttttgaaaagcagtgattttattttaaaaccagtttgagtagacccttatctttcttcctccttgtttttgcaggaaatttcaatgaaaagaaaagccaatggattgtggtcttagaaaagctgcttagatgatgtctgtttcccgtgctatagacacgtggcagagctgtaagtaaatgctcggcactgcatgatgaattggatggctgcagaccggagacaaaaaaaataattgtctcattttcgtggtgatttgcttaactggtgggaccatgccagaacggctagcggaaatgctcttggatctctggactccattaataatattatggattactcttcccccttgcatttacatggctccgatgaatcagtctcaagttttaatgagtggatcccctttggaactaaacagtctgggtgaagaacagcgaattttgaaccgctccaaaagaggctgggtttggaatcaaatgtttgtcctggaagagttttctggacctgaaccgattcttgttggccgggtaagctttgtttttaagatctcaatttcagggtctgttagtggtcttaagatgtttaataccagactctttttaattgtgaccacacttagctgtaaattgttcaagccagatgtttagtgagtttacctgtcgttctgttaggaatacgattaatcccaaggtaacagttttaaatggtcttgtagggaaagcttctcctaccacctcttccacccggctatcagtaaaatacaacactgcttatataatgcaaaaacaaataaygttttctttctcactcacacgagagagatctcatgccaaaccttttctctagtttatagtacttggaagagatacgcacattttctcagtttgaattcctaccacttcaattactgagagtttattttgttttattttattttaaggctatgcagatatatctaattgcaggtggatatttatcttttttgttttatcatctgctttttcaataattgacctaggatggagaaaaggaagttcttaaagtagatgcttaactgtgcattgtactatttgaaaaac

SEQ ID NO: 690626 - DNA, 1671 bp, Homo sapiens
ttattagcatcctggcagaggattgcattctgcaccctgaactgggcaatcccttctgatgaatcctggaagctaagattgtaaaaattggggtaaattccccttcccattctcatttatatttttttaatgttgttaattcaaagctagttatttcatggagtttagcataaaaggaactaaaatgtgtcttttaaacaggtaaaaaaaaagtgaaagaaagaaaaacaaagaaagaaagaataaaaggcctacagtgtgttcgacaagtgggctgtgttagcatacaccctgaagtgttaaaacaaaaaagaatggaagaaagagagaggaagggatggacagaggaggaggaaagtcaagaggaagaaaagaaggaagagagggagatgggaaagaaagaagcaaggaggaaaaagagaacttctattacgcaaaccagtttctgataggtcacatagctaccaatgaaagctaaaatctaaataaagcttaaaaattaaaggacttactaggctacttattctaattcttcagatccactttcttaactcaagagtttgagaagtgcctactattgttcacttcaggtgcttttgaaaagcagtgattttattttaaaaccagtttgagtagacccttatctttcttcctccttgtttttgcaggaaatttcaatgaaaagaaaagccaatggattgtggtcttagaaaagctgcttagatgatgtctgtttcccgtgctatagacacgtggcagagctgtaagtaaatgctcggcactgcatgatgaattggatggctgcagaccggagacaaaaaaaataattgtctcattttcgtggtgatttgcttaactggtgggaccatgccagaacggctagcggaaatgctcttggatctctggactccattaataatattatggattactcttcccccttgcatttacatggctccgatgaatcagtctcaagttttaatgagtggatcccctttggaactaaacagtctgggtgaagaacagcgaattttgaaccgctccaaaagaggctgggtttggaatcaaatgtttgtcctggaagagttttctggacctgaaccgattcttgttggccgggtaagctttgtttttaagatctcaatttcagggtctgttagtggtcttaagatgtttaataccagactctttttaattgtgaccacacttagctgtaaattgttcaagccagatgtttagtgagtttacctgtcgttctgttaggaatacgattaatcccaaggtaacagttttaaatggtcttgtagggaaagcttctcctaccacctcttccacccggctatcagtaaaatacaacactgcttatataatgcaaaaacaaataacgttttctttctcactcacacgagagagatctcatgccaaaccttttctctagtttatagtacttggaagagatacgcacattttctcagtttgaattcctaccacttcaattactgagagtttrttttgttttattttattttaaggctatgcagatatatctaattgcaggtggatatttatcttttttgttttatcatctgctttttcaataattgacctaggatggagaaaaggaagttcttaaagtagatgcttaactgtgcattgtactatttgaaaaac

SEQ ID NO: 690627 - DNA, 1381 bp, Homo sapiens
taaacttctctgctctctttcctccctttattcctcctacctgggcttctgagctgttccttatttggatgtaactctcttgctggtaatgccacatctatttataattctcttcctccaaggcactgactcattttctctctttaaatttgaccttctaaccttccctctttactgtaacttggaaatcatttgggtggtgcttagtatgaaggacacgggatgccaaataattacactatattacagtttacggtgtctgcgacgggtgagaaaattgcacttgacatgccattattttttgctggctgtttgcatgttaagagcgttggactacgcagtcacagcttaattgtatctttggccttgtgggaacaattcactgtcagttccatgaagcttctacctactcagacagagccttgtgcaccaataatttggcaggaatgcaagtcagcacgcatgtctcaacctggccagacaacaagagttggctccctcttgtccaatgttccgacttagaaataggggtatcccagagctgttggaaatctttggctgctaatataaataatataaataaagagaataatattagtcatttaaattagcagaaattagcagaaaccctaaacacacacatgctcacctacacatgacatgctcacctacacatgcacacacatgcacatggaggatttcttagcttagtttgttcatgagcaaactcccaaatcgtctcttaatcctttttgttttttcctgtagctccagactctcaccctgctcatctcattccttaccaagggatgaggtgagagagagtggataatcratgcttatgtttgtagatgctctgagaagtaaattctcagctttcttataagaagaatcttgcatattttgtcagctatttgagagtcatctcatgaaggcagatatttttcccacttgaagcaaaataatagcagtcatatgtttacggatgacacaaccagattatataattctgttttttaaatagattgcaacaagatagtcagtataaaaaaacaagttcagagtattgattcctattacaagtatgaagctgaaattcacagggaagcattgggcaaatataaatgctacatgactggaaagtgactcattgcatattcacgtgacagaatagcataaagtcattaaaaaattaagatttataacataagagtgtggttgcaacttaataaatatcaaaggcaagatataaaatgtgtatagaaaataattattaaaatatatgtgtgatacagtcagagtgcctggcatatatctgttaaaatatgtgtgtgaacatgaaaaaatacatttaaacatttttgtatctatcttcaaacca

SEQ ID NO: 690628 - DNA, 600 bp, Homo sapiens
gcctcccaaagtgctgggattacaggcgtgagccaccgcgcccggccgaacccaagtctttacagtggtccattactcttcttgtcactctgacctcagtgtaggcactgcctcctctgggaagtctttgctgacctgaaaggctcagcctcttgtgcttcctaagcttttctcagagcatttagcttcattagtaattaaacttccattagtgaaatgatctgattaatggttgtcactcccagattttaattctaacttttttttttttttttttttttgagacccagtctctttttttttgagacagtctcattctgccgcccagtctggagtgcaaygacgtgatctcggctcacagtgacctccacctcccaggttcaaatgattctcgtgcctcagcctcctgagtagctgggacgacagatgcatgccaccacgcctggcaaatattttgtattttagtagagacgggggtttctgccatgttggcctggctggtctcaaactcctgagttcaggtgatccgcctgcctcggtctcccaaagtgccaggattacaggcgtgagccaccgtgcccggcctctaaacacttgtgg

SEQ ID NO: 690629 - DNA, 649 bp, Homo sapiens
tacaataaagagcaattctattaacaaataatccaccgagtaactraaaaggggcctttggagttctgatttggatgagattattttcagcctggggtgggaagtatgtgggggctgggattactggtttgggacacattctcttaaatatggatctggaaagatgaatatgagtaaaagacatgatataggaaaacactacatcccacagggaacaccatagacatgtgaaaacatttggtggatgtgggagaattgacaaggaattaggtttggatagatactaatttgcaagggctataataaaatagcaaatactgagtggcttaaataactggaagttcaaaatcaaagtgctggggataatggcttccagctccatccatgtccctgcaaaggacatgatctcattcctttttatggctgcatagtattccatggtgtatgtgtaccatattttctttatccaatctatcactgatgggtgtttgggttgattccatgtcttctcagcaaactaatgcaggaacaggaaaccaagtcctgcatgttctcacttataaataggagctgaacaataagaacacatggacacagggaggggaaggacacactctggggcctgccaaggggtggggtgtggggaggg

SEQ ID NO: 690630 - DNA, 649 bp, Homo sapiens
tacaataaagagcaattctattaacaaataatccaccgagtaactaaaaaggggcctttggagttctgatttggatgagattattttcagcytggggtgggaagtatgtgggggctgggattactggtttgggacacattctcttaaatatggatctggaaagatgaatatgagtaaaagacatgatataggaaaacactacatcccacagggaacaccatagacatgtgaaaacatttggtggatgtgggagaattgacaaggaattaggtttggatagatactaatttgcaagggctataataaaatagcaaatactgagtggcttaaataactggaagttcaaaatcaaagtgctggggataatggcttccagctccatccatgtccctgcaaaggacatgatctcattcctttttatggctgcatagtattccatggtgtatgtgtaccatattttctttatccaatctatcactgatgggtgtttgggttgattccatgtcttctcagcaaactaatgcaggaacaggaaaccaagtcctgcatgttctcacttataaataggagctgaacaataagaacacatggacacagggaggggaaggacacactctggggcctgccaaggggtggggtgtggggaggg

SEQ ID NO: 690631 - DNA, 479 bp, Homo sapiens
ccattccctttgaaayggaaaatgtccatctgttatacaactgttcattcagccatctaatcactcattcattccaaaaatgtttttgtaggtttacaatctagacagagccttctttgtgggctcggtcacttctcgacatcacagatggtttctgcttctgtcaagggaaggttcagtcactaagtcacccctgcctgtccaccactatcatggtgtgtggtcttccatggcagccaatcctctctccccagccacccaggcaagggcttctttggggccctggtcacttgccacctaagacactcttcagctacttcacatgatgaccagggcagccaggctctgaggatctactggtaacccagggaagacaaatgcccccagagccagcaagtccccttcctgccccgctaaaagaggaataagaacttgtctctggcagcctcttatttggaatcttgagcacatgctgaatt

SEQ ID NO: 690632 - DNA, 655 bp, Homo sapiens
atgtcaacctccgcctcccgggttcaagcgattctcctgcctcagcctcccaagtagctgggattacaggcatgtgccaccacgcctggctaatttttttatctttagtmgagactgggtttcaccacattggccagactggtctcaaactcctgacctcaggtgatctgcccatcttggcctcccaaggagcttggattacaggcatgagccaccacgcccagccagaaaatagcaaattttatgtgatgacgacttttacccctcagccccgtcccccaacacaaggctggtgttgtttctattttcctgactgatgtacattatttaaatagtgaggatgaaataaacactccttatgatgataatgacagctatcactttgaacctttcccatgtgctaacctgtactaagtatttaatcatcataatattttactaactattctatggtgtctattttagtgatggagaagctgagcctcaaagtggttatgttgcttggtattaaagatagcaaagggtagaaatcaaatttattggactgatttttaacaaaatttattttttatttttagacagggtctagctctgtcgagtgcagtcgcacgatcatgattcactgcagtctcaacctcctgagctcaaaagatcc

SEQ ID NO: 690633 - DNA, 655 bp, Homo sapiens
atgtcaacctccgcctcccgggttcaagcgattctcctgcctcagcctcccaagtagctgggattacaggcatgtgccaccacgcctggctaatttttttatctttagtcgagactgggtttcaccacattggccagactggtctcaaactcctgacctcaggtgatctgcccatcttggcctcccaaggagcttggattacaggcatgagccaccacgcccagccagaaaatagcaaattttatgtgatgacgacttttacccctcagccccgtcccccaacacaaggctggtgttgtttctattttcctgactgatgtacattatttaaatagtgaggatgaaataaacactccttatgatgataatgacagctatcactttgaacctttcccatgtgctaacctgtactaagtatttaatcatcataatattttactmactattctatggtgtctattttagtgatggagaagctgagcctcaaagtggttatgttgcttggtattaaagatagcaaagggtagaaatcaaatttattggactgatttttaacaaaatttattttttatttttagacagggtctagctctgtcgagtgcagtcgcacgatcatgattcactgcagtctcaacctcctgagctcaaaagatcc

SEQ ID NO: 690634 - DNA, 647 bp, Homo sapiens
tggtttcctcaggaccttcctgaattacggctgcggtcccggcacactcatcacagtgggccctttacttgaaaaatgtctcactttgatgataaattataagataaccttagctatacattgcttattttactaaatcacgtattttaaagtaaatactatgtcacttattttatttatttatttaatgagatggagttttactcttgttgcccaggctgaagtgcggtggcatgatcttggctcactgcagcctcatgycccaaatccccacaacatgctttcaatgcttgctttcaatttggaaacctccatcaacaaaaagaggtagaaaccacacaaagacagggggcttaccagccagtgatctaagccggctgccagtagcccctatggcatctttgtgcaaattagaaaaaggtgctttttctcctgacatatctagccctgagccaggtgcaaggcctggggagtgcaggatgggctggccttcaacccccacgtgtctccttggccaggcaccttgggcagtaaacaacctgcacaaccaaacccagcagcccagagtccaagagagtcctggatgttttcttactgcctttcacaaagagttttactgtcagttcacaaagaataatgaaaggcaa

SEQ ID NO: 690635 - DNA, 658 bp, Homo sapiens
tgagatgtcttgtacttcctagttaattttcatgaattagaagtttcaaaaaagtttgatagaggtttaatcctaaatctcttggttatctcatcaatcagctgtggggtcttctcatttctacaatattgaagtctgacaattacaagctgtgttattttgaagtcaaaacataagcacttttttttttttgagacggagtcttgctctgtcgcctaggctggagtgcagtggcgcgatctcggctcactgcaagctccgcctcccgggttcacgccattctcctgcctgtgcctcccaagtaactgggactataggggcccgcccctacgcccagctaatttttttttttttttttttttttttgkatttttagtagagacggggtttcagtgttggccaggattgtctcgatctcctgacctcatgacccgcccgcctgcacaaattgtttttaatggagtatacagcatcccgtattcaaaagtagaatcttagtgattaaaaacagagcataggacaagttctttcatctcttcacagtgtgtccccagccttcattccatccagtccctgacatagagtaggtgctttataaacagcagttgatggataaagaattaattattgagaatgtcataataaatgtaaggaaatc

SEQ ID NO: 690636 - DNA, 653 bp, Homo sapiens
aagaggcaacccattgaaccaaagaggcaactctgggtctactaccaaacccctatcctgtttctgtattgcaaaacaacaactttgtatatccattcttcattctgcagaagttatggatttagcgggatgtaaaaacttcctccagaagattttaactgactcactgacatttggtagaataaaaaggtcataaccaaatattcatgcaacatttccccactaattatatttagcctaactccctaataacacagatacagaaattcagttaaaggggttaagcaactcaaccaagtctaaataactasgtaacctaatgctaaattcgagatgctgaaaatatcctaaaacaaatattcatttaaaaagatctgtacctagagattctgaactagaatttgggaagacagattctgattagggtataataagaatggagacaataattgaaaccagagggaagagggcatttttaagagataatataaagatcatagcattgaagcatgaatttgcaggaatgctcacagctgaagcagaagaggaagagaggacaattttccttttgattttccatttcttctgactctaagtgtaatgtactataagcttcacagataagaaaggtatagacaatactatagatggca

SEQ ID NO: 690637 - DNA, 671 bp, Homo sapiens
tggaggataagaatggcatttggggccgggcgcggtggctcacgcctgtaatcccagcactttgggaggctgaggcaggcggatcacctgaggtcgggagtttgagaccagcctgaccaacatggtgaaaccccgtctctactaaaaataccaaaaattagctgggcgtagtggcgcgtgcctgtaatcccagctactcaggaggctgagacaggagaatcacttgaacccaggagtcagaggttgcagtgagctgagattgcgccattaccctccagcctgggcaacaagagcgaaactctgtcaaaaaaaaagaatggcatttggcaagatgagactttggttcctaactgctctargacctaggctggcttgaggttcaaagtgccggttactctccatttgactgtccccatttcccctgcaacatccattctttgctcttctctgccctactctgtgacctgaagtctgatccccatggagtgtttcatccaggctctcttgctctctggcttctcacttctggttgagctcagccagtaggaggaatggcacaagatgggaggggaatatgggcagagaaagtagttgcagtacagttgttcttggtatctgtgggggattggttccagcaccccccaaccatggatgctcaagtcccttataca

SEQ ID NO: 690638 - DNA, 761 bp, Homo sapiens
caacaaaaagtatttgcttagtggcctccagtctgaagtctttgccaattttaagcacaaatgatagaactttctaataatgtaaccaaatttcaacaacaatgaaactagatgatagctaatattttagagcgctagatgcctttctgagcaggttggattataggaagtacaattcaagaaccgtttgttgagcrtgagcagccactacattggaacattgttccaggcaatgacctcctagagagccaaagcacactggctttttgtccaggtggtagtttccagtcatgcctttgagccaccacgttcccacagctggtgcccagctgtcctttctgtgcataccttgcggtggtgacacaaggaatagccgttcccagcacacctggggagctcctcacgtgagctgaccttggtttctagagtggagcaagctttgaggaccaggatctttggaaggggacatctattctgtgtgttaccactaaggcaaatgtcactcattgtcttcttcatcccccattgtactacttccttcaataaaccatccagaaggagccacattcatcaatgctaattggttcgtccattttaaaatgaactgttttaggactgctgtggttgtatgaagaaattttcctttcctccctactaactagtgggaaatgccaaacattctatattaaatattttctttcttttatgttttaagggcagaggagttaaccatttttactctaaaaagtcactgctctagc

SEQ ID NO: 690639 - DNA, 617 bp, Homo sapiens
tgaacaatcagtagagagccacacaaaagagcttgcacatgagtcttagttgcaattgtaagaacactgataggtcctttccccaccagattttgaatataacatttctaagaacttattaaaatattagaatgctattaatctattgtttttgcttcagcatgtccttctgcttgcgagtattctgaagagaacagtcataattctgaaactactgtcctgtttgtgtcataaattgcttcacatgtttctgcgtactagtaattactgagcttgattttgactattttcagcaccaactgagcaaacccctgtggtccggcagtgctaccatggtaatggacagagttatcaaggcacattctccaccactgtcacaggaaggacatgtcaatcttggtcatccatgacaccacaccggcatcagaggaccccagaaaactacccaaatgartatgtctttgatgttacttgtaagaggagcaacagccaacttaagttcctcctagaagagccttgcttcaagctaacttgttaggacaaatttcccttagacccagaaggtgtgtcaaaatgtccaaacaactttgcttttgatcaaagagtctgagagaata

SEQ ID NO: 690640 - DNA, 912 bp, Homo sapiens
atcagaatctcaggggatggggctgaggaattgtgcttcagctacttctccaggtgatgcctatgcatgtaaaagtttgaaaacatggtatagatgtggtttgaatctctcgaaacttagaaatcacttaaagtctgcctcagatgaatgtatctgcagcactttgtgtacatgcctgaagtgccatcagatcagctagcgctctctcaatctcaatctctctctctctctctttcctctttaaatatacctcaactggaaaatattgaaraagtagcagatagcactgagttcttgataatatctttgtatatttttatataattatttccttacttaaaaatgaactagaaagcaaaagaaaaaatgagcaacaaatataaatatattgtttaaaatgaaggtaaatgtaaacatattttacatgaaaaagtaaagcctttaatggcatttgttatttttaaaaatctaaaaataaaaatgccagtgagaatgatatacccccacctcagagaatggtttctcctggaagcaagaaaaagaaaaagaattagaggataaggttccagttgtattagtaacattttatttttaaagaaaacactatgtaaatcaacatgaaaaaatattacttctgataaagtctaaaaagtgggcagataagaaaatgctgtatcatactccaaattcttgaagtattacaataataaaataactcaggtattttaaaatccaaaataaaatataatctctcaattaaaaaatggttttttttagaacaatgataaagtgaacataaggagccaaacatttttatacactatggataagagtgttaattggtaacacatattatgtaagaaactatagttggaatcatacagacattccagaacagcttctttcacctac

SEQ ID NO: 690641 - DNA, 912 bp, Homo sapiens
atcagaatctcaggggatggggctgaggaattgtgcttcagctacttctccaggtgatgcctatgcatgtaaaagtttgaaaacatggtatagatgtggtttgaatctctcgaaacttagaaatcacttaaagtctgcctcagatgaatgtatctgcagcactttgtgtacatgcctgaagtgccatcagatcagctagcgctctctcaatctcaatctctctctctctctctttcctctttaaatatacctcaactggaaaatattgaaaaagtagcagatagcactgagttcttgataatatctttgtatatttttatataattatttccttacttaaaaatgaactagaaagcaaaagaaaaaatgagcaacaaatataaatayattgtttaaaatgaaggtaaatgtaaacatattttacatgaaaaagtaaagcctttaatggcatttgttatttttaaaaatctaaaaataaaaatgccagtgagaatgatatacccccacctcagagaatggtttctcctggaagcaagaaaaagaaaaagaattagaggataaggttccagttgtattagtaacattttatttttaaagaaaacactatgtaaatcaacatgaaaaaatattacttctgataaagtctaaaaagtgggcagataagaaaatgctgtatcatactccaaattcttgaagtattacaataataaaataactcaggtattttaaaatccaaaataaaatataatctctcaattaaaaaatggttttttttagaacaatgataaagtgaacataaggagccaaacatttttatacactatggataagagtgttaattggtaacacatattatgtaagaaactatagttggaatcatacagacattccagaacagcttctttcacctac

SEQ ID NO: 690642 - DNA, 912 bp, Homo sapiens
atcagaatctcaggggatggggctgaggaattgtgcttcagctacttctccaggtgatgcctatgcatgtaaaagtttgaaaacatggtatagatgtggtttgaatctctcgaaacttagaaatcacttaaagtctgcctcagatgaatgtatctgcagcactttgtgtacatgcctgaagtgccatcagatcagctagcgctctctcaatctcaatctctctctctctctctttcctctttaaatatacctcaactggaaaatattgaaaaagtagcagatagcactgagttcttgataatatctttgtatatttttatataattatttccttacttaaaaatgaactagaaagcaaaagaaaaaatgagcaacaaatataaatatattgtttmaaatgaaggtaaatgtaaacatattttacatgaaaaagtaaagcctttaatggcatttgttatttttaaaaatctaaaaataaaaatgccagtgagaatgatatacccccacctcagagaatggtttctcctggaagcaagaaaaagaaaaagaattagaggataaggttccagttgtattagtaacattttatttttaaagaaaacactatgtaaatcaacatgaaaaaatattacttctgataaagtctaaaaagtgggcagataagaaaatgctgtatcatactccaaattcttgaagtattacaataataaaataactcaggtattttaaaatccaaaataaaatataatctctcaattaaaaaatggttttttttagaacaatgataaagtgaacataaggagccaaacatttttatacactatggataagagtgttaattggtaacacatattatgtaagaaactatagttggaatcatacagacattccagaacagcttctttcacctac

SEQ ID NO: 690643 - DNA, 617 bp, Homo sapiens
tgacttgatatatcacgttggagaaaactggagaaaagcttataatgtactcagacaattttaatccccataaagacaaaacaattaatttgggyccaaaccctacacaattgacaaaaagcagttccagcaagaaaaaagacaaatgagcaagcaaaacatgaaagtcttgataagaatatatagaacatctttgatacttagtggtagaagaggatttcctgaatacaaatgttgcaagtcaaagggaaaagattggtttattaattgaaagacaccatgaagaaagtgaagtgaaaagacaagcaacagaattggaattgttatgtgcaactaagtaactactataaaaagttaataaaacataagaaaaatacaaagcacctaacagtgggcaaaacatattgacagacattttatagaagaggaaatgtaaacatcaaataatattcaaagatgctctacttcattaaaatgtaataaattcaaaataagacctcattgacgtaccattgactttcattttgtgtgtggttgtagaacaatgggaatccttaatgcactgttcatgtgagtagaatttatatttataaatacagtaaacttaagtttaactt

SEQ ID NO: 690644 - DNA, 2337 bp, Homo sapiens
tccagcacagttcctgttggcagtgaattgtccaaaagcacaagtggtttgatgtccctgtcagtccttcttcagaaaaactggaatataaataactgcaaggaatccttcctgttggtcatcaagataactctscatggtgcaaggaaactactgcctttcctagttcatttgaaggcatttgcattattttatgtctctgtatttgtcttctagagggtactgggcatctgtattaataaaacacatagtcagcatgaccaagtatgtagacacagaacatctaatcaaagaggtcaaagaaagaagctttctccaaaagctctcaatgaccattaagttcttatattccttatttagtaccagccccacaggcgtcatcttttacaggataatgtcgactcgctttgcttgctgctcaaggatgtgtgaaactaggctgcagaccaccctctggcactgtttttctggttgtatgtaagaattactcaagccaattggtctaccttcctagcaccttatgtttttattatttttttaaattcacagataaaattgtatgtatttactgtgtggaatgtgatgttctgaagcatatatatactgtagaatactaaatctgactaatcaacctatgcatcacctcacatagttatttttgtggtgagaacactttacatccactcttctggcatttttcaaagaacacattattaacaacagtcattgcattgtacaacaggtctcaactttctcctcttatctaactgaaattctgaatcctttgaatatcgccccatccccaccaccagcaaaaccccaaccccaggtaaccacccttctcctctctgcttctatgagatcaatgttttcagatgccatataggagatcacgcaggtcacctttggataggcagttcatggggccaaaaattctgttccattctcttccccattcaattctccccagccaccaggtctcactctctatttcatactgtcttctctcaacgttctacctgtggtcattcttctccccatcttctcttaattccttattgtacaagtttttgtatcaactttatttagagatcacatgtagcttctaattatcttccatgtatgcattcaacaaatatttattgagaagttggagggggccattctgtgtgctcaaaaagttcttggcttcttgcagcaaaagttacagtacgacttacaaaagaacaattacataattgcttttcaagtttgtatcttttgatcccaatgaaacgagaactctggaagatattatgttgtattcagtaaagcatggactttggagttagatgaaccttgttcgtgcctcagctctgtgtgaaataaagtaagtgaattaactcttctgtgtccctcagttgtataatgaagccattactacctgtttcataggtttattgagagcattagctaacataatatgtgtaaagttttcttacactaagcatgttctcattaaacatgtactgaaaaaatgaatgaatctttaggtcagtgtgaaatgatgaaggggcatatataaataaaaatcaggcttaagaatcaaaagaaaataaataaattgtgacttcccataacaaaaggaatgaacataaaaaataagtggataaaaaaatttatgtcaaaaaaatctaaatggaaaaataaatagctctcttcttgtaatttattaagtgattattatgtgcctagcactgggctaagatatttacttatattatctcactatgttagtctgtttttgcattgttataaaggaatacccaagactgggtaacatatttaaaaaagaggtttatcttggctcatggttctgcaggctgtacaaacatgagaccaacatctcggctcctggtgagaacatcaagaagcttccaattatggcagaaggcaaagggggagccagcatatcacatggtgagagagggagtaggagagaaggaggacctgccaggcacttttaaacagccagatctcatgtgaactcatagagtgagaactcacttatgacctagcgatggcaccaatacattcatgaagcctctaccccagtgacccaaatacacttcccactaggccccacctccaacatagggatcccacttcaacatgagatttggaggagacacacatccaaaccatatcacgcacttacttctcaaaaccaatctgtgaataacctcactttacagatatcaagttgaagcttagaaagacaagtaacagagcaaataaatgtcagatctgtttgtgtaagctttactgcctagaatagtgaccatgacatcacaagag

SEQ ID NO: 690645 - DNA, 1064 bp, Homo sapiens
gttttttgagtagatgcactcggctctgtatacatgccatccatgtctcctcaaaaaatacaaaaacttttaaagagcttacccttaattaatgttttagccgttttctggacaattcaggccacttaaacacttaggccttttttacctcccttatgccttttgaagtcttgtgtattttaattctctctctatgaaaccccagaagacattttttttgtgtgtgtttgtttgtttgattttctttctttcttttttttttgagacagagttttgctgtttctgcccaggctggagtgcaawggtacaatctcggctcactgcaacctctgcctcctgggttcaagcgattctcctgcctcagcctcctgaagtagctgggtttacaggcacccaccaccacgcccagctaacttttttgtagttttagttgagacggggtttcaccatgttggccaggctggtcttgaactcctgacctcaggtgatccgcccgccttggcctcccaaagtgctgggattacaagcatgagccaccacacccggcccattgttttatgtagacaataataatttagattaatccacatacttactctttttgctgttcttcatttccttccatataagcatgcttctctctcagcttaatttctttctacatgaataactcctattaggggtgtgtgtgtgtgtgtgtgtgtgtgtgtgtgtgtgtgtgtctgtctgtgtggtggagggtgtctgctggtgttccagttctcccagtttttgtttgtcggaaaatgcgttttattcaccttcatatttgggagatttttttcccctgggaaaaaaatctttattcaccttcatatttgggagatttgggcttgttttattttctttcagtcctttggaaatgtcattccattgtcttctggcttccttcatttctgttaaaaagtcatctgtcagttttattgtggttcttctgaaagtaacatatctgttttttctctttggctttgtttttttttttagcaattttactatgatgtacataggtgtggttctcttcatat

SEQ ID NO: 690646 - DNA, 1064 bp, Homo sapiens
gttttttgagtagatgcactcggctctgtatacatgccatccatgtctcctcaaaaaatacaaaaacttttaaagagcttacccttaattaatgttttagccgttttctggacaattcaggccacttaaacacttaggccttttttacctcccttatgccttttgaagtcttgtgtattttaattctctctctatgaaaccccagaagacattttttttgtgtgtgtttgtttgtttgattttctttctttcttttttttttgagacagagttttgctgtttctgcccaggctggagtgcaaaggtacaatctcggctcactgcaacctctgcctcctgggttcaagcgattctcctgcctcagcctcctgaagtagctgggwttacaggcacccaccaccacgcccagctaacttttttgtagttttagttgagacggggtttcaccatgttggccaggctggtcttgaactcctgacctcaggtgatccgcccgccttggcctcccaaagtgctgggattacaagcatgagccaccacacccggcccattgttttatgtagacaataataatttagattaatccacatacttactctttttgctgttcttcatttccttccatataagcatgcttctctctcagcttaatttctttctacatgaataactcctattaggggtgtgtgtgtgtgtgtgtgtgtgtgtgtgtgtgtgtgtgtctgtctgtgtggtggagggtgtctgctggtgttccagttctcccagtttttgtttgtcggaaaatgcgttttattcaccttcatatttgggagatttttttcccctgggaaaaaaatctttattcaccttcatatttgggagatttgggcttgttttattttctttcagtcctttggaaatgtcattccattgtcttctggcttccttcatttctgttaaaaagtcatctgtcagttttattgtggttcttctgaaagtaacatatctgttttttctctttggctttgtttttttttttagcaattttactatgatgtacataggtgtggttctcttcatat

SEQ ID NO: 690647 - DNA, 584 bp, Homo sapiens
tgcttcttgcctttataaatttttgtggctgtggtggtatgcggtggctcatgmctgtgatcccagcctgtgggggctaggtgggtggagcacttgaggtcaggagtttgagagcagcctggccaacatggtaaaaccctccaaaatggagggttgacatttatgaaattgtttaaatctatctctgccaaaaaatacaaaaattagctgagcatagtggcacgtgcctatagtcccagctacttggcaggttgaggcaggagaattgcttgaagcccagaggcggaggttgcaaagaaagttttgtggctgtgattttttctccttcctgctcctctgcattaccaagtgcaataaacttctcaggtattgcagagttgattcttaattttgattttattaatttgattaacacttaaatttgattaaagtgttttcatataacaaaatatcttttcaaacaccttcagaaatcttaagcagtcatttttttcttttattagaaataaagaacttataaaacccaattatttaattgaaactaaaaatgttttgtaagtataaaaaattataaagcagcaaaa

SEQ ID NO: 690648 - DNA, 1908 bp, Homo sapiens
ttcttaagatctactctcttagataagttggaacctgaggttgatcagcatctggggagatgtgcatatggaagctgaactctattggacccatgtcatgtgcaactcaacatagcgcaactcaacatagcacagctgttggtacattcaagactggctgagattcagacctattgagttgcaaccagaggtctagaagctctagaagctctgattataatgaatatttattacactgtcttatagcttaaatgaagatcaccaactggtcaggatctgacattatacatcagaaaatcgacttggtgtttgaagatacgaatattactttaaacctgaaaggaggacaayttcttattagaaagcattttaatgaaaaggatcatcagaatgagcagaagtatttcagagcagggggggtccttacagttttcaaatcagagaataaagataccagcagaccgggcatggtggctcaggcctgtaatcctagcacttcaggaggctgaggtgggtggatcacccgaggtcaggaatttgataccagcctggccaacatggtgaaactccgtttttattaaaaatacaaaaattagccgggtgttgtggcgcatgcctgtaatcccagctattggagaggctgaggcaggagaatcgcttggacctgggaggcagaggttgcagtgagccaagattgcaccactgcactccaacctgggcgacagagggagactgcacctcaaaaaaaaaaaaaaaaaaaaaagatgtcagcaaactaatttaattctcttaaaaggtttgaattcactaaaaacaagttataattagaagagtcattgattcctaaatgtgaattttaatatgctcagacattcatccagtgattttaagggatattgtgaagttgcgtgatctcaaaaaaccccaactttgaattgctttatctatctacttatctacctattgcctataacactgtagggtaaacaagctgggaaggtcatgtcaggaaacaatgccaaagcaatgctattttatttatttatttatttatttatttatttatttatttatttatttattttgcaagcaatgtggccctgttttcacataaaatcttgcaggaacccattataaccattaaaatcgaagaagcttttactgaagcaaaggagagctcagcctccaggcagttgatgccttgcccttgcatctgcccaggacccctagtgccaatcactaaactgttcttctttttctttttttttttttctgtgtgtttttatgtaactccttttaaaatttttaaatgacaaattagaattgtatatatttattgtgtaccacaagatgttttgtgtatacactgtggaatatctaaatcaagctaacatatgcattaccccacatacatataattttttgtggtgagaacccttaaaatctactctcagcaatttttaaatatacaatacattgttaattatagtcaccatgttgtactctagatctcttgaatttattcctcatgtctaacttgaagctttgtactctttgaccaacatcacccccaccaccacccacagcctctgataaccaacattctactctctacttgttagttggattcttttagattccatatataagtgagatcatgtggtatttgtctttctgtgcccactcagaaagttcctacatggcaccaatttctcatttgcaatcaatttctttaatgtgcagaggaaaatggcatagatagtgtcacatttggatattgaccaacttctatcttcctgtgtagacatatctgtattttctctttacttacctgtgcaataaatgaatgtcttgtaagcatctctaataaaatattctgttgtatactatccttagcatacagtttat

SEQ ID NO: 690649 - DNA, 1908 bp, Homo sapiens
ttcttaagatctactctcttagataagttggaacctgaggttgatcagcatctggggagatgtgcatatggaagctgaactctattggacccatgtcatgtgcaactcaacatagcgcaactcaacatagcacagctgttggtacattcaagactggctgagattcagacctattgagttgcaaccagaggtctagaagctctagaagctctgattataatgaatatttattacactgtcttatagcttaaatgaagatcaccaactggtcaggatctgacattatacatcagaaaatcgacttggtgtttgaagatacgaatattactttaaacctgaaaggaggacaacttcttattagaaagcattttaatgaaaaggatcatcagaatgagcagaagtatttcagagcagggggggtccttacagttttcaaatcagagaataaagataccagcagaccgggcatggtggctcaggcctgtaatcctagcacttcaggaggctgaggtgggtggatcacccgaggtcaggaatttgataccagcctggccaacatggtgaaactccgtttttattaaaaatacaaaaattagccgggtgttgtggcgcatgcctgtaatcccagctattggagaggctgaggcaggagaatcgcttggacctgggaggcagaggttgcagtgagccaagattgcaccactgcactccaacctgggcgacagagggagactgcacctcaaaaaaaaaaaaaaaaaaaaaagatgtcagcaaactaatttaattctcttaaaaggtttgaattcactaaaaacaagttataattagaagagtcattgattcctaaatgtgaattttaatatgctcagacattcatccagtgattttaagggatattgtgaagttgcgtgatctcaaaaaaccccaactttgaattgctttatctatctacttatctacctattgcctataacactgtagggtaaacaagctgggaaggtcatgtcaggaaacaatgccaaagcaatgctattttatttatttatttatttatttatttatttatttatttatttatttattttgcaagcaatgtggccctgttttcacataaaatcttgcaggaacccattataaccattaaaatcgaagaagcttttactgaagcaaaggagagctcagcctccaggcagttgatgccttgcccttgcatctgcccaggacccctagtgccaatcactaaactgttcttctttttctttttttttttttctgtgtgtttttatgtaactccttttaaaatttttaaatgacaaattagaattgtatatatttattgtgtaccacaagatgttttgtgtatacactgtggaatatctaaatcaagctaacatatgcattaccccacatacatataattttttgtggtgagaacccttaaaatctactctcagcaatttttaaatatacaatacattgttaattatagtcaccatgttgtactctagatctcttgaatttattcctcatgtctaacttgaagctttgtactctttgaccaacatcacccccaccaccacccacagcctctgataaccaacattctactctctacttgttagttggattcttttagattccatatataagtgagatcatgtggtatttgtctttctgtgcccactcagaaagttcctacatggcaccaatttctcatttgcaatcaatttctttaatgtgcagaggaaaatggcatagatagtgtcacatttggatattgaccaacttctatcttcctgtgtagrcatatctgtattttctctttacttacctgtgcaataaatgaatgtcttgtaagcatctctaataaaatattctgttgtatactatccttagcatacagtttat

SEQ ID NO: 690650 - DNA, 1672 bp, Homo sapiens
tgtacactcccgtggaaggacagagacggccaaggttaatgctgcctagaagaggtaacgaaacactggaattgagtcttaatggatgagaatacttttagcaaggatggaaggtagacttcctgggcagaaatgtgtaaggagacctgagaaaacttgtttggggaactctcagatttgttaaagatggaactcaggactgaagagagttgggggtgaaaatgaggatactgagcattaggaaatgagtctggaaaggcagtacaaaattagacaatgaaagctctcagtgccaatttaactttggttttatcatcctgtaacacaagttcaactcaaaagccttcagcgggcgactgacagtttttgaagtaaaaggtagttctgtctgaagacattcaaatgaagggaaagaagaggggaaaggaagagagaggaggaagaaaccactgagcaggccaaataaaatgtatgaaactagtcttgttcatgggcatggaatcgtagagagctaaaagacattaagcaagggaggcccaagtaatgatggagtttagattttagagaccactctggcagcagagcgaaggctaaagttgatgaggaggaattggaggccgggagtgagttaagaatctctactgcactagacaggacctgcagcataattagaggggctcagtgcaaaatgaaaagctgggagtagtactgttcaaaaagcaggaagacaatgtcattaaacgtactattataaattaggaaacttttccctttcttcagtagtttttgtctccacttgccatgctgccttttatttactatttaatgtcacacttcctccagtaccaggaaaaattacaggtaagtataaaccttcagaggtgccaggggccccagactatgactcagcagtgggcgtccactggctaccaggttccaccatgccagccaccaaacctgcgtgtcatgccatgctgggaggctgatgcttcttcccttcctgtggctgcccctacaactcactaggtacctggcttggagataggcaagaggcttgtcccttcactcccctgcccctcccccgcccacccaaacacagttgtggtttctatctacctgtaagacatccctggagatgacaggcaggggcaaggactacccttaccaagccctgctccaagacaccatgggttgtgctgtctaatccctatctttctcacacttgtgcaaaggcccctgccagggtcagagagtgacagctgtggctgggtgaagagagagggaggctgaatgagatcagggagtggggaagtgggcaacagataattcattccagggaggcagcaggaggtggtaccatgcccaaggtccccacgaattctccattgtcccattaaacttcacttagaaaayacaaatccaaagatcaatcactaagaactttgagatggcaacaatacagcattgaacttcatgcattgagcctttgtaagtgtaggccctgtgtactgcactggtctcatgctcatgaagctgaccctggtactagttcagggaaggaaccacaagtactgataagcgaagtcagtaaatggcagtggggctggaaaaggggatgaatgaatttgaagagaggtagacaagatctggtgacagaatttgagagaagggg

SEQ ID NO: 690651 - DNA, 1418 bp, Homo sapiens
ctaaaaggcttgccaaaaaactcagtgagtcagtggtgacaatatgtttatgtgaacagtgttttccaaattatcaacaaagttaggacaccataagaacaaaaagtctatccttgtagcttcatgactcatcttttccacatcagttcttcaatttctstctcagtgattccacttcccaggaaatgatccttcccacaaatctcagattttattttggtaggcaaagtttttttttttcttcttacaaaaccatgtgtacaactcatgttgtattttatagagtaaaatatataacataatatggataagattgaaatgagacaatcgattttcttttaaagtttaaaatatacattttattttattttttaaaataaattcctcacttttttttttttttaattggagacaggttctcaccctgttgcccaggctggggtgcagtggctcaatcataactcactgtagtctcaaaattgtgggctcaagggatcttcctacttcagctttccaagtagctaggactataggcatgcagcaccatgcccagctaatttttttttttttttgagacggagtttcactcctgttgcccaggctggagtacaatggcgtgatcttggctcaccgaaacttctgcctcccaggttcaagcgattctcctgcctcagccttctgagtatgtaatccctcctgggattacagacatgcaccaccacgcctggctaattttgtgtttttagtagagacggggtttctccatattggtcaggctggtcttgaactcctgacctcaggtgatctgcctgtctcggcctccccccgctaattttttattttaatttttggtaaagatggtctcactatgttgcccaggctggtctcgaactccagggctcaagaaatccttccaccttggcctcccaaagtgctgggaatacaggcatgtgtgaccacatctggcttattttatagacttctaaaaggtctgaaatgtgataaaggagagattaactgtcacacgaatataaagtaaatattcagtaaggataactatggctaacatattctaacacttaaccatgtgtcaggcattgcactaagcactttacatacattatctcatttaatccttattactttcctatgaagtgggaacttttattgtccagtacacagggaaactgaggcatagaggttaagtaaattgtttaagattatatacctcataagaagcaaagctgagaattgaacccagagtctaaatccagaggcccatactttttgtctacttaaaataaattcaaacatacacaatagaacagagtaataagcctctattacttagtttctaacaattaattgtggttagtcttggttcatttatttctcactttccctctacaccccaccca

SEQ ID NO: 690652 - DNA, 1418 bp, Homo sapiens
ctaaaaggcttgccaaaaaactcagtgagtcagtggtgacaatatgtttatgtgaacagtgttttccaaattatcaacaaagttaggacaccataagaacaaaaagtctatccttgtagcttcatgactcatcttttccacatcagttcttcaatttctctctcagtgattccacttcccaggaaatgatccttcccacaaatctcagattttattttggtaggcaaagtttttttttttcttcttacaaaaccatgtgtacaactcatgttgtattttatagagtaaaatatataacataatatggataagattgaaatgagacaatcgattttcttttaaagtttaaaatatacattttattttattttttaaaataaattcctcacttttttttttttttaattggagacaggttctcaccctgttgcccaggctggggtgcagtggctcaatcataactcactgtagtctcaaaattgtgggctcaagggatcttcctacttcagctttccaagtagctaggactataggcatgcagcaccatgcccagctaatttttttttttttttgagacggagtttcactcctgttgcccaggctggagtacaatggcgtgatcttggctcaccgaaacttctgcctcccaggttcaagcgattctcctgcctcagccttctgagtatgtaatccctcctgggattacagacatgcaccaccacgcctggctaattttgtgtttttagtagagacggggtttctccatrttggtcaggctggtcttgaactcctgacctcaggtgatctgcctgtctcggcctccccccgctaattttttattttaatttttggtaaagatggtctcactatgttgcccaggctggtctcgaactccagggctcaagaaatccttccaccttggcctcccaaagtgctgggaatacaggcatgtgtgaccacatctggcttattttatagacttctaaaaggtctgaaatgtgataaaggagagattaactgtcacacgaatataaagtaaatattcagtaaggataactatggctaacatattctaacacttaaccatgtgtcaggcattgcactaagcactttacatacattatctcatttaatccttattactttcctatgaagtgggaacttttattgtccagtacacagggaaactgaggcatagaggttaagtaaattgtttaagattatatacctcataagaagcaaagctgagaattgaacccagagtctaaatccagaggcccatactttttgtctacttaaaataaattcaaacatacacaatagaacagagtaataagcctctattacttagtttctaacaattaattgtggttagtcttggttcatttatttctcactttccctctacaccccaccca

SEQ ID NO: 690653 - DNA, 424 bp, Homo sapiens
aaattcatgggctattgaacacttgaaatgtggctggtcctaattgagaggtgctataagacataccatattttgaaaacttccagtgaaaaattgtaaaatacattcttaataatttttatattgactacatgtaaaaatgacatgtatatataggataaataaaatgtattatttaaattaattttaccttttttttttaactttttccatgtggttacrttaatcagatcagcatgcaacagaaaccacattaggtacctcaaccaaataggtatttctctttctcatgtttctagaggtgggcactcctggactggagtggcagtttcccgacatcatcaacctccagactctttctgcctttcctgtttcaccatccttggggtggggcttttctcttcctggtcactttctagtcaaa

SEQ ID NO: 690654 - DNA, 424 bp, Homo sapiens
aaattcatgggctattgaacacttgaaatgtggctggtcctaattgagaggtgctataagacataccatattttgaaaacttccagtgaaaaattgtaaaatacattcttaataatttttatattgactacatgtaaaaatgacatgtatatataggataaataaaatgtattatttaaattaattttaccttttttttttaactttttccatgtggttacgttaatcagatcagcatgcaacagaaaccacattaggtacctcaaccaaataggtatttctctttctcatgtttctagaggtgggcactcctggactggagtggcagtttcccgacatcatcaacctccagactctttctgcctttcctgtttcaccawccttggggtggggcttttctcttcctggtcactttctagtcaaa

SEQ ID NO: 690655 - DNA, 2715 bp, Homo sapiens
tgcatgagcattttacataataagctgtttttcatattgatgcaaaagttattctaagtttattgagaatgttttaattaaaagactaaaacacttatagaaatttataatgtttgtgtggtcaagtgcactatttttttcttttttacatttcttccaacactttcaagttcagaaactacccccgatccctttttacttcctctcacttacaactactacaaaggcatatattttttcatcttggtattttaaatttgatttgttatgttctttttactccatattggatttggtacgatgttaactataaaatgaggatctattctgatttatttcctaaacatgtattcaattgtttcagtatcatttactaaataatgatttaactcgtagattttgatgcctactttatgacagattatattctcacaacatctctcctcatgaaaaccagaggagtagggaaaaagcaccccacccacacccttctacacacactgcaaccaaatctatcaatttaataattgacagttgtataaaatttagtcttttcacctggtcaactattcttcattttctcaaatcttcctttagcgcattcagtagattttctgtagttttgaaccaagcttgggtattacctggactgtgaacaacctaaccgggagaaacatccaacatcctgcagaaaccccatgaccagccactgcgtgccacttcgccactttgacagtagcaccagaatttaagaactccttcaaactacagaaaatcaactgaatgaacgaaaagaagtcctcacaatgctgagtcagattattatagttatagtaattctttccaacacttgtaatttgtagctcttagaacagcatgctggagtttccatgtggctgccccatgattttgtccatgacaacttccttattttttttttagcaataaatatagtacaaatttgcacaccttttttcatgttcagttaccctatcattagtacactatgcagcagagactgtatttttacagctatttctgttcccaccattcttcaactccagccgaacaggattatttgttaatccttaaacatgctgtgtactttctcccctccattcctttttctatgccattcgctgaagctcacaaacactatgccacatcctctctcctcatcttctgtccaaatccaaaccaacaatgtttgacatacaggaaataacctaatagttagataaagatatttaaattcaatagaatattatacaataaccaaaaatgaacaagagggaaaagaggaggagaaatgtttactaaaatatgcataaacaaattctatgagtaacttgattataaataggtatgttggtcaggctttgatcagcatgacataagggctacaggaactagggtagccatgtcagggcctagattctgagacttgtccttgctaaaactaactctctgtctctcatatctcctcttccatttctcattgttacttttttctactttacataagtctcttccatcacagacagactttctccttagagattaagggaggattatggcagataatggctaccagaattcacaaatctgtgagccagtcctaaattttaaaaatcccccagggagactctgacaggtcagaattgacacacagccccaccttagaccaatcaccatactcataggaatggctaccaggagtggtcagacctagaacaagagccctttcctgtcatcagagatgagggtaccatgattgacaggctcatcagaatcacctgttggagtggagaagcagtagtttcccaaaggaaatgtgtgtgtattggagtggaaagaggggagcagaagattagagcagaagcagccaaggtgctgagcagacaagaaaaacaacagttgcattctacaaattggcatgcatggccatctgtgaattacccctgccactgctacagcctcctttttcatcactctgtacctctcatcctgtgttagggatattctgaactaattagagttctgtaacttctgggctccacctttgcacatgttgttccttctttctctaagccttcctagtctttctgcctctacctcgctaattccaactcatacttcagctcatattgcagctatcacctgctctaagaagcctatgaggattctatacttgcccccactcagagttttagaatcccacacgtgcttatagtgcttgaagcttacctctagcacagctcataccatgtcatattgtgatacactccagctagtttaagcagaacaggactattacaagatccaagttagcttacagaatttctgggaagctggggagccaagcttgggtattactcggactgtgagcagtcaggagaaacatccacaatgatgcagaaaccccatggccagccactgcctgccacttagccacttcaatactccaccagaatttgagaactcctgcaatcactgtccctagagaactgagcacctctactgcccttccggccaccagaagaacctgtggccaccagytcatagtagttgctttcatcttccaaatctctgcttggcagaagctcggtcatgtgaagaatctagatgcaagggaaactgagaaatgtagtctttttcatgacaaacagaaggttgagtcattttgaatgagccaatttcccagtcttccaccaa

SEQ ID NO: 690656 - DNA, 624 bp, Homo sapiens
cctgttgtcccagcttttttatcagtcagactcccatgggcrttaatctatatttcacacatccttaatcttttgatgcccaagcttcctttcccatctaggtctacaatctacttcctcccacccaccatttctctctgaggacaaagttttttcccttttttttttttccatccaaatgccaccccccaaccccaccctttctttcctttctgcccactacctttaactttacctttgttcgctcagtgacacaagaaaggcaggtttcctgtgtttcgggagactgtcactataaggtaaattatgcttttgctaatactccctagtgctacaggcttagcaaaataaatggcatgcccagaacaagaagttttaaactgacacagcctgtgatctgtttacatgccaacttagtggaattcctaagcagaaagaggaaaaaaggaggatagctaaaagtcggtaaagcatatcttgcttcagctaaatgaaatactagaatactgttaatttcttcaattgatcaccttattatcaaaggctataaatacttttaaagttataatgtatccttgtttctctctcaaactcacacaaacacacagatacccaggagaaaca

SEQ ID NO: 690657 - DNA, 681 bp, Homo sapiens
tctacttgccagagtagtaagctcttggtcatctttttctgccatttttttgcaagaaaaaatatatttcagtaaaaacataataaatattatggatcatcttctagaaaggataaatattttatatccctttcaatataagtgtgtatatttagagggaactgtgcatctcaattatggaaacttatttgtttttttcatcagcatasagataaattaatgcattagtattgtctgaaactgtaacaaattcttgacatgatccccatcctgccctcactggggataaccactattctccattataactaaacacttatttattatataagacatattatatcttgaaacttattctgataaaaacagtattcaatgaaagatattaaaatgtaacattttagtgactattcttgttaataaacttgaatagtctcaatgttgtagaagataggcattgtattgcctgtttattcattttgtttaataccattgttcactttagctggaaatattatcactttgagggatctctctttccttccttatgatatttgaacagagaaggcagcaggaagcagaggcaccttttttctctgagactctgtgaagtgtacatctgtacctgtgccatctatgcttgttctttgtatttccaaaagccaatgtgaaaatgggtca

SEQ ID NO: 690658 - DNA, 681 bp, Homo sapiens
tctacttgccagagtagtaagctcttggtcatctttttctgccatttttttgcaagaaaaaatatatttcagtaaaaacataataaatattatggatcatcttctagaaaggataaatattttatatccctttcaatataagtgtgtatatttagagggaactgtgcatctcaattatggaaacttatttgtttttttcatcagcatacagataaattaatgcattagtattgtctgaaactgtaacaaattcttgacatgatccccatcctgccctcactggggataaccactattctccattataactaaacacttatttattatataagacatattatatcttgaaacttattctgataaaaacagtattcaatgaaagatattaaaatgtaacattttagtgactattcttgttaataaacttgaatagtctcaatgttgtagaagataggcattgtattgcctgtttattcattttgtttaataccattgttcactttagctggaaatattatcactttgagggatctctctttccttccttatgatatttgaacagagaaggcagcwggaagcagaggcaccttttttctctgagactctgtgaagtgtacatctgtacctgtgccatctatgcttgttctttgtatttccaaaagccaatgtgaaaatgggtca

SEQ ID NO: 690659 - DNA, 610 bp, Homo sapiens
gtggattcctgtagatctttatttctcaatctccctaggaacaaatgcaaagacacaatttctgaggagtaagaaacaactgagaaatagttactaggtcatattttacattaaatattaacttcaaaatatttcaraattagagtaagaaatatgggaggtttcaaggagatataagataaggctctgatactcaaataatcattttttctatatgaggaaatgaatcataagttcatgcaacaactagagaacaaatctctaattctccagtagagtgttataggtcacagtgcattaggagagataaaaagtattgtaaatattcacaagaggagaagatatctgtatcttaaagctgcattgttaatgggtgttacatggcagacttgcattatttttgttttgttttgtttacagcggactgagatcatctatagctctgttcagacgccacagtgaagtgtgagaaagacaaaaatccagttgcatatatcaaatgccttgcctgccagttaaaatcaggcccttaaaagcacataaacattgatttctgtattttggttccttccttttagacaagaaaaatctgaagaaaatggatgatgct

SEQ ID NO: 690660 - DNA, 626 bp, Homo sapiens
ttgtatgttaaaatttaatcttacatatttaagattaaataaaggtggttctattcattttcaaaatacctaagggaaagatggacttcaagcctacaggcacrtgggaaaaattagtaattctaggttattttatatgatgaccctacagtttattatattaaatattgatgtcttggtatctgaatctataaaattagaataacattaggcattttctagattatcctgaaatatgaatacagttgcatgcacgcacatataagtttaaaataatttgcttccttgacatataatgcatcatttcagtatctcagtatggctataaggatttacgttttcattaatttcattatttcgtttactaccatttattttatttttttagagctcacctttagcaaattatttagcaataaagctagatttgcatttaagtctacttacaggcaaataacatagcatagtaaattcacatcttttttagatttttttattgcagacatttgttgtgcatttgcacctcttaaaaagtgcaaagtagtgaaagatttgcacacgaatggacgtaagctagaactatatatgtctttttcatcttagcttgtttcaaaatattagctaac

SEQ ID NO: 690661 - DNA, 626 bp, Homo sapiens
ttgtatgttaaaatttaatcttacatatttaagattaaataaaggtggttctattcattttcaaaatacctaagggaaagatggacttcaagcctacaggcacatgggaaaaattagtaattctaggttattttatatgatgaccctacagtttattatattaaatattgatgtcttggtatctgaatctataaaattagaataacattaggcattttctagattatcctgaaatatgaatacagttgcatgcacgcacatataagtttaaaataatttgcttccttgacatataatgcatcatttcagtatctcagtatggctataaggatttacgttttcattaatttcattatttcgtttactaccatttattttatttttttagagctcacctttagcaaattatttagcaataaagctagatttgcatttaagtctacttacaggcaaataacatagcatagtaaattcacatcttttttagatttttttattgcagacatttgttgtgcatttgcacctcttaaaaagtgcaaagtagtgaaagatttgcacacgaatggaygtaagctagaactatatatgtctttttcatcttagcttgtttcaaaatattagctaac

SEQ ID NO: 690662 - DNA, 579 bp, Homo sapiens
tgatttcacatgaataaaacctagaatttgactaatattgaaagaatacataggacataattattcaaaaagaaatttattaagcccaactacatgaaaggtattgtatttttgctgtataagtacagagaaacaatcatcagtggggcactatctccagcaatccacaatacaaaatttcagtctatttaataatgacctagaaatttcatactaatctgcacacttggtatttaaacaaagtcatttttatattatatgtcttattaaaatagtagcaygtgactgaggtaatagtggtggtataaatatgaatcttgcaatgtgcccatccactcaaagagaaaaaagagtacataaaactattaaaattcatacacttactatcaacttaaaacagaatgctcaattctattttctgtcagtgaaaaaataaacagcacattttatcaaggtttggccatgcttccagaggcagggcttggactctggattctggagcagaccgaatagtagctaaaacagggccagagcagaagcagctttctaatcagatacactcaccaatgtgccacttca

SEQ ID NO: 690663 - DNA, 1903 bp, Homo sapiens
  misc_feature 774, 775, 776, 777, 778, 779, 780, 781, 782, 783, 784, 785,786, 787, 788, 789, 790, 791, 792, 793, 794, 795, 796, 797,798, 799, 800, 801, 802, 803, 804, 805, 806, 807, 808, 809,810, 811, 812, 813, 814, 815, 816, 817, 818, 819, 820: n = A,T,C or G
  misc_feature 821, 822, 823, 824, 825, 826, 827, 828, 829, 830, 831, 832,833, 834, 835, 836, 837, 838, 839, 840, 841, 842, 843, 844,845, 846, 847, 848, 849, 850, 851, 852, 853, 854, 855, 856,857, 858, 859, 860, 861, 862, 863, 864, 865, 866, 867: n = A,T,C or G
  misc_feature 868, 869, 870, 871, 872, 873: n = A,T,C or G
cagcctttaattataataagtagtattataaaaattgtgaataatacatatacatattcttccttccccataagatactttatcttatatataaaatacacctattttcattttcctatttgtgtctagagaacaatttaaaaatatggtctgcatttattttacttcagtgatctttgctgaaaaagtttcaattgattttacagggtattggatatttatacaacctgaaagaatcatagaatttaagaactggaagaaaacttggatattactgttttatgtcataaaatagggcctaggtcaaataaaaataactaacatttcttgatcatttactatttgttagaaactttgctacaattaattctcacatcaaacccatgacccaggtaatagtttaatcttgtttattttttgcactaaatcgatggtatagatgctattaatattagcaaccagcagttttcgacagggatgattttgcccctcaaggtaaacctggacgtttctggttgtcacaatgatggggtaagggaaagtggcgtctagtggataaagacccgagatgctgataaggaaagaatgggataacttcctgaagcaaagaaatgtccaggccaaaatctcaatgtatcgaggctgagaaagattattatagaagaagaaactggatctttgaaaatttatctttgcctaagactattaagcaaacaatgacaacctaatagtttgtggtaaaaactttggggttaaaacataataataataaannnnnnnnnnnnnnnnnnnnnnnnnnnnnnnnnnnnnnnnnnnnnnnnnnnnnnnnnnnnnnnnnnnnnnnnnnnnnnnnnnnnnnnnnnnnnnnnnnnncataaattaactgggtgaggtggcawgtgcctgtagtcccagttactagagaggcagaggtgggagaatcccttgagcctgtgaggttgaggctgccatgagtcaagatcatgccactgcactccagcctgagtgagaaagtgagaccctgtctcaggaaaaaaaaaaaaaaaaaaaatgtcaccagtggcttagggcactacatacaacctggtaactgagacaatgtttggaagtagatatgaccataccaatatcaatatatcaaatatataatgaaatagattatagtaaatgacacatagcaaatatggataagaaaaataattatactgttacttataccataatcagaattaaatatgggtttcttctttgatgatataaagaacccaggggtgtgaggcttttctaatttctagtggaaacaccagcttgtctttgccactgacacaacttaagacacgtttggcaaaaaaacataaacatattatgtctcttgtgtgtaattgccaccatttcctcgctggccaaataccactaattgtgcctctcaagtgtattattttggcattagctcattaaatttttatttaagtttacaaattagagccaaaaattcacaactttcagtttttaagagacaagactccaaactctgcctcgtaaaactctaagatttctgagagaacaactggtcttctcaggtgatagtttataagggcctgacatggcatctaacaaatgacgggcagttcttgaaagacttgacttttttcaggaattatcgcagaaccaaccacacatttattggagccattgtgctattttttagaccaggctatgttcttgttcctcttttttttctttgcagcagaatttaaggctcaatttggtgccattacttcttttaaaaagacaccttccaatctatcctttgaagctctttccctagtagttgctgtggttgatgataatacctgtccaaccttgttcttatctgccctcaaagataggcgtgaagggtcag

SEQ ID NO: 690664 - DNA, 1903 bp, Homo sapiens
  misc_feature 774, 775, 776, 777, 778, 779, 780, 781, 782, 783, 784, 785,786, 787, 788, 789, 790, 791, 792, 793, 794, 795, 796, 797,798, 799, 800, 801, 802, 803, 804, 805, 806, 807, 808, 809,810, 811, 812, 813, 814, 815, 816, 817, 818, 819, 820: n = A,T,C or G
  misc_feature 821, 822, 823, 824, 825, 826, 827, 828, 829, 830, 831, 832,833, 834, 835, 836, 837, 838, 839, 840, 841, 842, 843, 844,845, 846, 847, 848, 849, 850, 851, 852, 853, 854, 855, 856,857, 858, 859, 860, 861, 862, 863, 864, 865, 866, 867: n = A,T,C or G
  misc_feature 868, 869, 870, 871, 872, 873: n = A,T,C or G
cagcctttaattataataagtagtattataaaaattgtgaataatacatatacatattcttccttccccataagatactttatcttatatataaaatacacctattttcattttcctatttgtgtctagagaacaatttaaaaatatggtctgcatttattttacttcagtgatctttgctgaaaaagtttcaattgattttacagggtattggatatttatacaacctgaaagaatcatagaatttaagaactggaagaaaacttggatattactgttttatgtcataaaatagggcctaggtcaaataaaaataactaacatttcttgatcatttactatttgttagaaactttgctacaattaattctcacatcaaacccatgacccaggtaatagtttaatcttgtttattttttgcactaaatcgatggtatagatgctattaatattagcaaccagcagttttcgacagggatgattttgcccctcaaggtaaacctggacgtttctggttgtcacaatgatggggtaagggaaagtggcgtctagtggataaagacccgagatgctgataaggaaagaatgggataacttcctgaagcaaagaaatgtccaggccaaaatctcaatgtatcgaggctgagaaagattattatagaagaagaaactggatctttgaaaatttatctttgcctaagactattaagcaaacaatgacaacctaatagtttgtggtaaaaactttggggttaaaacataataataataaannnnnnnnnnnnnnnnnnnnnnnnnnnnnnnnnnnnnnnnnnnnnnnnnnnnnnnnnnnnnnnnnnnnnnnnnnnnnnnnnnnnnnnnnnnnnnnnnnnncataaattaactgggtgaggtggcaagtgcctgtagtcccagttactagagaggcagaggtgggagaatcccttgagcctgtgaggttgaggctgccatgagtcaagatcatgccactgcactccagcctgagtgagaaagtgagaccctgtctcaggaaaaaaaaaaaaaaaaaaaatgtcaccagtggcttagggcactacatacaacctggtaactgagacaatgtttggaagtagatatgaccataccaatatcaatatatcaaatatataatgaaatagattatagtaaatgacacatagcaaatatggataagaaaaataattatactgttacttataccataatcagaattaaatatgggtttcttctttgatgatataaagaacccaggggtgtgaggcttttctaatttctagtggaaacaccagcttgtctttgccactgacacaacttaagacacgtttggcaaaaaaacataaacatattatgtctcttgtgtgtaattgccaccatttcctcgctggccaaataccactaattgtgcctctcaagtgtattattttggcattagctcattaaatttttatttaagtttacaaattagagccaaaaattcacaactttcagtttttaagagacaagactccaaactctgcctcgtaaaactctaagatttctgagagaacaactggtcttctcaggtgatagtttataagggcctgacatggcatctaacaaatgacgggcagttcttgaaagacttgacttttttcaggaattatcgcagaaccaaccacacatttattggagccattgtgctattttttagaccaggctatgttcttgttcctcttttttttctttgcagcagaatttaaggctcaatttggtgmcattacttcttttaaaaagacaccttccaatctatcctttgaagctctttccctagtagttgctgtggttgatgataatacctgtccaaccttgttcttatctgccctcaaagataggcgtgaagggtcag

SEQ ID NO: 690665 - DNA, 1409 bp, Homo sapiens
ttgaaagtacctatcctcatgagtctgaggtggtatctcattgtagcactgatgtgtatttttctaataattattgatattcagatttttcatgggcttatttattatttgtatattttctttaaagtaaatgtttattcaagaccttttctcatttttaaaytgtgttgcgttttatgttgttgaattgtagaagttcttaatatattctgaatattaactccttttcaaatatatgatttacacatattttctcccatttcattggttgcgtttttacacacattgattgtgccttttgatgggaggcatttctaatttttaagtgatctaatttatctattttttcctttgttgactgtgctttttgtgtcatatccaagaaatcgttgccaaactcaatgtcgtgaagtctattcactttcaaaaatgtgctttactagaacgctgagaaaattttaatgttggtgcagtttttcatgtgtaagttttacctatttcatcttcctgcttcatctttcctcagcagttgggactacacactcgctctgtcatccaggctggggtgcagtggctcaatctacacatacatcactaaatttcttcaatttttcataaactgcacaagtaaaatgacacccaatctctgcaaataatgatctatgctgttaaaataatgcagagcaattctatcaaatgttttattttttctatgagatctgtcttcattgtacatttaattttaatatttgaatgacaataactctgttatactgcaataggcaataaaaacagatataagctcttctactaagtgaagtattcatgtagtttttctcagtaaaaaaaaaaaaaatatatatatatatattcgtacaccagtagtgtattattgctttctggtgctacagaggagaagttaaaatctaaaacatgggagagtcttcctatccatattaatcaattttatctcatccagacatcagttctgtcccctgtttctcgagaaccctcatggtccaattgcaagatgctttctacaggcttaattattcatattagtaaattactgcaagtactttggtgtacgatccattttgtcacgtcagtagaaatttgaaataattactggatttcttgcaggaggcaatttggaagtcaaatcttcagaaactataatatcatacaaagcatctcactcacaatttcagggtagagtgacaaggccagtgaagaaaccctagataaaaatcagtactgatacatggccacccacaagccagtgttatcatcgttggcttaaaataatgcatattagctcatattttatggtttctctgattcccagttacaccacctaacaagtatgtgaattttgattgtgttatagatcctcccaggtcctcagc

SEQ ID NO: 690666 - DNA, 1409 bp, Homo sapiens
ttgaaagtacctatcctcatgagtctgaggtggtatctcattgtagcactgatgtgtatttttctaataattattgatattcagatttttcatgggcttatttattatttgtatattttctttaaagtaaatgtttattcaagaccttttctcatttttaaactgtgttgygttttatgttgttgaattgtagaagttcttaatatattctgaatattaactccttttcaaatatatgatttacacatattttctcccatttcattggttgcgtttttacacacattgattgtgccttttgatgggaggcatttctaatttttaagtgatctaatttatctattttttcctttgttgactgtgctttttgtgtcatatccaagaaatcgttgccaaactcaatgtcgtgaagtctattcactttcaaaaatgtgctttactagaacgctgagaaaattttaatgttggtgcagtttttcatgtgtaagttttacctatttcatcttcctgcttcatctttcctcagcagttgggactacacactcgctctgtcatccaggctggggtgcagtggctcaatctacacatacatcactaaatttcttcaatttttcataaactgcacaagtaaaatgacacccaatctctgcaaataatgatctatgctgttaaaataatgcagagcaattctatcaaatgttttattttttctatgagatctgtcttcattgtacatttaattttaatatttgaatgacaataactctgttatactgcaataggcaataaaaacagatataagctcttctactaagtgaagtattcatgtagtttttctcagtaaaaaaaaaaaaaatatatatatatatattcgtacaccagtagtgtattattgctttctggtgctacagaggagaagttaaaatctaaaacatgggagagtcttcctatccatattaatcaattttatctcatccagacatcagttctgtcccctgtttctcgagaaccctcatggtccaattgcaagatgctttctacaggcttaattattcatattagtaaattactgcaagtactttggtgtacgatccattttgtcacgtcagtagaaatttgaaataattactggatttcttgcaggaggcaatttggaagtcaaatcttcagaaactataatatcatacaaagcatctcactcacaatttcagggtagagtgacaaggccagtgaagaaaccctagataaaaatcagtactgatacatggccacccacaagccagtgttatcatcgttggcttaaaataatgcatattagctcatattttatggtttctctgattcccagttacaccacctaacaagtatgtgaattttgattgtgttatagatcctcccaggtcctcagc

SEQ ID NO: 690667 - DNA, 634 bp, Homo sapiens
acagaaaactatataaaatatgtttccaatttatataaagttaaaaccatgcaaaattgagcaatgtgtttttactgttacttaggttcaggaatttttttttcatctaaaatcctgctgaaaaaaattaaataatactaatgtgactaacagattaaagtaaaatttttctatgattatttgctaccaatctcatatactgaaaaacttttgggattcaaatttagcttattacaaaaaaagttatctacagacagaaaaatctctcatgcatccatacaggtgaaaagattgtttaaaagatcatgtccttcaatatttaagaaatatcatatgaccttatttatatgtggaatctaaaagagttgaactcatagatgtaaagagtggaatggtggttaccagaggctacagttgcaggsgggaaggaaagatgttgttcaaagggcataaaatttcagttacatacaaggaataggctactgtactgtacatggtgactatagttaataacaatgcagtgtattcttgaaaactgctaagagtagattttaagtgttctcaccacaaaaaaaagaaaaataagtacatgagctaatgcatttgttaattagtttgattaagccattccaca

SEQ ID NO: 690668 - DNA, 1462 bp, Homo sapiens
ttgccctttaacacagcaattccccttctgagaatttatcctatatataccatacatttgcatgtgtgaaataatatacttacaaggttattaaccataacattgtttttaatagcaaaatattggaactacttcaaaagtccattgatagagtctgtttacataaactttagcacaactatgtgatggcatcccttgaggttataaacaaacaaacaaaaagagaaaacattctgtgtagtgatatagaaagaactccaatgcatatcattacaccaaaacaaaaaaaactactaaacagaatgtatacttcactactattgcataataaaggaagaaaccctaaaactaaatatttctatttgcctggttactactgaaaaaactctagaaggattattaggaacagtgccgatagaagtgggtgaaactgggtgcatgtaggatggactaggtatggcatcgtgcttccaacatgctgtccctctacctaaaatgtttccctgcttcccacccttcacctctacctctgcatcatcacactcagtctggctggcttcatctcatccttcaagtctcagctcaaataacaaccacccagaaagtttttccttgaccagttttctaggtaactacatacccatccctactcctaaaaacacattacatctgcttgatttctttagcacatttatcatatgttgcatttatatgtttgtttgctatttaaaactattcttccccactagacagaagtcttcaaataagcagtgacctatccctgaatttctactgctgaagagactatctgagatctaggcacatgtggtaagcagtaggtatttgttaaaccgtgaaagctattatttcctacctttgcaarctcagtttatgttaagcaaaagtagggcataaatttgaaaacttaggctagacctagaatataaagactcttgcttgcagggattttttgtcagaggagtccataaacttgggtgagaaaaaaaattacatccttattatcattaacctaattataattaacctataaactccttcatgaaagaaatgctaaatttgaaagtaggctacaaattccagtaaggttgtcaacagaaagcacagatatgttcatcacatgatgatgtttgaaatatctaaaaatattgtttatgcttatcaacacttcaaaattaaggtagctattagtctgccattagatcatattatttaaggtgctaataaaagatacataactttttttaatatcttgataactatatttcaatataaatgctttattttgtatttttattaatattttaggtgcattgagattctgagaagggttcatttaatcattaaagaattcaaataaaagtgggagtggagagcagagtcaaagcaataactttgaaagactgaacaattgtacaactaaagaaagactagtgaagggaaa

SEQ ID NO: 690669 - DNA, 646 bp, Homo sapiens
cgcgacctgcatgtcccactcgggccccgcgcccccacttcgccgctgaaggcgtctcgcggtgactttaccttgcctggggtggaagtcaacttcccaagacctggtgatgaagagcgagagatggtagagcagcccagtcagccacttggccacccacatggttccaccctggggaccccgatcggggaggcccaccagagccgccggcagccaagccggcttccctcgcgctccgatccctctcctccctctcgcccgccgctctccgcgcctcagcagcctagggaacagcagcgcgggccctgggccggctggtccagccacaccgcctgtctccgctcgctgagccgctgcttcatcgcactgcagcctcactccccttcctgcgcccgcgctgccctcagaaactctctgctcaggttcagctcggcgcggggaagcaactcgacctagcaggaatsgtgccaatatagccaccccggaccggcgagcgccgcggagagcccgcccctatgggctgttcccggccaatcagcgggaggcgcggcccctgctcgcttttccccgcgcagccccctcccttctccactcagccgcaaggggactgcggtacccttctgctgccccagtgggcgcgcaactt

SEQ ID NO: 690670 - DNA, 618 bp, Homo sapiens
gacctcaggtgatccacccgcctcagcctcccaaagtgctggggttacaggcgtgagccaccgcgcccggccagtgttttgtgtatttatgattatatagaatggctacaaatggccatctgctttggagttgtctaccttttgtgaaaaaatgaaaatagactattgcctagcaattaagtattcaagcatgtattttgccacataatttattgtgagaaggttatcaatgtcaaataaaatgctttcattatttgcttctrtttgtctgtcttcctgaccagttcatttttccttccagtgaagccatcttgagctagggttttctttgtgggtagttgttaattttttttgtagagacaaggtctcaccatgttgcccaggctggtctcaaactcctgggctcaagcagtcctcttaactcagcctcccaaagtgctgagattacactcatgagccaccacactggtccgaagaaatttttttttttttttttttttttttttttgggagatagcatctcactctgttgccaggctggagtgcagtggcacgaccttggctcactgcaacctccacctcccgggttcaagcaattctcctgcctcagcctcccaa

SEQ ID NO: 690671 - DNA, 660 bp, Homo sapiens
ttgaatcaatggtggaaagaagattcagaggggaaaaaaaaaaacaacttttaaaaatacaaataaaacaatatagtgtaacaagtwcttatatcgtattaggtgttgtacgtactgtagagatgatttaaagtatagaggggaatgtagattatatgcaaatactagaccattttatatccaggaatatcagtggattttggtatccacaggaagtggttctggaacttttccactgccaataccaagggaagtctgtatgaatgattaaacagaaaaatctctgaaacttggatttattcccgggttagttgctgatgtcatgtagtcactgaaagtaagaatgacattgcttttagaattcagcattaaatacttcatcttttttcaagtggagaaaaaatataatgagcagaacccacctccacattttaatcattaggaataaaaaccacttacgatggtttaaaaatactacctaaataaaaaagaaaaagaggatcttacttctgggtaattaatagctcaagatccttctgtttgtcccaacccctaagaaaaaaaaaattatgactaatcaaggctcaaggaagctcagtcattttacaaaaatattttaggtacctgttttgttttttgttttttgttttttgcaagcag

SEQ ID NO: 690672 - DNA, 660 bp, Homo sapiens
ttgaatcaatggtggaaagaagattcagaggggaaaaaaaaaaacaacttttaaaaatacaaataaaacaatatagtgtaacaagttcttatatcgtattaggtgttgtacgtactgtagagatgatttaaagtatagaggrgaatgtagattatatgcaaatactagaccattttatatccaggaatatcagtggattttggtatccacaggaagtggttctggaacttttccactgccaataccaagggaagtctgtatgaatgattaaacagaaaaatctctgaaacttggatttattcccgggttagttgctgatgtcatgtagtcactgaaagtaagaatgacattgcttttagaattcagcattaaatacttcatcttttttcaagtggagaaaaaatataatgagcagaacccacctccacattttaatcattaggaataaaaaccacttacgatggtttaaaaatactacctaaataaaaaagaaaaagaggatcttacttctgggtaattaatagctcaagatccttctgtttgtcccaacccctaagaaaaaaaaaattatgactaatcaaggctcaaggaagctcagtcattttacaaaaatattttaggtacctgttttgttttttgttttttgttttttgcaagcag

SEQ ID NO: 690673 - DNA, 660 bp, Homo sapiens
ttgaatcaatggtggaaagaagattcagaggggaaaaaaaaaaacaacttttaaaaatacaaataaaacaatatagtgtaacaagttcttatatcgtattaggtgttgtacgtactgtagagatgatttaaagtatagaggggaatgtagattatatgcaaatactagaccattttatatccaggaatatcagtggattttggtatccacaggaagtggttctggaacttttccactgccaataccaagggaagtctgtatgaatgattaaacagaaaaatctctgaaacttggatttattcccgggttagttgctgatgtcatgtagtcactgaaagtaagaatgacattgcttttagaattcagcattaaatacttcatcttttttcaagtggagaaaaaatataatgagcagaacccacctccacattttaatcattaggaataaaaaccacttacratggtttaaaaatactacctaaataaaaaagaaaaagaggatcttacttctgggtaattaatagctcaagatccttctgtttgtcccaacccctaagaaaaaaaaaattatgactaatcaaggctcaaggaagctcagtcattttacaaaaatattttaggtacctgttttgttttttgttttttgttttttgcaagcag

SEQ ID NO: 690674 - DNA, 1089 bp, Homo sapiens
catatatacacatatacacacatatatatacatatatatacacacacacatatatacatatatatatatagagagagagagaacattactctgtcacccaggctagagtgcagtggtatgatctcagctcactacagccttgacctcccaggcttaagcgatccttccacctcagcctcctgagtcgctacgactacaggcacacaccactatacccagctaattttgttttttaatttttgtatagacagggtctatatattatgttgcccaggctgatctcgaactcccggactcaagtgatcctcccaccttggcctcccaaagtgccggattacaggccaccgtgcctggcaaaaacaataaatatattttttaaacttacaaaacaaaattatgtctttctagtacataccaaaaagaggaaggagaaaattctagaaaaatttatacctcattgataacacttatcatctaggaaagggattggtatttgaatgagggaataaaaaggccttgaactttgtctgcattatttagattcatttacagtgtgaacaaattcatgtattattcatgtaataatctgtaaaaaattttgaatcaatatacttcttaaattcttaatggcgtcccatcatctagagtagggggttggccaactataaccctgcttgtcttttaagaaaagtttatttttaatatggccttgctcattcgtttacatattgtcagkgctgctctcgcacaaaatggcagggtggagtagctgtaagagagaccctatcaggccctttagggaaaaactttgcagaccggttagctagggctgtgattctcagctctggtgggaattctagtaggcattcaaatcacctgagacgttaaaaaaaaaaaaaaaaaaaaaaaactcacgcccaggctccacccccgcaaaaaatgacttaattggtcaggggtgaggcttgagctttaattgtttttcaaaatgtcccaggtgattttaatgagcagccaggcttgcctgctctgacttttaggattaattccaaactcctgagtgtggtttaaaaggcccttcgtaacctg

SEQ ID NO: 690675 - DNA, 869 bp, Homo sapiens
ttcctttctgagtatgaattcaaatggacaagttgcccttttccaaactaatccttaattagcttctgtcaagaacctaagagatgccagggcacaggcaccctccaaatcaaaatacattctgattgtcattggagggagaaataggataaatgaatgattaatcgcacttgctacgtcaaatcatatggcagttgttccaagtttcattttcaaaagattaaaaacaacttgtttcaattctgtgctaattggcaggcaaattttctttctcgcttggtggcaatgaaatgtggatattaaaatgcacagctgattaatttctgggtttgaatagaggaaaaaggagaccttggtctacagtcttaagtttttaaatatgatgcattgacatcatgaagttgaaagcagtggaagcttctggaatgycaggccagaaacaaatcctgaaaggaattatgaccttgaagcttttattgagcacctaccagattgctgttacactggagatttttaaaaacgagaatagtccttgccttatagttgatgatacagggcatacagtaaaatgctaactatctggtgccagagatttccttgcggtaaaagaaagagctgaatgtgccctccatttcacagcctagttcccaagacaggctcttagcagacacttcctggcagtcccccttgtgtctggtcagctattaaccttagaccaaaagaacaagaatagcatgcatatcaatttcttgtggctactgtagcaattaccacagatttcatggcttaaaacaatggaaatttattttctcacagttatggagaccagaaatcccaaataaatatgactggactgaaaccaaggcagt

SEQ ID NO: 690676 - DNA, 618 bp, Homo sapiens
tccaagtgcaataaaatgacctagggggaggaactgcatatacaaagggggagggaactactttagattacctcttcagcaatgaattctataaggaactatttatacagaggcttgaagaaggaggccagaagagtgaggcaatataagtagaggaaagaggatctaagagtgaagaaatagcacttgtaaaggcctggtttaraaaaaatccatatgctcaaaaaacttgagctaggaaaagtaatgtgctggattatttatcctacatttgaaaaataaatgaagctggatagttggtattattatgtatattatgcaaaaagtagtctgtaatatggaaactgactcacctaacaatttgtgcaaatggtgcaaaagcaacataaagcaatgatccactaaaacctagattagggggcatgtcaacactgttatcatggtttcaaaatcaagatttctttttcttttttttggaggggggatggggtatggagtctcactctgtcacccgggctggagtgcagtggcgtgatctcagcttaccacaacctctgctccggggttcaagcgattctcctgcctcagtctcccaagtagctggaattacaggcaccc

SEQ ID NO: 690677 - DNA, 617 bp, Homo sapiens
cagccattctacacacacacacccacacacacacacacagcataacactatatttgtaaatatgaaagaattgaagaaacagagaccttaaaatgaaagaacatgaagaagagaggaaraaaatttcttctatctccttccaactagacagtgagtatttatttcagtgaaaacccaaaaacattttcttgcatttctgtggttctagtagcatcactttcccatctttgaattatacacaaagacatggaatataatgatttgcttaacccaatcaggacatgttcttgcatctgagatttataccatgtccactccaaatgcatagagccaatataggtagtatgctttcccaaaagaaatttgtaccattagaaagatgaaatgaaaactcgttctattgcttgtcaagacaccgttagtggaatgaaaggcctattagaagatttgaagattcttttgatcatagaatacaatgcagtgatatttgaataaataaatagcaaaactgcttgttacagctccaaatgagggaaggctgcatgcagggccacaaagagggttgcaccagggacagagtaacaaggaactgggactttcgggagcaggttatgcat

SEQ ID NO: 690678 - DNA, 651 bp, Homo sapiens
tgtcacacagactggagtgcagtggtgccatcttggctcactgcaagctctgtctcccaggttcacaccattctcctgcctcagcctcctgagtagctgggactacaggcgcccaccatcacacccagctaattttttgtatttttagtagagatgaggtttcaccgtgttagccaggatggtctcgatctcctgacctcgtgatctgccctcctcagcctcccaaagtgctgggattacaggttgagccaccacgtctggccacatgcaccaatttcttaaataaattccttcaaataaacctctgcctctctctctgtctctgtctctctctaatccaaaatctgaagggtagcctagtaggttgtgaagaattgatgttggaattcaatatggaagacagtctggaagcagaattcyctcttcctcaagagacctcagactgtttactcgtaaggccttcaactgattgaatgaggcccaaccatatgatgcagggcaatacactctactcagtctactaatttacatgttaatctcatctgagaaaatacatccatagcaaaatccaaactggtgtttgaacaaatatcttggtactatgatctagccacgttgacacataaaattaaccatcacagtaatactaca

SEQ ID NO: 690679 - DNA, 1160 bp, Homo sapiens
gagttaagcttttgtataacacatgagttttgacctgctgtgcttaaaccacttcagctctctgttttacttctttactcttctctgtttatatttctttacaatattcccatatcctcatgattcagagtcagagttaactacagtgatgtgccacacaacaacgttttggtgaatgacagactgtatatatgatggagaccccataagattataataccatatttttattatatgtttcctatgtttagatatgtgtagatacacaaaaacttaccattgggttacaattgcctgcagtactcaatacagtaatatgctgtacaagtttttagcctagaagcaataggctataccacacagcctatgtgtgtggtaggcaataccatctaagtttgtgtaagtgcactctatgatgttcacacaatgacaaaatagcccaatarcatatttctcagaagaatccctgctgttaagcaacacatgacagtatttaatatttcctgcttccctttgaatgtgtcttggtggggaagagaaacaactacgagggactcagacacactgtaatggggtttttagacgtgaatttcaaagcaattatgtttaatattttagaaaataagagacaagagaaagaattctgttagtaatacatatacagggaatatatatttgcaacacgtataactgacagactcctacaaataataaggaaaaaatcagacaacccagtaggaaaaatatagcatgggacttgaatagcaatttcacttagtattatagccaaaagtcattagtttgtgaaaaagtgctcagcttcattagtcatccgggaaatgcatgttaaaaatgcaattagctacctctaaatgcataccagaatgtcacaaattgaagagtgataataccaaatgacagtaggaagtggaacagtgggaattctcttgcaatgctgatgggagcataaatttttatatacaacaaacgggaaaaaactttggcagttttttcaatggttaaaaaatatgcacacaaagtacacctaacaatcttacttccaagtttatacccccctaatttttatgtgtatgttcaaatgttttgttgaacaagattcacagcaggctatctatttctcaaagccaaacctggaaata

SEQ ID NO: 690680 - DNA, 1160 bp, Homo sapiens
gagttaagcttttgtataacacatgagttttgacctgctgtgcttaaaccacttcagctctctgttttacttctttactcttctctgtttatatttctttacaatattcccatatcctcatgattcagagtcagagttaactacagtgatgtgccacacaacaacgttttggtgaatgacagactgtatatatgatggagaccccataagattataataccatatttttattatatgtttcctatgtttagatatgtgtagatacacaaaaacttaccattgggttacaattgcctgcagtactcaatacagtaatatgctgtacaagtttttagcctagaagcaataggctataccacacagcctatgtgtgtggtaggcaataccatctaagtttgtgtaagtgcactctatgatgttcacacaatgacaaaatagcccaatagcatatttctcagaagaatccctgctgttaagcaacacatgacagtatttaatatttcctgcttccctttgaatgtgtcttggtggggaagagaaacaactacgagggactcagacacactgtaatggggttttyagacgtgaatttcaaagcaattatgtttaatattttagaaaataagagacaagagaaagaattctgttagtaatacatatacagggaatatatatttgcaacacgtataactgacagactcctacaaataataaggaaaaaatcagacaacccagtaggaaaaatatagcatgggacttgaatagcaatttcacttagtattatagccaaaagtcattagtttgtgaaaaagtgctcagcttcattagtcatccgggaaatgcatgttaaaaatgcaattagctacctctaaatgcataccagaatgtcacaaattgaagagtgataataccaaatgacagtaggaagtggaacagtgggaattctcttgcaatgctgatgggagcataaatttttatatacaacaaacgggaaaaaactttggcagttttttcaatggttaaaaaatatgcacacaaagtacacctaacaatcttacttccaagtttatacccccctaatttttatgtgtatgttcaaatgttttgttgaacaagattcacagcaggctatctatttctcaaagccaaacctggaaata

SEQ ID NO: 690681 - DNA, 1160 bp, Homo sapiens
gagttaagcttttgtataacacatgagttttgacctgctgtgcttaaaccacttcagctctctgttttacttctttactcttctctgtttatatttctttacaatattcccatatcctcatgattcagagtcagagttaactacagtgatgtgccacacaacaacgttttggtgaatgacagactgtatatatgatggagaccccataagattataataccatatttttattatatgtttcctatgtttagatatgtgtagatacacaaaaacttaccattgggttacaattgcctgcagtactcaatacagtaatatgctgtacaagtttttagcctagaagcaataggctataccacacagcctatgtgtgtggtaggcaataccatctaagtttgtgtaagtgcactctatgatgttcacacaatgacaaaatagcccaatagcatatttctcagaagaatccctgctgttaagcaacacatgacagtatttaatatttcctgcttccctttgaatgtgtcttggtggggaagagaaacaactacgagggactcagacacactgtaatggggtttttagacgtgaatttcaaagcaattatgtttaatattttagaaaataagagacaagagaaagaattctgttagtaatacatatacagggaatatatatttgcaacacgtataactgacagactcctacaaataataaggaaaaaatcagacaacccagtaggaaaaatatagcatgggacttgaatagcaatttcacttagtattatagccaaaagtcattagtttgtgaaaaagtgctcagcttcattagtcatccgggaaatgcatgttaaaaatgcaattagctacctctaaatgcataccagaatgtcacaaattgaagagtgataataccaaatgacagtaggaagtggaacagtgggaattctcttgcaatgctgatgggagcataaatttttatatacaacaaacrggaaaaaactttggcagttttttcaatggttaaaaaatatgcacacaaagtacacctaacaatcttacttccaagtttatacccccctaatttttatgtgtatgttcaaatgttttgttgaacaagattcacagcaggctatctatttctcaaagccaaacctggaaata

SEQ ID NO: 690682 - DNA, 1163 bp, Homo sapiens
attacatttcactgttgatagaaatatagactaaattttaaaaaccaaaattatatttttttccttttgatgaattttgggggagtattaacccaaactaggccagtatctcaggctatcaacacatgaaaaacacctacaaatgtgatgtgtttgaaaaattaatatatatatatattttgagcggagtcttgctctgtcacccaggctggagtacaatggctcgatcttggctcactgcaacctcccattcctgggttcaagcrattctcctgcctcagcctcccaagaagctgggattacaggtacacataaccactccaggcaagaaaaattaatatttttacataagcatcaagaagtatctttccctaggaacatcattttctttattaattcacagatggaaaattagaattaatttatacaaataatgtttagtagtttttaaatatcatcatgtatatcccagatgtacattgaggttagttttataaaagacaactactgtataattgcttatatccatactgaaggaaaagaactatggtcacacagtaaaaacagttatgtctaaatcatgttttaattgattattataatggaaaatcaactaaacaattaccaaaacatataatattctattcttctgtatatttcaattcaaaagtccattcaatttttattggtctcaatgtttaaccacatatcctaaaggacctgaccattctacacaataaacatttttaaatattgtaattaactcccttcacttttcaaactgttgcattgaatacagacaaatattctctgttcatggctgtagacacatttagtccaacatgagtaattttgttttatgtaaatcatatggcaaaagatcattttttaaaaatgggaatatgtatgactcaattttatttaaatcggcctcctccagcttctcctcattagaaaaaaaaatactgttttaacctacattttgctcttccactgtatttcttattaacaaggtgataagaatgaacacccaggaacccaatcctaatagtggttggtacagtggtagcaatcgtatttacagaatttctcctccataaaataaaatttattgcacaatatgctctgcatattttgttatattgtgtgtagattatttttaa

SEQ ID NO: 690683 - DNA, 617 bp, Homo sapiens
gcgacagagcgagaccctgtatcaaaagggaaaagaaaatctcaatatatttctatcttatcgtctccctcattcaagacaagagccttcacagtagtggaaggagcatgggcctttacacaagagaaagtcaaagttttttctcgggtgccacatttgtaaatgggaataaataagatcctttatttattcctgatgaataagatctatcggattaagtgagatgacctgcgtggtgctgtcaccacaggcttcttagcaaaaacaacagcaaaactcatgcggattgccaggccaagtgatttttctggtcaggaactaaagctaaagtgattgaattgtctctggttttctagttctaacactaccatttaatgattcaagtctatgtacaataaaagttggcctctcaaatatccctaaaccattaggtgaacaataggaggcttctcaaggtcacaattttctataccacagggttgactacatccctgacctgtggaatcttaggcattatagatatgttttgttttgttttgttttgagacagagttttgctctgttgcccaggctggagtgcaakggcacaatcttggctcactgcaacctccacctcc

SEQ ID NO: 690684 - DNA, 2837 bp, Homo sapiens
cagcagtacagttttcaaatgcataaggaaattcaggcagttcagtttatgataaaatctgtagttcatgctcttcactaaatactttgtttaatgggttagcttttaatagcaaaaagctaagtgaaaacaatcattagaacaagtcctcagcacatcaattcacttcttattttagaaattaaggctgggcattatagctyatgcctgtaatcccagcactttgggaggcctatgcagatgaattgcttgagcccaggagttggccagcttgggcaacatggtcaaactctatctctacaaaaaacacaaaaattagctgggcatggtggcatgtgcctgtagttccagctacttgggtggctgaggtgggagaatcacttgagcccgggaggtcaaggctgcagtgagccgtgactgtaccactgcactccagcctgggtgacagagtgagaacccaactcaaaaaaataaaaaatttaaaaagcaaatgttaagtgaagtgctaaattgaatcaattaaggtggatactaaaacaaagcatacttcagaaatgtgttgccaatacttatttagtattaattatgacatgtttggccttcaatggttcatgctcattatttattttatgagacttttagatctaatttaactttccttgttttcttgctttaatccattattcttaataaaggaagtgttcagctcccatgaataggatttaatcaactctctggcaaatccatgctggcctcaggcccctgggtcaaactttggtaaggatccctatgaggactgacattggcatttggttgcctagaaactgttcttggactcaggcaaagacccaacacataatctggcaccttcctaggcaagtttaagactggcacaggcttcagtgcatatctcttatgagtagactattagtaccatccctctgggattgtcatgcagattaaatgtcatgcggattaaataaattcatccatataaagtgcttagcacaatgcctgctatctggaaagccttcaacactgctagcttttatttggttagtgttgttgttattgcctcaacccgtgaacggacaattagagaaacaaatctctatctctgtcacttgctgaatctgaggccctgcaaggcatgggtatacccaaggggaatgcacttgaatatgacgtaatattttacaatcggtttcaggtggagatctcaaagaaagccttttcttataacacacaatatatgattagtattatacatagaatgtatgaataaaggtagcacatatggaggtcactgtgccaaattcagaacaagcttttctttacaaccaagaaaatgtacttcagtgcttgcgttgttttagttctggatgagtgtgtggccaaagctgatagaagttgtcgagaagggaagatggggagaaagaaaccagatgtataatgtagggaagaaggaactcacatcgtttgcagtggtgccttttggaatgatgatgggacaaacctgggtatgtcacattccagcaccatgcattctgcattttcaaaaaaacatcaatcctaagttttcattcaattccatcatctcctcagaacaattcagttcatccaaccatgcattccaacgtttagaaaatctgtatttagtcatttcattagtcagaagatcctattttcccacccctcctccgctccatcccagtataaaatgctttctcataccagcttgctagtgcttcacatgccagcaacaaacggaaaaaccctccatttcacaattccaacctcatgcatgatacttgagtatctcagatcccctttgactttaaaattcaaattaggttacacaccgctggattcagcgtgcacccaggagccagcatttaacagcagtggtgaacacagacacacgggggctgtagggtggtggaatgggggttgtgtgccctggagtaggtagcgggtaaataaaataataataataaagggtagggacccagagactagtttgtagccttcaaaattgttgaaacatcagacctgcacaggagtgtttgttcaataggagtaagaaggtgtttgtaaacaaccattattttttataaggcttcgatttttatagaatctagagagttttatttagtagtctactctctaggggcaaaatggattgaagaggcaccagtgtcatgaactccccatgagaagcgttgtgtccagagagcagatcttgttggtattgagtccacaagaatggacggcaacggattctgagctcctttccttaaactaggccctctgagctaaccccacagccccctcggcgggtgactaagggaaggcgaggaagtgattctctgtcctagccaagtatacgtccaggcttggagacgactggtagggcttgctgcagcttgttctagaatcagtaagaacaaaagatttaccgaaatgtcttttttccctccttcactgcactaaattccctattaactaaagcaatctgcacgcagccacccacaaacactggaagcgtttggcagataggcccgctttcgtgtggaagctgtgaggaggttctttttgtcgatatgttttgaagtcccaattaatatcaatgcaatgctcaataaatatttccgtattcgtctcaatatctttggactttcttcatagctagttgttttttttttttttttttttactcccataaaaatttaatatcagtgtgttgggcaaggaaatggatccatgtataaataagtgaaatgcaaaccatagttttttgtatgtcatttccttctaaacagaaaataaaaataaat

SEQ ID NO: 690685 - DNA, 1146 bp, Homo sapiens
ccatggtaccccaaggagaatagcagctagcattcactgaacaatttggtttgctacaactagtaatactactgaggtatcgggtactgaggctttatttgaggatgaagctaatagcctaagccaagatgtacctgctaggcaggatgaagccctttagaaccattgtttcatttaccttaaagacaactcaggacaggggtattattactatagtcccgttctacagatgcggaaaccgaggcttccacagcctgggttacttgtcccaggtacacagcgactaagtgcctgagccacacttcaaccaggtgtgtgtctcacaccaactccttctatagatgttacctaagggccctccaggagctaggcaccaactgggtgctgggtttcctcttctcccaggagctccagaggaccaagagagcaggaggagggtcatgggggctccaggggaaggttccgagggcagggaaagcggagcatgctcccagggtgagtgggcacagggcacctgccagcggcagactgacagatgttcagaagaggaactgcagaaccagggaggtgaagctgcctgcccagggtcacacagccaggggcagaaggctcggaccccacagtggcctccagaatgttcgctctgagctccagcgctcagccgataaagacaacgtggtctgtcattcatgcgcactgcccctgctagaccatagccctcggggtcatcaaggtgtcactcgtgcagctcctggggtcccagcacagtgatcaggaggagccacatggtacttgctgcctgggcccgagacagcagcagcaggtgccctgggggtcaaggccccggcctcccgacagtttctcccattcactagggacaggacgtacctccccaagaaggcgcgaggctgggcttggcctctccatgcagtcccatctctgtggaaatgtcccaaccacagtcaagccccctccccatccctggccctgctcactttagccctggccctggaatgccagctccacgagggcaggggcactgggctccttcacagctccggctctagaaagtgcctggtgygctccctgcctcctatcacacgtgtggatgtgtaaatatgtatttatacacatgcaatccacaca

SEQ ID NO: 690686 - DNA, 639 bp, Homo sapiens
ttttttttttttttgagatggagtctcactctgtcacccaggctggagcgcagtggtacgatcttggttcactgcaatctccgcctcccaggttcaagtgattctcctgcctaagacttccagagtagctgggattacaggcacccaccaccacgcctggctaatttttgtatttttagtagagacagggttttgccatgttggccaggctggtctcaaactcccaacctcaagtgatttgcctgcctcggcctcccartgtgctgggattacaggcgtgagccacctcgtccagcatagttaggtgtaattattatccccagtgctacaaaatgaggaaagtgaagcatagaaagataaattgaggatttaggtgacgtggaatacctttcaatcagtcttgtcacaaaagagattattgtgtggtctgagccttaattaacaccaatggtctcctccatgagtgcagctataatcccatttgttttcatgctttaatgggcaagtcagtataacacacacacacacacatacacacacacacacacacacacactccccacatttagatttttagtaggaccattcaagtaaaacaacatcacttagtacttcatatttcaagggacacattcatcg

SEQ ID NO: 690687 - DNA, 639 bp, Homo sapiens
ttttttttttttttgagatggagtctcactctgtcacccaggctggagcgcagtggtacgatcttggttcactgcaatctccgcctcccaggttcaagtgattctcctgcctaagacttccagagtagctgggattacaggcacccaccaccacgcctggctaatttttgtatttttagtagagacagggttttgccatgttggccaggctggtctcaaactcccaacctcaagtgatttgcctgcctcggcctcccagtgtgctgggattacaggcgtgagccacctcgtccagcatagttaggtgtaattattatycccagtgctacaaaatgaggaaagtgaagcatagaaagataaattgaggatttaggtgacgtggaatacctttcaatcagtcttgtcacaaaagagattattgtgtggtctgagccttaattaacaccaatggtctcctccatgagtgcagctataatcccatttgttttcatgctttaatgggcaagtcagtataacacacacacacacacatacacacacacacacacacacacactccccacatttagatttttagtaggaccattcaagtaaaacaacatcacttagtacttcatatttcaagggacacattcatcg

SEQ ID NO: 690688 - DNA, 940 bp, Homo sapiens
tggagctgcagccatataaccaagctgtggtggagcagttgacaagacattatcagtttggggttggtcattttccatcctctcttcacggacattgtgagtgatggtaacatctggaaaccagtggaacaggttgagctgtgaggtaagtgcattatgaccacctcaccggtatatcccactgatgctcagtttctaagaaattatctgataaagcaggagaatacatcatataatgatctgagtcccctcaaattgaggccaggaaaaataattcaacaaaaccatcttcttcccttcatgacactatgcttgcatatggaaaccaaggagaacactacaaccaataagcaaacatacacagatccctggtactcatcgctggtatacaagctcctgccatataaatcagccctgayagaacatttgacaagacgttatccatttgcagttggccattttccttcctctcttcatggacattgggattgacggtagcatgtggaaactaagtgaagaggttgagttgtgaggtaagtgcattttgtcaatcccacaggcctatccctctgatgctcagtttctaggagattatctaaaaaatcagtggaggatatggcgggtggccatctgatacccctcaaattgaggctaggaaataatatacaacaaaaccaccttccaccattcatgaaaatatgcctgcttatgtaaaccaaataggacaagtccaaataacaagcagacatacacagatctctcgtgctcgtggatgaaactccagctgctgccatattaccagcagtcgagcagtcgacaaggtgttatcaggtgctggttggccgttatttatcctctcttcacgaatgctgtgagtgactgcagcatctggaaaccaaatgaagtggttgagctgcgaggtaagtgcattatgtcaacc

SEQ ID NO: 690689 - DNA, 1130 bp, Homo sapiens
  misc_feature 5, 6, 7, 8, 9, 10, 11, 12, 13, 14, 15, 16, 17, 18, 19, 20,21, 22, 23, 24, 25, 26, 27, 28, 29, 30, 31, 32, 33, 34,35, 36, 37, 38, 39, 40, 41, 42, 43, 44, 45, 46, 47, 48,49, 50, 51, 52, 53, 54, 55, 56, 57, 58, 59, 60, 61, 62,63: n = A,T,C or G
  misc_feature 64, 65, 66, 67, 68, 69, 70, 71, 72, 73, 74, 75, 76, 77, 78,79, 80, 81, 82, 83, 84, 85, 86, 87, 88, 89, 90, 91, 92,93, 94, 95, 96, 97, 98, 99, 100, 101, 102, 103, 104: n = A,T,C or G
ttcannnnnnnnnnnnnnnnnnnnnnnnnnnnnnnnnnnnnnnnnnnnnnnnnnnnnnnnnnnnnnnnnnnnnnnnnnnnnnnnnnnnnnnnnnnnnnnnnnnngcctgctaggagccaagatggcttcccagtgcctgtttctcgaccattttaatttaaaagcacggtgagtagtattagctgtgccttctctgccacaggagagaaagcctggtcaagaggtgtggttttggatgcaataagtccactgcttcttggagacgttcctggacattcaatcgtgtctttcctgggtccttggagtagttggtcaggatgggcttcccactcagtccacgggcctggggctgattcatggtggtcccagagacctcagccctctgtgtttggctggaagcccagaatggtgtacagttcctcaggcatgagccccagcaagttctggacgtcacacaaaaagcagcacatatagcactttcccgacatcttatggatgatgttcttgtcatgatagtaggtaaacccaggctcagcttcttgtagttcatcttgggcttatttttcctgattccccactggcaggcaacattgtcagggttggcaagtttaaactcccacctgtccctattccagctgatgaaatgactggcaagactgtctaaaattccaggaaaaactgctgtgggtgaataggtccactttctgtgaagccagacagcacagccacaggtataactggtttgccttgctccaccgggttgctcctctcttggatgtaatccttgaaaggcatggtcaactttttgaggcagggggactgactgcagttttctttgaagctctcgaagaaaggaacctgctgcacatccagtaaggatgactggttgttccaggtgcctgagctctcaaagctgtctgcctcatgatttaaatgttaaaaaagcagacagctttaaatgtctgcaccattctcaggggatttgtggtctttaggcttcccagaattgttggtgagcaaattcaagttgcctagaaagtcctgactgatggagcatagttgaggctgatagrgctgagctgagacttggagaacatctgaaactcctgttcagagctgagcacgctggg

SEQ ID NO: 690690 - DNA, 645 bp, Homo sapiens
aggtcactgtgttgccacaccagcaggacttgaaaatcgggcttcttgaacttgccagaaatctacagtctaggaggtgggagaaaactgttcaaggtaaattatcttttgcccaaggggagagtcgggaagttgctggtcattggatgctgctggccacccgtgactgcacaagtcaggtgctaaagaaactacatgtgctgcaggagcccagcaccagagaagctgccgcgttgtagaagatgggtttgaagaagctatgtgcaaagtagcaacctagctgtaaaccctagaagccaccacactgccggcgaatagtgctggagaaagggccttccaaaggctggagaaggcatttcaaaggctaggtgctgggaaagttggacacattgagaaaaccagttgctggagaagatacctgaactatgggagccagacactgaaaaggctacacaggctccaagagccggactagagaagtcgtctgctttaggggagccaggaacaagaraagctgcatcaggagcctgtctagaaaagtacactggagccaggaaggatgatgcttactctacaatgtctttccgttgtcctttactggcaagttttaacatagtgcctgctgacaaagggaaattaaagggc

SEQ ID NO: 690691 - DNA, 594 bp, Homo sapiens
ttataaggagtctagaactttcccaccattttgtttattaaaatttagccagtccagtaactccaagctccaaattccaactcagatctccgggtttaactgtcccatctccaatttaaacccatctggacaggttaaatatcaagttgcaaagattcagagtggaggcgagagagggtgatatggctccagcatatcctttcccccttctctcacatttctgttgttagggaactgtgagaatagatgggggaggcaaagatgactttctgtaactgaacattgcaaaggcacatagcaggaagtgcccaggctttgaaaactctggtttcatctgattctgtttgctgctggtggcctctgcagacacagtggtcctaagtagatgaaatagagtgtgcctggggcagtgctcagctccagaccagcctctctgctgtcaaggacccctyagagaggcatcaccaatcctccagcaacatctgtgctcttccggctccgccacatcttgggcagccctaatattcttgccctttctcttgccctagaccctctcaggtggagccacaagaaccattgaggtcttctctgttt

SEQ ID NO: 690692 - DNA, 646 bp, Homo sapiens
ctttttgcagatattgcaataaaggtattgtgatatgaagatatcagtgatttctactggtgacaaatcagttactacaaatactcttatgaattatagcctgtttcataactgaagaaaatgctttattccagtaagacattaataaaaataatgatgcaacatctttcccacccaagttccaaaccttctgatttctatccattgcccttaggaatgaagggcccctgtagtaacaactcatttaagctcacagacaatcctttgatgaggtaggtagtatcatccctattgtacaaatgaggactctgaggtacagtgcagttacgtgctgcactactgcaaaacaagtgaagtaaacatgcacgcatccacagccccaccagtggtgggacctcaccttgatggggggcttccgagtgatgtgggagacaaggaagttcatggcaatgtcctcacagttgatgtattcatccaccatgtcccggatggcctggggcatcacataagaatacaggtaggcataatactgtcaggggaagaaaaagaaccacatgctstgttacaagacacaggttgttggctttcagccaaaatatgcatggatggaggggctgtttgggtgtggcagtaactaggaggtatt

SEQ ID NO: 690693 - DNA, 806 bp, Homo sapiens
tgattcaggctcactggtgtcctggatgtagctttcataggaacagtttggtgtgctgatcctcactgctttaacttttccagactagaggctagttttttagcttatcctctcaattgaaaccagtgcatcacttcgagtgttttactttcctatgagagcccttcctcagctccctaatggttacatacacagtgcaggtaatatggtttgacataaaaacaagaaaacacattatttcatctgcaaggctctagaatccaacctaggagtctatagcaattcttaagtctcacattttggaacctgacagtttcaacttataccgtacttattaatttatttcaaaaaaaataaattgacaaatttttttttctggagtaattttctttacctaattcctcactaaatgatactattgytacttgtggtaaccacctgtgtcacaaaggcttagtagaagcagagaaagggatggcagaggcttcttagagtcaaaggaaaactgcagttttactcctagactgctcagtttcactctgtcaacagcagagacaacttaaccatctatttacttatctatcctgtattttctacaagctgtctccatttatagtctacaacaaaccacaaaaagggggaatttttgaaagcaaagcaataaaatttcttcttcttaaagatgctacactctttccctctgaagctctctgccttgcatctttgtggcatctttctaaacattacctcccctaattagtattctctgtacagaggagccgtctccatgaactccttccaattaa

SEQ ID NO: 690694 - DNA, 1717 bp, Homo sapiens
cccgagccgagcacgaaggtttcagaggaagccgagtcccagcagcagtggtgagtcccagcagctccagaggctggacccttagcctcggtggccaatgaggtttatggggcatctttctgaagccttgcattgctaggcctaaccacatgccctgcctactgattgcttccatagactgtttaaaggctgtacagttatccctaaataaccttggagggcactgatttgtccacagtcacataggtatgyaggtggcagaagtagaatgtagacagtgccctttctcatcctgtgtgcacacacacaggatgctcagaacttccatatgattaaatgcatggagtgaactgcccagattttaggccagtgattttgtggtgatgcgtttttttgagagttctaagtaacttcacacagagggcagcaattattctctacttccaaagggctaattattttgctatggtaagagttccatggcaacctctaatgctgcctttatgtggtggagcggggcatagggcattcctgtagtcgtatttttctgtctagagtctatttaaaacacttggaagtttcagatttaaaaagaattaaattatgtgaaaaggttgcacgtaataaaattgagtgatgatgttctcccaccctttcttactgtttcctctttctcctcttcttcctttcccttcctccttttcccctcttccctaacagggatacttcaaaaggagaacaagtttcccaaaacggtttgccagctgaacagggatctccacgggttagttaccgctctcaaacctaccaaaactacaaaaactttaatagcagacggacagccagtgaccagccatggtctggactgtgaagttcactaccatttgtcaagaatcaccctttccaaatcctctgggttttgactttttggcttccacttcacccaaaatgttaaaatttttacttaattcatagccttccttggtttcatatttgtttgcatttaattcatgtttgagtctcttaactgatggatgcccacttgccttaaagcagcatacttattttttgtttatttattgtgagctttttactttattaagattttacagcgaaacccttacatgagtaattgaaatgaaattaaatgagattacagcataatgaagaagaaaactagaatctaacaggtatgacacattcagttattctaacagggcacagtactgtgctatatgtagccgcctttacagatgttattaacctatagtagtttactattaactaggaagactggtgtatgaggagggagacattctgtaataagattaaaacctaaagtcagctgtgtaacattccatgaaagatgcattcatttattgaagatgacaaaaaagggagtcagatatattctggaagctattttaattttaggcacacaatctcatacattttgagacccttgggtcatttattactttttacaaactagttcctctctttttttctgccaagtcctgaattgaaaactgtaggcttccttgcacagatgttgcagccagcctcaggagtaaagtgcccgctgactgctgccgccacctctgtctcgctccctgtcagtgctgctggcacgtgggacgcggcaggtgacagccgttctcagcatgttttagaagcttgcctcacagacttccatgcctctccattcagccgatga

SEQ ID NO: 690695 - DNA, 589 bp, Homo sapiens
tccctttgcacatacgggttcctgacttcaacccatcaaaagggaaaaaagcagaaacccaaccagttagtagaaaatgcttgatttatcgtagaacgaatactaggcatttagtttctgttgtgcctctcatctgctgttgctgatggactgtgagctctcatgcagggattccactgtcttgatcatattatttgtgttgtactgtgacagattgcacataattttaaatatatacatattttttaaaattgctttttcctatgagactactgtataccaggcgctataataattactatgatgtgttattcttgcacagagagattctgggcagcataactgaagatgaatatggagtcccccccttccccccgacttctctccttttagactttttatagtgtttcagattcttcacggttaaaataatgtgttggcagggcacggtggctcatgcctgtaatcccagcactttgggaggccaaggcagatggatcactggagkccaggagtttcagaccagcttggccaacatggtgaaaccccatctctatgaagcatacaaaaatagccaggcctggtggta

SEQ ID NO: 690696 - DNA, 2311 bp, Homo sapiens
aaactgtttttacagagttaaaccatcatcgagttaaacaagcacataacctatcttggtttggaccttcggagagtggactgatggcctgaagtgtgatctgaattgatggggcagagacattctatacacacagataaccggcctctcgtcttgcgaagttctccagtgcatagtcagagctagtgaccttactgagtagggtgactaagagtgtgacaaagggtgactctgcccatattttctctgtgtcttcccattgcgatgggtcattttaaagctgacaccaatctttaacccataagtaattctatattaaaaaaaaaacccctggttacagcacatttaatagtgataattccacagtatgttaattatctggtctctctaaaataagtcactgtaaggggctccagcttttttcttatgatattaaataaatcagagaagaagaggttatcatgatggttcrgaggcactccaagtccagaaagagagaagtcccgaagagttataaggatttaacgaattggttgctcaaactctttggcagtagaaaggttgtgcaggaatctaaaggcagagagagactgaaactaatgaaagaagtgaaccataaaagtaagttttttcctcctagggtacttctccaaaatgcaattttcttagccccataccctagggtaattttgagactgatggtctgaaaccacattttgagagactcctttaagagctctttttattgtctttcaacccagcttcctcaaggtatggtggtcatgtatttaaattggtgcttaagaatatattcaattttagattcatagctcccccagctgattttaagatttgatttttccttttcatctagaggggctttttagtttcactatagtatgcttaatgtggatgtcttttaatatttttcagtactcaattgcagtataattgacgtgcaataaatggaacttggaaacatatgcttacacccgtgaaactgctaaacacagtatgacagttgaatagagacatcaccatccaaaaattctctggcccctttgtagtccctaccacctgccccacatgtgcccagacagttaccaatcttgtgattgttagtttttattttgtagaatttcatattaatgaaatcatacaaaatatactctttttatctaacttctttggctcagtttattcttttatattgctgagtaatattgattatcacttcacttattggtggacatttgaattgttcccagtttgggatattataaataaagcttcagtgaatatgtgtgtacaggtctttggccagacatgatttgatatcaattagtcaaacatctcaggcagaaaaaaatgggtcatttggcaaatgtacgtttaacttaaaaaaaaaaaaaaaagccctgcccagtgattttacatttccagcagcaatgcatgagagttccaattcctctagatcctcaccaacacttggtatggtcagtttttaaattttgcacattctaataggtgaatagtagtagctccttattgtttgcctttgtgctcatcaaatgaataatgatattgagcatctttttatgtacctaattgccatctatatgtactctttggtaaagtttctctttaaattggtttgtggaaaaagttaacagttatctttatttttaaaatagactccatggttcattccttttagcttttcatttttctcattttattctgcagggatatggacacatctcctggatatggaacaggaaacttacattagaggattaaatctgattgcatggaaagcaagtcaggaactaaatggaaatgtttgtttgtttgttttgagacagaatttcactcttgtcacccaggctggagtgcaatggtgcatactcagctcactgcaacctccgcctctcggattcaagagattttcctgcctcagcctcctgagtagctgggactacaggtggcatcgcaaagtgctgggattacaggcatgagccactgcacccagctggaaactaggtctttaatgacattattcagttacctaactttcctgtgtaacccactgatggacatcaccctctaggaggtgaaaaatacttataaactgctattgtagatttgtatgttacctgtagaggaatgggtgagaaaaaaaaagtcaaatgaaaaatattcctatacgcctgtgctataattatatatggagggggatcttgttctctagagttcagtggcccaatcacagctcactgcagccttgaactcctgggcgcaagacatcctt

SEQ ID NO: 690697 - DNA, 2311 bp, Homo sapiens
aaactgtttttacagagttaaaccatcatcgagttaaacaagcacataacctatcttggtttggaccttcggagagtggactgatggcctgaagtgtgatctgaattgatggggcagagacattctatacacacagataaccggcctctcgtcttgcgaagttctccagtgcatagtcagagctagtgaccttactgagtagggtgactaagagtgtgacaaagggtgactctgcccatattttctctgtgtcttcccattgcgatgggtcattttaaagctgacaccaatctttaacccataagtaattctatattaaaaaaaaaacccctggttacagcacatttaatagtgataattccacagtatgttaattatctggtctctctaaaataagtcactgtaaggggctccagcttttttcttatgatattaaataaatcagagaagaagaggttatcatgatggttcggagscactccaagtccagaaagagagaagtcccgaagagttataaggatttaacgaattggttgctcaaactctttggcagtagaaaggttgtgcaggaatctaaaggcagagagagactgaaactaatgaaagaagtgaaccataaaagtaagttttttcctcctagggtacttctccaaaatgcaattttcttagccccataccctagggtaattttgagactgatggtctgaaaccacattttgagagactcctttaagagctctttttattgtctttcaacccagcttcctcaaggtatggtggtcatgtatttaaattggtgcttaagaatatattcaattttagattcatagctcccccagctgattttaagatttgatttttccttttcatctagaggggctttttagtttcactatagtatgcttaatgtggatgtcttttaatatttttcagtactcaattgcagtataattgacgtgcaataaatggaacttggaaacatatgcttacacccgtgaaactgctaaacacagtatgacagttgaatagagacatcaccatccaaaaattctctggcccctttgtagtccctaccacctgccccacatgtgcccagacagttaccaatcttgtgattgttagtttttattttgtagaatttcatattaatgaaatcatacaaaatatactctttttatctaacttctttggctcagtttattcttttatattgctgagtaatattgattatcacttcacttattggtggacatttgaattgttcccagtttgggatattataaataaagcttcagtgaatatgtgtgtacaggtctttggccagacatgatttgatatcaattagtcaaacatctcaggcagaaaaaaatgggtcatttggcaaatgtacgtttaacttaaaaaaaaaaaaaaaagccctgcccagtgattttacatttccagcagcaatgcatgagagttccaattcctctagatcctcaccaacacttggtatggtcagtttttaaattttgcacattctaataggtgaatagtagtagctccttattgtttgcctttgtgctcatcaaatgaataatgatattgagcatctttttatgtacctaattgccatctatatgtactctttggtaaagtttctctttaaattggtttgtggaaaaagttaacagttatctttatttttaaaatagactccatggttcattccttttagcttttcatttttctcattttattctgcagggatatggacacatctcctggatatggaacaggaaacttacattagaggattaaatctgattgcatggaaagcaagtcaggaactaaatggaaatgtttgtttgtttgttttgagacagaatttcactcttgtcacccaggctggagtgcaatggtgcatactcagctcactgcaacctccgcctctcggattcaagagattttcctgcctcagcctcctgagtagctgggactacaggtggcatcgcaaagtgctgggattacaggcatgagccactgcacccagctggaaactaggtctttaatgacattattcagttacctaactttcctgtgtaacccactgatggacatcaccctctaggaggtgaaaaatacttataaactgctattgtagatttgtatgttacctgtagaggaatgggtgagaaaaaaaaagtcaaatgaaaaatattcctatacgcctgtgctataattatatatggagggggatcttgttctctagagttcagtggcccaatcacagctcactgcagccttgaactcctgggcgcaagacatcctt

SEQ ID NO: 690698 - DNA, 2319 bp, Homo sapiens
aattataattcagggagacaagagcttgacttccagtataaaatgatgtctatatagaacaaatgagactttccaatttttttatttaattaccatgcacaaaatggaaaaagcaaacataaaaggcaaaataaacaaatgaatacacaaaataacattaaacaaaaaatattacatcattaccacatactaccaaataagcttttatcacaatctggaaatacttttcactaagtgtaaagctgatgactactcatattacacagtcatcagagaaatactttttaagtactttgtcctagggcataatagaagatcccctgatagtctgtagtctactttaaggacattttataatgattggtgatggattacaaatgaggtcaggagtttatttcttttgcagtagtaatttaaaatgtgtattgctaggaattcactatttaagtttaatgactttaagtgattgcaggttatgtcttttaaaatacgtaataaccctaagggttttgtcatttgtacagtcaactgatataaatgatttaaacagctctagtattttgattatattggatctatgagtgcatttaaaatattttaagtttttgaatcccgagacataggtacaacatctgtcactgaatgagatttagcgtttccactaaggccctgataggaaacctcaatcctgtaattttgtaatatggttataaaatcttggataagatctgctttatttggaatgtgtccatattgttctttgcccgtgaatgcacactgtttatttattcatgagatggagtaaaacagaaagtcattgtgttttggaaaatcatcctcataagaaccatcgcatctctggtaatttgatttagcatgtcaaatgtttgatttctaacttgttctaaaatagttgttatatgtctaatttcctgattcaactcagcagtctcatagtgtgggaagtgactgatttaaccatttagtttcaggtacttatttttatttttatttttatttatttatttttttgagatggagtctcactctgtcgcccaggctggagtgcaatggcgtgatcttggctcaccacaacctctgcctcctgggttcaactgattctcctacctcaacctcccaaggagctgggattacaggcatgtaccaccatgacaagctaatttttgtatttttagtagagacggggtttcaccatgttggccaggatggtcttgaactcctgacctcaggtgaccaaccagccttggcctcccaaagtgctgggattacaggcgtgagccactgcgcccagccagtttcaggtacgtttataaggtaatttcacacttttatttcagagtgggcaagagttggtatttagtaataataatacatacatgatagcacaaaccagataaattccttgggagcaaaagctaagttcatctaacaaagaagaaatatatttcattaaatgttactctatttttattaggtacttgagtagctgggcagaaaatgattaagaaacatgggattaatacaaatgtactcaagtatattggctactttcaataggtcctgaactattttcaatataaaactataataatacaaattcttttatcaatgtaaccatttgtataaagtatgtggggtatatacacttgcactagggccagagcaaatttatagagttcaatttgtaccatagtaggcacttcccttgtctggagttcatcttcttacagcatgaacgtgaaacctggactgtgacccttgaagcttaccattttrttggaactgtaaagagtttatttatttaactccctggtgaaatgaccactcctttacaagcaatgtctctacctgaagtaatgtttcctgccttaaagacaactttgtattttgttagttttgggaaatcagttttctttagattactatctgcagagtatatatctttttcaaacttttactttcaacatatgtctatatattttatgtgtgtctctgagaaccagaacatgtataggttttcttgtcgtttgcttttaattgaagtgcttagttttgtatgtaattactgatatatttagccttatatctaccaccttactactattgttttcagtgtgacctgtttttgtccctttttctttttttctactttgaattactaaaatatattttagttttccatttttcttttctataagcatgaaagtcatatgttctttcacttttcttttagcaggtacctcagaaattaaagcacacatccttgacattgtaactaatacaaataattacattcac

SEQ ID NO: 690699 - DNA, 1197 bp, Homo sapiens
  misc_feature 663, 664, 665, 666, 667, 668, 669, 670, 671, 672, 673, 674,675, 676, 677, 678, 679, 680, 681, 682, 683, 684, 685, 686,687, 688, 689, 690, 691, 692, 693, 694, 695, 696, 697, 698,699, 700, 701, 702, 703, 704, 705, 706, 707, 708, 709: n = A,T,C or G
  misc_feature 710, 711, 712, 713, 714, 715, 716, 717, 718, 719, 720, 721,722, 723, 724, 725, 726, 727, 728, 729, 730, 731, 732, 733,734, 735, 736, 737, 738, 739, 740, 741, 742, 743, 744, 745,746, 747, 748, 749, 750, 751, 752, 753, 754, 755, 756: n = A,T,C or G
  misc_feature 757, 758, 759, 760, 761, 762: n = A,T,C or G
catctttaatgttcctacttcttcagaatctggccacccctattcctcattccagcaacagccgagtttgtttttgtttttattttttattttgtttcccattgtttctagctttcagtgaaatcattgttcttcttcaagctacttcattatgccatgattcattcattcaatatatgtttcagtagtgaatatgagataaggcacaagcactattttagattctaggaatacagtggttaatctaagactttgcatttgcagtgttatattctactggaggtagatcattaaaatatatactaataaatatgtcaattatcaggtggtgataagcccaatgaagtaagaagataaaggggatrgcagaaagatgatgatgccacttcatatggcatgatcagagattgtctgcctggcaaggagacattcaaggtggtcaacatgtagttaacagagtgatccatgtgtatgtctggaaagagtgttggccaacagaagaaacaggtaagtgaaaagtgctaaagccttttcatgcctactgatgctgaggaacagtatgcttatagcaaagtgagtgaggcacagcgtgtaaaaaatatcaggtggtgcattggaacaatcatttccaactcggatttatatcttaaatatatttgaaannnnnnnnnnnnnnnnnnnnnnnnnnnnnnnnnnnnnnnnnnnnnnnnnnnnnnnnnnnnnnnnnnnnnnnnnnnnnnnnnnnnnnnnnnnnnnnnnnnnttggaagaccggcctttgtgctgttcacagctgtttttttctacctttgcttcctttctttcttccctccttaggatacatgttcgtcatttattcactctcttatgtaagtatttagccatggtttcttttgtttcattgtataaacttgcacaagtttgtctcattaccaccatcaggatttctaaaagttatccatttccttctatgtgtcattctctgtcccctttttctttcatagacaagatattatgaaaagttgtagtgtgcataggttttttttcattcctttaacttcctaagttttcttcagcattctgtaatcagctaccttttaactgctgatgagctaccttttctctcaactgtggtaaaaatcttttcaccacatttaccaacgtattttacctctcagtttcggtgtggtcacttact

SEQ ID NO: 690700 - DNA, 973 bp, Homo sapiens
ttttcattctaatctaagaagctgctctgtgagcagttttatttaaataagtgtttcaagaaagcattgattttatttaaggcagtattgaaaacttattttctcccttgtactttttttctagaagatcacacaaaagtagttatttatgcatttcattgctcaagtggaataccataaaatgggacgtatttgaaatataggtactttcatacaactgagtacccccacaaagtacttgtttgttcaaatcttctagcaatttatttttatcttctaaggaaatgcattatgtttcttttgatgtgatattccagcgctctattgcaggaaggacaagtatttgcctaaktctttttggtttttatgtccatcactgaaatctgacttacaaacatgagttatttgtggaagtaacatttggtaaagtaacataatgagtattaactttttaaattcctcctgtaaaaatcaaagaaatttgtcttcgctttttccatgtttaaaaactatctcacgtatcatgaagacttcatattatcatgaattaatattataagacataaaattcctttagggttaatttcatcactaatggtagtaggtataatttcagctaatcttcttactaactagttttaggtaaacttttggtcagataaccttgagaacatcattgtttcaaatgcataacaatgggccaggcccggtggctcaagcctctaatcccagcactttgggaggctgaggagctcgagacaagcctggccaacatggtgaaaccccttctctactaaaaatacaaaaattagctgggagtggtggcgggcgcctgttgccagctactcgggaggctgaggcaggagaatcgcttgaacccgggaggcagaggttacaatgagttgaaatcacaccattgcactccagcctgggcgacagaccaagactccatttcaaaaataaataaattaat

SEQ ID NO: 690701 - DNA, 1084 bp, Homo sapiens
aatccaaagaattcccatagcaagaggtttgtgtgtcaccaaggctgggctaacatgttaagattattatagagtttgtttatcattgagaagaaaataaatgtacaacatatgtatttctccaaaatattttaatatgtattttgggtgattttgcaagatccccacagtcatgaatcactggtgtagtgagaaaagcactaaactgattaygaaccttgacccaaaatccgagtaagtcacctaacctcatagccacagattcttaaaataagcaaatgaacctacatccctagattgttaggagaacatgaattttaaaacagaatgagtgggtaagaaaaagttgctttgtaaagataaaatctcagtttagctaggtttcattcggttagtgtatctccaaaactcattttaaaacataaaagatttttctatctatacttgctcaagtggtgcttaaacattcatcagagtaaagtggccaaacttcttttccaaaaatcatttaaaattaaataaaaatctccacaatgacttagaagactgtctttggaaagatactccacatatgacctatattccaattatgaaattctgtgattataaatctgaaatatcacaaagtaagtatgatttctgaagtggtacttcaggaaaaattttggaaaaatttttaagtcaaaaggataaagaagtctcaaatttttggaattatggataaacctcctatgaaaggaaaatatatacaatctggagaattcaacaatgatatagtaattctatctttggaattgtttctaatgttgaacataatatttttcttactttatttttaacgcaaataatacatgtacaagttaacataaaatttgtagtgaaaagcaacagcttcttccccactctacacacttcttccataccccaacagaaggccaagtcccagagataataactcttaaatatttcctgtttatgtgcttttgtttgttgcttccacaactaagtatgaggttccttcctgattctgttatttaggcaatatatacaagttccctgctaattagtaacttgttggtcctcc

SEQ ID NO: 690702 - DNA, 770 bp, Homo sapiens
aaaatagaatctgacagtggacttaatttgcttgagaatacagggatcctcatcaatcatcttctactcaactgtccttatcaggaaacagagagcagaagaagaaacatttggaaaaaataatcctgttcctcaaccttcaacataaatggacaactagtatattcaaaaatggaacagtttgaaagagaaagccaaaaataaacagataattgatctcaggaaaataggaataatgcagagaacaaaaaagactatttccaaatccttaacggatttttcataaaaattcaagaaaatattgcacttgttttttgttttgttttgagacagggttttactctgtcacctaggctggagtgcagtggcaaaatcttggctcactacaacctctgcctctcaggctcaagcaatcctcccaccccagcctcccgagtagctgggattacaggcacctgccaccatgcctggctaatttttgtattttcagtaaagacagggtttgtccatattaaccaggttggtctcgaacccctgagcttaggcaatctgcccgccttggcctcccaaagtgctgagattacaggtgtgagccagcacgcctgggtaatttttgtatttttagtagagaaggggttttgccatgttggtcaggctggtctcaaactcctgacctcaggtgatccaccgacctcagcttcccaaagtgctgggattacaggtgttagccagcacacccagccraaatattgcacttgtaaagtaagatc

SEQ ID NO: 690703 - DNA, 699 bp, Homo sapiens
accaccatggcacatcaaacctgcatgttctgcacatgtaccccagaacttaaagtccaataaaaaaaaatccagaaaaacagaataattttctacaagctaactttaccaattaacttaatgacagacttcttattcacagaaatatgtgatagaagttagtcaattcatatattaatatggctgtgggaaaattactttgtacatcattaaatgcctggtcagactatcactcaaaagttaagttaaatcaattaaattatgaatgaaaacatttctctaaaccagaaacacaataagttgagtcaacccctcactgaaaaatataattaaaggtcaggtttcagcaagaaaaaattgaccatatggtaagcctcagaaataaagtttccacagattcttaataactgatattgtaaggctgcctttttcatcacagacttataaagttagaagacagacatcaacaaaactgaaactgagagrtgaagctggctgggcttctgggtcaggtggggacttggagaacttttctgtctagctaaaggattttaaatgcaccaatcagcgctctgtgtctagctaaaggtttgtaaatgcaccaatcagcactttgtgtctagctaattgggtagggaacttggacaatttttctgtctagctaaaggactgtaaatgcaccaatcagtgctctgtgtc

SEQ ID NO: 690704 - DNA, 603 bp, Homo sapiens
gtgagttatggcatctaggaaaatgytttatatttagggttgctagataaaataaaagactcccattttaatttaaatttaggataaattatgagtactttgttagtataagtctgtcctatgcaaacttttctaactactgactagtttatgttgcaggatatattatgtatgtgtttgtatgtgtatgtatgcatttatatagacctataaaatatatttaaaagtacacacatatatgtctatgtatgtatataagcatatataagctttataaaaatatatacccttcatatatatatatacacacacatatgtgtgtgttataaaacctctatgtgtgcacacacacacacatcctttacagccttgtgtagcattttctgacaccacttctgaaattaagtgcgtgtgtgtgtgtgtgtgtgtgtgtgtgtgttgagatggaatctgtctccaggctggagtgtagtggcacgatcccggctcattgcaacttctgcctcccagatttaagcaattctcatgtctcagtctcctgagtatctgggattacaggtgtgcaccaccatacctggctaattttgacgtttttagtagaga

SEQ ID NO: 690705 - DNA, 648 bp, Homo sapiens
catggaaaccttgtgaaattggtaatattttatataaagggacttgggcacagaaagattaagtcatttgctcaaagccacgcatagaagatgtgttagaactgagcaactaatagaaacagccctgttcacgctcttccccagtgttttaccatctcaaaagaccaactgtttctcttgtgagcttcaagaacatgcttttctccacttcctgctatgccacttcgttccacttcattgcctcataaaataaaattaaactgaagagtaggaaaagtgaagaacacaatttgaggcagttatagataagacaatttctaggagcaaagataatttccgagagagaacattttatgacaagagtgatcaatcartggctcacgcctgtaatcccagcactttgagaggccaaagcgggaggatcacgaggtcaggagatcgagaccatcctggctaacatagtgaagccccgtctctactaaaaatacaaacaaaaattagccgggcgtgacggtgggcgcccgtagtcccagctactcgggaggctgaggaaggagaattccgtgaatccgggaggcggagcctgcagtgagccaagatcgtgccactgcactccagcctgggagacacagcgagactccgtctcaa

SEQ ID NO: 690706 - DNA, 637 bp, Homo sapiens
  misc_feature 537, 538, 539, 540, 541, 542, 543, 544, 545, 546, 547, 548,549, 550, 551, 552, 553, 554, 555, 556, 557, 558, 559, 560,561, 562, 563, 564, 565, 566, 567, 568, 569, 570, 571, 572,573, 574, 575, 576, 577, 578, 579, 580, 581, 582, 583: n = A,T,C or G
  misc_feature 584, 585, 586, 587, 588, 589, 590, 591, 592, 593, 594, 595,596, 597, 598, 599, 600, 601, 602, 603, 604, 605, 606, 607,608, 609, 610, 611, 612, 613, 614, 615, 616, 617, 618, 619,620, 621, 622, 623, 624, 625, 626, 627, 628, 629, 630: n = A,T,C or G
  misc_feature 631, 632, 633, 634, 635, 636: n = A,T,C or G
gatctgggcccactgcaacctccgcctcctggctacaagcgattctcctgcctcagcttcccgagtagctgggatcacaggcatgcgccaccacgcccagctaatttttttgtatttttcgtagagacggggtttcaccacgtaggccaggctggtctcaaattcctgacctcaggtggtctgcccaccttggcctcccaaagtgctgggattacaggcgtgagccactgcgcccagcctaaaatctaactctgggactagcctagggtaaatatcacaaatattaatcctagacgtttgaaatctctttactcagcagtacaaattgacaacgctgcccaacartgccatttcttaccgatgaaaaattctctttgatagtagagccaaataaatgactgtgagttactagattaaggtgacctacagggccgtgtccttaaaatggcaggaggtttcagtgcaagagcagagaagcagttctggtggatggaagtcagtggcttcttcaggatggtgtgggagaaggcacagggnnnnnnnnnnnnnnnnnnnnnnnnnnnnnnnnnnnnnnnnnnnnnnnnnnnnnnnnnnnnnnnnnnnnnnnnnnnnnnnnnnnnnnnnnnnnnnnnnnnna

SEQ ID NO: 690707 - DNA, 538 bp, Homo sapiens
tgtgcctggattgctcagaatagtttccttgacttagggagaatttagtgaagtgatgtttaaaatattattatagcatgttacagttgaatggaagaaccaactaatgtaatgattcttaaacattggtcagcatggttaatggaggacaaaaaaaattataggaaaagatctcttgctaagaataagattgcccacagacaaaggctgagagagtgcattctccactggactgtagtacagactagggaaagtgggtcaggatygggaacatctgtgaatgggagggcagcgggaaagcttgtcctatagaaaattaaaaaacaaaaaacagagacacttcctgtgcagcacaaggcctgtgggagcctggggcttgttggttcgtaaatttgaccactctctgccttcctggcaattcccatttagtaaaccaaaattctagggaccaaaatgcacatgacttgtaacaataggcacaggctgatgttttgtctcacattaggtgttgtcagatttgagcatgtgtacagtagtg

SEQ ID NO: 690708 - DNA, 538 bp, Homo sapiens
tgtgcctggattgctcagaatagtttccttgacttagggagaatttagtgaagtgatgtttaaaatattattatagcatgttacagttgaatggaagaaccaactaatgtaatgattcttaaacattggtcagcatggttaatggaggacaaaaaaaattataggaaaagatctcttgctaagaataagattgcccacagacaaaggctgagagagtgcattctccactggactgtagtacagactagggaaagtgggtcaggatcgggaacatctgtgaatgggagggcagygggaaagcttgtcctatagaaaattaaaaaacaaaaaacagagacacttcctgtgcagcacaaggcctgtgggagcctggggcttgttggttcgtaaatttgaccactctctgccttcctggcaattcccatttagtaaaccaaaattctagggaccaaaatgcacatgacttgtaacaataggcacaggctgatgttttgtctcacattaggtgttgtcagatttgagcatgtgtacagtagtg

SEQ ID NO: 690709 - DNA, 538 bp, Homo sapiens
tgtgcctggattgctcagaatagtttccttgacttagggagaatttagtgaagtgatgtttaaaatattattatagcatgttacagttgaatggaagaaccaactaatgtaatgattcttaaacattggtcagcatggttaatggaggacaaaaaaaattataggaaaagatctcttgctaagaataagattgcccacagacaaaggctgagagagtgcattctccactggactgtagtacagactagggaaagtgggtcaggatcgggaacatctgtgaatgggagggcagcgggaaagcttgtcctatagaaaattaaaaaacaaaaaacagagacacttcctgtgcagcacraggcctgtgggagcctggggcttgttggttcgtaaatttgaccactctctgccttcctggcaattcccatttagtaaaccaaaattctagggaccaaaatgcacatgacttgtaacaataggcacaggctgatgttttgtctcacattaggtgttgtcagatttgagcatgtgtacagtagtg

SEQ ID NO: 690710 - DNA, 538 bp, Homo sapiens
tgtgcctggattgctcagaatagtttccttgacttagggagaatttagtgaagtgatgtttaaaatattattatagcatgttacagttgaatggaagaaccaactaatgtaatgattcttaaacattggtcagcatggttaatggaggacaaaaaaaattataggaaaagatctcttgctaagaataagattgcccacagacaaaggctgagagagtgcattctccactggactgtagtacagactagggaaagtgggtcaggatcgggaacatctgtgaatgggagggcagcgggaaagcttgtcctatagaaaattaaaaaacaaaaaacagagacacttcctgtgcagcacaaggcctgtgggagcctggggcttgttggttcgtaaatttgaccactctctgccttcctggcaattcccatttagtaaaccaaaattctagggaccraaatgcacatgacttgtaacaataggcacaggctgatgttttgtctcacattaggtgttgtcagatttgagcatgtgtacagtagtg

SEQ ID NO: 690711 - DNA, 1305 bp, Homo sapiens
  misc_feature 720, 721, 722, 723, 724, 725, 726, 727, 728, 729, 730, 731,732, 733, 734, 735, 736, 737, 738, 739, 740, 741, 742, 743,744, 745, 746, 747, 748, 749, 750, 751, 752, 753, 754, 755,756, 757, 758, 759, 760, 761, 762, 763, 764, 765, 766: n = A,T,C or G
  misc_feature 767, 768, 769, 770, 771, 772, 773, 774, 775, 776, 777, 778,779, 780, 781, 782, 783, 784, 785, 786, 787, 788, 789, 790,791, 792, 793, 794, 795, 796, 797, 798, 799, 800, 801, 802,803, 804, 805, 806, 807, 808, 809, 810, 811, 812, 813: n = A,T,C or G
  misc_feature 814, 815, 816, 817, 818, 819: n = A,T,C or G
ttccctcctctctttatggtagtagctccaattctgtttgttttacatactgtactccttcatctgatttcactgaaggttagtactaatatattattattgttttaggataaaccatctattctgatcagtctgcctacctgattgtctccaccctttaataacacacgttacaattgtttgtttgcctttgctcattgtttcttttctattcctccatctaggaaagccctttccattttctccatctatccatctatctgttcatgccctgagccttttccaaggctcagttccatgggaaattctttactaactttcacctgggtctgtatcttgcattatttcaatcaccaaaatgctrtgcataacgttagggtcatatcatgtccttagtatatattggttgaatagtagtaaaaggacataatataaagaaacccaagatattaatattatctgaaggacagctcctgtgagttcagtcataggaagtatacatatttttactttttaatgtgacttttggagattttatgcaattccatttttttacttaaaatgacaaaaagagaaggggaaggaatataggaaaagctaggctttctcaatggaaagtgattctaatcttcaaaagctatgccacactcagggcttctgagtgttcgtttagctttaaagaaggatattaatccaccaccctcaccagcgtggcaaatnnnnnnnnnnnnnnnnnnnnnnnnnnnnnnnnnnnnnnnnnnnnnnnnnnnnnnnnnnnnnnnnnnnnnnnnnnnnnnnnnnnnnnnnnnnnnnnnnnnntgatgacatttaacctgagatctgaaggaaaaaactaagagacccagcaaagagtctattgaacagcattctgggcagagggacctgcccattcacaagctttatgggagagaagaatgtagcagattcaaggctttaaaaagaggccagtggggctggaaggagtgggtaagagcagagaggctggggacatgttggcagaggtaataagcacgcagatggcatagccattcacgctactgtggtacttatacctgatgttcatggttccagttatttaatatgccatatttgtgaatatcagtattcttcaactaaatatcaagattgatcaatactttcggtccaatgttaaaaaaaaatctcatttaactatattatttccccattttataagctttgaaagtaccttagccaagatcacattgctagcaagtggcagagtggaatttgaactagggttatgacaacgcagagcctgtcctt

SEQ ID NO: 690712 - DNA, 624 bp, Homo sapiens
aacaatctgaaatctaacacatttcttgtcrcaagcatttcagataagggatattaattaagaacatacacccaaaactattaccttgagctcatagccagggcctagttattaatattttgcaatgagtattaaggtgtgaagaaaatgttccactgctctcatattttttttcaaacacaaatttattttcaaacaaaaattggcctttttctattagctttcttatgtcattttaaaattaggagtcattactaagtaaataatttacttatcaatgaaagacctgcctgaccttgagaagtgaccagtgaatatctctcattttagttacatataagggtaaaaagaaagtccacagatatactagagtgcacagaaagaagcttttataatttgttttccataaacaaatgtcacatttaaagtctatgacattttacatttatgaagatgtatcaggaattatggctagtaagttggtgtagaaaagttaaaggaaccatgtgaatgtatcaaaataatcacttgcagagatgaaaaaaaagaatttttttggaacttcctatcatcatttgtttgctaaactttattttttgacacaattcttaattaaataaatcc

SEQ ID NO: 690713 - DNA, 2375 bp, Homo sapiens
atgtatgccaatattcagcatcttcctttttcttccatctcaaaagtttatccacattgacatgtggaacccacactgtagaagggatgcatttcaaaaaagaaggaagcccacttattcaacagagcaggggaatcaaccagagcaatcaataagatgtcaggtagccagccagatttctctctaatttctatttctttttaggattactaacctgagaaagtaggagcacctcctttcagaaaaatgctgagattctgctagagggaaggggaggaaaggggacttattaaatttcttactaagtccactatctcatttgatcaattaactttcaaaagctgggaaacagatatttagcaagttcttaaagtgtttatcactttacaaattgaggcggcttaggtgaatcatgcatttcatgcatatgtatcaacattagagatttctgtagttttataactttctgggctacttcattttcttagaccctgcaaaaacacataagaatacccctgtaattatgcaaaatatggtataagtttgtttccttttttaaaaaagcggttacataaagaagtatcaaaattggctgcttattattttttgcgtatcagtcaactcccttttctcatccttcactgagtaaaacagtacaactctattttctccttttctacctggacttgtggctacataattaaggaagtcactcttgcattttattgactggtgtggcattcaaaattcagacattcaattcaggtaaaaaaaatcttaggagagaaactgatcataaatgttttcttaaaaaatttgcttagtgtagcatcatataagtggtaaaatttttaaatgccattatcctaattctgttctaaataaatccaagtaaaaataaatatctgaaatawaaattattaggtaaaatttgtctatagtcatgcaccaccctctcattaaataattcactttgaaaaaaagtggtttgttctgaatggggggaaaagtaacactcaaaagatttttaaattgtaaatatttggtgatctaacatcaatattattattagtacatcaagacattttaaaatgcatttttagcacagagattatttacaagaaaatcatttattttcaactttctatgcgaggatgctgtactgaagatttttgagtgtttagaaacctgtaaaaaaggggtaaagtctggaacctcctttccaataatttgcttgaaacatttgcatttaaaattacaccattaaataacaattattaacttgaacagttcccgaaatgttggtgaaacatattgcacatttttggggatatactttaaataatatacatatgatgtatagatttttgtgctttcaggcttctcattgttcactggtagagtattttttagaagatgggaaatttaattttctattttatcattcttacctatgattgaacatctaaatcacagttccattgtgtggtgatacataaaatttttgattttgggggaaacactggtaacacaccctttataatttttagcatgaatagtacctggattatgagaatagatgaaatgatatcaatataagaaagtcagaagagaagtgatccaagaattgcacccttgaacacatcataattaaagggcttttctaaaaatactggagatagcagatggtcttgagtagaaatgaaaggaggattcaaggattcagataagaataagaggggaatgctgtcgttggagattaaaaaatgcgtgttttcaagaaagaagaaatggtcacagtgtcaactaaaggagaggtgccaaagatatgaagcattgaccattggattgagcaacaaagatgacactgtttattttatcagatgatcagagaagaggggaggacaagattgctagtttgaaggaaagggtatgattaagtggatattacccttgatgatcttgatgttgacttccattgaaaaggaaagtgaaagatattagatataaggaggggtactttcaggtatgaaaaatgaggcaaggtctcacaaaagaaaagggaggaaatggaatcaagagatcatgtgatggggttgtacattgatgagctaaggtgactctcttcctttgaaactgaaaaagtagatgggggtgagaggagaatcacatttaaagctgtgcctattggagcctggaagattatgcaattgcctctgctaaggcagatataaacttcacttgttgaaagagggacaatggattggtagttgctttcagaagagtgttgaaagtccagaatatgttcagtggagaatggattttaagattctagtggtagaggcattccaggaaatcaggttactactatagag

SEQ ID NO: 690714 - DNA, 2541 bp, Homo sapiens
gcttaatgtcttgatgccttggtttcctataggacaataactacacaatatatatacctaccttctaggtttgatgggaaagttaaatgagagaatagatataaagggcttagaacaaacaatgtctgggacatagaaattgctccttaagctttctattattacagctgttattgttgtttgtcaacagaagccaagtgtcattagacaggtaagctagacataggaagagtaggcataatactgtgtgtttgctcctttagttgggaattgtaaaagaaaaaggatgacttacacttaggaattaattgtacttctggtgaatcaattcaaagcaagtgcacactgcgtctagaagctgaaaaagacaatctattcttcttgagaaattcagctccagctctgataccatctctgctcttccatctactcaagggttgggtagaaacaaaagcatttttatatagcacatttatcttaactaatgtaaaggaatgtgcacatattttgataagtgagaaagaaatcacttagaaaatcacagctaaaactctggaagatttagaaaaaaacaaattgtagctttaaaaaaaaacataatgcctaaaaatagcttttgttgtaggcaaaaaagtaatacatcctcctcaggaatttgtcacctatatttttcaaattcatgaaactttttttctttgtaaaaagaaaaaaaagcttaatgatattttcctatctgtaaaactttttaattttgtagttcttaataaataacttaatgatggtgtaaaaatccaattttaaggccaggtgcagtggctcacacctgtaatctcagtactttggcagagagaggtggataaattgacctcaggagttcaagacaagcctgggatatgtagcaaaaccttgtatctacaaaaaatacaaaaattaaccaggtgtggtggtatgcatctgtagtcacagctacttgggaagctgaggtgggaggatcactggagcccaggagatcgaggccacagtgagctgaaatggcaccactgccttccagcctgggtgacagagcaagactctgtatcaaaaacaaataaaaaatatcagattttactagaaacatctaaatttgttcttaagattataccatatgagaaaaaattacagcttatttattgagccatgtagcaaacgatgagctcactgaagaacatgagcaaataaggttcaaaaatgtagtataagcttagtagtctttgttctcatacaaaagtcaacttcagtagtatatatttagggttttgttattctgtcttctggtaattgagtatgtgccatagatctataatacgttttcaaatatatcatgactatttccttttggtctgttgactgagatcaagtgttatgtgctgtctctagggactcaagccggcaaagccaagaaatagactgttatctaataagcttttagcatcttttaactaaaatgatggtaaccaatattatgctaagtgttgcattatttatgagcaatctgttgctcaggaaagatgctcaaagcatcagctacaatgagtcttcatcattttcagctatgtcagacaataatcacactccatattttttttcatccttttacctctttcttattttgttccccagttacttgatttggtaaaagaactcagctaagtatatcttaaagccataaattctattggttagaaagtatttcccttttgttttctttctaaaatcagaatattaatggaacacctaatgtactcacagtagcactttttacagattccttatgagaaaggtagctgtatgccatatactgttttcaaaggttactttaaaacagtttcttggtaaatagtccaatgaacaaatacatcaggcatgtgtctggatgggagggtgtatatatatatgcgcatatatataggtgtatatatatatgcgcatatatataggtgtatatatatatgcgcatacatataggtgtatatatatgtatgtgtatatatatatatatatatacacaatatatatatatatatacaggatctcaaagaagacagaggagagttttatttattttaggttcccatatctcagcaagttgtttccctagcaagctgactttctggtctctactctgtccatttaagttttgccctcatccaactatctgcactcatgtgtaacaaattaagatatattcctctatgctattcagagactattaattctttactcactatgcattgtttatgctttgtaagaaaattagattttattagagagaagaagagaaratacgtccaattaaaaaaataaaatgtatctgctatcatcctttgcaaggaacgttgccattttgcatcatcgtagtctatgaattgtaatgaaaacttgttttattgtacattccaaaacgtacttaaaacacatacacacacacacacacacatgcacatacccagcattgactattggccacttatatttctcctttcttctactattaaagttgcc

SEQ ID NO: 690715 - DNA, 625 bp, Homo sapiens
tctcttcagatattcactttatctcatgtaaaatgaagatttactggtcactaattaaagtctcataagaatgtaactactcatccaactaactacctgctcctctacttatctgtgtccctcaccaaccccatttttaagaaaatgtataaatactaaacctgaaaacctcatcggaataacagccactcatttgagttgtcactttatagaaataattcaaaagttagcacattttaacttataaacagttatgttatttttatatgtcttatacttattttaaattatatttaatttaaattaaattataattttctttggttgatttactctgagaatttgttactataactaaataataaaattttaccttatttgttatttgcttttaagagaaataaatttttttgtggaatttttttccctaraacagtatatttcagagcataactaggagaataaaatcaatatttcttgtaatttctagaaaattaacaaggcttaaaaatctatgtgtagatttagatcacaattaatatataaaaataatatatattgactgtttgtgtaaatcacatataaatgatttcataatttttttctttcacctaagccctaattc

SEQ ID NO: 690716 - DNA, 599 bp, Homo sapiens
aatataatagagactgcagacttcctattgtaaacaatgcaagtcagaagaaaatggcattacattttaagggactgaaagaaaataataaatttgtcactctcaaattctaatcttaaaaaaaaatccatgaaaattgaaggtgwaataaagatctcttcagtgaaaaaaaaactgaagctatttatcgccagtgtacctatgaaatcaaatagaaagacttgaaataaaattgcatactaggaagtaaaaataaattttgcagagtgaaggaaaatagtcacagaaacatagatctacataagagtgccccaaatgataagtacatgaaaaaatatgagtaacttcttccatttttagaaagataatgaactgtttaacagtaataacatattgtgaggattattttacatgtataaaatacatacaaatatatttaatgttaacatatatttgggtgtgtgttaatgtatatcaataatagtataatgcatctgatgaggtaagtgttgaattggtatattgtttgaaaatagatggtgttaagaaaatataggtgttatgggaaatcataaagcacatgccattataaaataata

SEQ ID NO: 690717 - DNA, 620 bp, Homo sapiens
tagtaatctcttaaagatacactgtaaagtattcacagaagttttaagatgtctggggtttgtttcaaaataattacatagttggagaaatagataaagcgatattggccatttgttgaagctatttgatggaaatacgaatgttcattatgttactatatctactttggcatatatttaaaatgtttgtaataaaagaggttaaaaataaaaagttacrctattaatattcatttaaaatgcaattttattaggaggaaaaccctctggctatatttctaatttcaaggatatctgcatatatagccacaaacagaatacaaagataagaaaagtaaaataggaaaaggatgtgatcctcatttcatctgagtatttcattggagagagttattttatgtttttaactttggaaataacgtatagtgaaaaaattgcgaagtactttgtaaaatattaatctgaatttagtaatatgcaacttatttttgtcaaaaagaaagcattgttatcatcaaacacttttaagttccagtcaattgatgggacggcctactaaaatatttgcctttgagggacatatgcactaaaaatttttgatgcataagcaagtacatata

SEQ ID NO: 690718 - DNA, 641 bp, Homo sapiens
agatagaacatgttctcctgccttagtaactattgacagtttgtgcataggggaaaaaaatcacacacaaatatgcagaaacacaactttcgtcaatgaaactgcacatttatagatgggaaggtaagaagatgtggggcaggggactaaagtccaggcctgatgcttgtttccctttgtgttctccaaagacaagacattgttttgacttaggataaatatatgaaaggcgaggagcagtgtgacatatttgggagttttatttaaatgcgagtttgccgtccccagcagtcaggaatggtactaatctggtggaaggacttttcatgctgtggctatttacttaacgttgctatttacaaatatcttcttggagctgccagatagaggaatgcagattcacagaagacttagtggcagcaattcccagggaggatcatctgtgttctgtcaaaataaattcccttacctgagcttttggacactcaagctcatcaaaaaataattggsaaatatttagtaggaaaagaaatagaaaataacaccattctgactgaacattcttgaaagaatgggttatagcctgtatttaagtgtgtgctattttaattggaatttcctatctcacaccccaagtcctt

SEQ ID NO: 690719 - DNA, 605 bp, Homo sapiens
aggagagagtatcagatctataatgaaagtcaaggaaaaagcaaagagccttacctactgttaataaatctcagcaaggacagaagaaatctccacggctttatgtgaaatgagaacagtacaaaccctaaagatattctttcaatgaatttaatttctgattggttaccagggtagttatacaaggactactcttaccctctgttcaaattcttttttctcctctttgtccttgcaaatgtgacataaacacacaccatttaatttaggtacaaagaaatgagtaggaccaataaccagtcttcaactataattcaagcaagtctcagacaagatgagaaaagaaagtcaaggaagttacccaaaccataccaaagcaaacataaaatttacatacggtgacttcaaatacaaaagacagttgaagaaacctgtttgggaggaaatcatcactgaaacagaaggaaatttgtaccataaatattaataaaagcaagttcaaggacaatctgatttaaaaaaaaaaaaaaaaaaagatcggccgggaagggagcaacacctgccattcaraaggctgttactgcccttggggaaaattggcctag

SEQ ID NO: 690720 - DNA, 605 bp, Homo sapiens
aggagagagtatcagatctataatgaaagtcaaggaaaaagcaaagagccttacctactgttaataaatctcagcaaggacagaagaaatctccacggctttatgtgaaatgagaacagtacaaaccctaaagatattctttcaatgaatttaatttctgattggttaccagggtagttatacaaggactactcttaccctctgttcaaattcttttttctcctctttgtccttgcaaatgtgacataaacacacaccatttaatttaggtacaaagaaatgagtaggaccaataaccagtcttcaactataattcaagcaagtctcagacaagatgagaaaagaaagtcaaggaagttacccaaaccataccaaagcaaacataaaatttacatacggtgacttcaaatacaaaagacagttgaagaaacctgtttgggaggaaatcatcactgaaacagaaggaaatttgtaccataaatattaataaaagcaagttcaaggacaatctgatttaaaaaaaaaaaaaaaaaaagatcggccgggaagggagcaacacctgccattcaaaaggctgttactgcccttggggaarattggcctag

SEQ ID NO: 690721 - DNA, 650 bp, Homo sapiens
ttactgtcagggttaaaagtgagtcacttagaagccagccaagattcaaggggtgagggactttacaacggtgtgagtatcaagtgtacgtgtagggggccatctattgacactagctaccataaatgaagtattatacagcaatggggaaaaaatacttagattgaactacatatatgaaattgcttataattacaacctataaaaacacaatctcatatagtttaactcaataacattcaaaaacaaaaacaaaactagactataatgacagacctcagaatggtgactactttaggcaagagacaaatagtaacagtaaggaagcacaacggacgcatctgaagtactggtaatattctattatctcgatccagtgatagtttcacaggagatttccccttataaattcttgtcttacatttaagatttgttctttattgtatatrtgctatacttgtaataaaaagttatttctggcccacttgcactgccaaaatcctcaataaaatactagttcacattcattcagaatgggaagaagtttttgtttgaccaaggaaaattagcaagtaaacaaacagctcagtggagactctcatgtaatgctgatgcacacaaaacttgcaaattttactttatattttaaa

SEQ ID NO: 690722 - DNA, 645 bp, Homo sapiens
tgttttcattatttttgttacacataactgaagacttcttaatttaggtgagaaggctctggtccgggtacttgttttaggtctcatactttcatcatttgcctacacttccttctgtggtatcttaacgtagcttcttcactaagcaaaatggcttgggttatttggccctttatttttttattaaaatgyctacatctttagcaaaggcttgtttcaggcataaaagacccaggtgatttattgaaattcaccttcaactcttgaccttggcagggagacatttttgccctcagcccacagaatggagatatagttgccttcagccatgaaaaggatcttggctggactttgccttgccttttagagctgagttttaataattcaaagtttgcttcctccaaacctactttaaatcttgattgtcagaggtttcttatgtttagccatatattgtgcttactgaatatggattatttgatacagaaaatgtatagtttattaactgtagtcacagacattccaatatgaacctgcagcagaatgaatctcaaagattctgactctgactttagttttttgtatatgggtgttgtgtttggagcaaaaactgcaccatatagtgatcatattccagcctaaaga

SEQ ID NO: 690723 - DNA, 642 bp, Homo sapiens
ttgtttggactctcatttgcaagagaatttaattttcaaattttatttttttttctgtgtgtttcacaatgagcgtcagttaacattgaagtgtaaggtatctatctctattrtgccgaaattttatctcattgccttacctctgataggttacataggataatgcagttgcagataatctaagctgcataataaagtgaattttcaggcttaactacagagttaacttgaagttgattcattaaatgtataatcctgacctatttcttagaatttttagggcaaaatttatacttcaaattcctatctgtggtggactcccaaagaaaattggttgcagaagtagataagtcatgaagctaataaaacaagcttcagggcccttaacctgcataggccccttctaagaccttgagagggacccagaaatgtgttcagttggatatatattttggtaaaattttcaaccttaaaaatattacttgcattcagttaagatcattgtcctttttttactctgacaccacttacatcccacttttctccctgttacgtagtgctcaaggatctgcaggtactttttggatccaaattaaggaaagatgagtggaaaatatatgtaatgtgagtttagggagatga

SEQ ID NO: 690724 - DNA, 642 bp, Homo sapiens
ttgtttggactctcatttgcaagagaatttaattttcaaattttatttttttttctgtgtgtttcacaatgagcgtcagttaacattgaagtgtaaggtatctatctctattatgccgaaattttatctcattgccttacctctgataggttacataggataatgcagttgcagataatctaagctgcataataaagtgaattttcaggcttaactacagagttaacttgaagttgattcattaaatgtataatcctgacctatttcttagaatttttagggcaaaatttatacttcaaattcctatctgtggtggactcccaaagaaaattggttgcagaagtagataagtcatgaagctaataaaacaagcttcagggcccttaacctgcataggccccttctaagaccttgagagggacccagaaatgtgttcagttggatatatattttggtaaaattttcaaccttaaaaatattacttgcattcagttaagatcattgtcctttttttactctgacaccacttacatcccacttttctccctgttacgtagtgctcaaggatctgcaggtactttttggatccaaattaaggaaagatgagtggaraatatatgtaatgtgagtttagggagatga

SEQ ID NO: 690725 - DNA, 579 bp, Homo sapiens
tacctcagattttaatatctatttttttaactcatttagaaatctgaagaacaatttttcaacagtcctagattttcatggacattcaggatatttgttctaaaggaaattatattctctttatgttttatttgaattaaaggttgcrgaaagagtagctgcagaaagggcagaatcttgtggcagtggtaatagtactggatatcaaattcgtctccagaggtaagaaatgttcacttcttatatacaggcagattttagtgaaactttgaagctggagattcaaaagaaaggatattttccccatttttatgatggttattactattacaattaccatttaaagtaactgcagcgtagatgacttgctgccacaaatttatcttttaaccccacatcagacttgtattgccttttttaaatgatgcttttatatttggaatgattagaaaaataaacatttttcctggacatagattagtagaccattactctctctgaaaagattgtgtagacctttcagtaccacctccatatacttccgactgactttttattgattttgatatcttaaccccc

SEQ ID NO: 690726 - DNA, 1788 bp, Homo sapiens
gcacatgtatggctgcataaaaaacctgcacgttctgcacatatatcccagtatttaaagtaagataaaactatatataaaaataaaaaaagaaaaagaaaacactgatttttaactgacagattatgtccccctaattgcaggcattagaataatttaccattgtgataatgcttgaaagttggattatattacagacctgtaagacggcattagactttgagtcaaaagtattcattcattttttttgtgtatttttgtgttaaattaacagctttaaaaatgtttatagggatacatagtaaaatagctatatgttcatgtgtgaggattggataagcatgtgaaatactccacagaatttgtgctcaattttgggacttcacctgccttgctatgaataaagtatgtattcttaggatacataaacttgtatattattttaatcttaatatttctaatcatctcttacrcacagcctacttctttctctataactgatggtgattaattgcctaattacttgccccatatgcttctcattattttgtgttgtattagctttcttttttttcatctattgaattagagtaggggaatttaaagttcccagacagtacgttatggttctttgtatcctctgaagtccctaatacagcactctctccatactgggctatgtgatacatttggaaaagcatgaggtttgaagttcagacttcaaattctggctgtatgtgttaactcagtacacttgagaaaatctcactcttgttaaactcttctataacatcaggctggtgtggtaagatcagtagcagtctatgagaatcaagtgagaaccatttgcacaaaataattgtataaattccagatagctataatatatactgtagaattcttcattagataaaatgatcatactaaagagtataataacttaaaaaatatagacagctattattaatgcttgcaaaaattactatttcaatggaacttactttggatttattcatttttttaatcacatcataggaaaactaaacagattctaactcatttagttgttccaatttaactttaaaaggaaatagaaaaagcaaaggagcaaacaaaaaaaatcctgtgattctaatgccaccagttaaatcatagtgttactggtggagggggtacaggttcttgacgtcttgaacaaagaattagatgaaaatgcacaaagcacggaaagaatgaagcaacaaaagcagagactaattgaaaatgaaagcacactccacagtgtgggagcaggcccgaggatagagactcaagagccctgttacagaatttttgggggtttaaatatcctctagagatttccactggtaactttgtgtatgccctatgtaaatgaagaggatatttcctgtcataactgaagtgtttccatttgatttagttctaggaagtccttaggtttccagcctccaggttctattctcctgcctcgatagaggctctttaaattcacgaaaatcattagcccttttgcactgtatatattattgttgtatattttccctgggtgttatattcatattgccttcctttacacccgaattctgcttggatgcgtctcctctgtgttcttaaaacaagacaggtaattcctattatgttgcatattataatttcttcttattgtactttccttaactttttattctacaggactaagagctctgtgagtgaagggaccatgtctaccttgcacactaatatattcaaaatgactaattatgttca

SEQ ID NO: 690727 - DNA, 1788 bp, Homo sapiens
gcacatgtatggctgcataaaaaacctgcacgttctgcacatatatcccagtatttaaagtaagataaaactatatataaaaataaaaaaagaaaaagaaaacactgatttttaactgacagattatgtccccctaattgcaggcattagaataatttaccattgtgataatgcttgaaagttggattatattacagacctgtaagacggcattagactttgagtcaaaagtattcattcattttttttgtgtatttttgtgttaaattaacagctttaaaaatgtttatagggatacatagtaaaatagctatatgttcatgtgtgaggattggataagcatgtgaaatactccacagaatttgtgctcaattttgggacttcacctgccttgctatgaataaagtatgtattcttaggatacataaacttgtatattattttaatcttaatatttctaatcatctcttacgcacagcctacttctttctctataactgatggtgattaattgcctaattacttgccccatatgcttctcattattttgtgttgtattagctttcttttttttcatctattgaattagagtaggggaatttaaagttcccagacagtaygttatggttctttgtatcctctgaagtccctaatacagcactctctccatactgggctatgtgatacatttggaaaagcatgaggtttgaagttcagacttcaaattctggctgtatgtgttaactcagtacacttgagaaaatctcactcttgttaaactcttctataacatcaggctggtgtggtaagatcagtagcagtctatgagaatcaagtgagaaccatttgcacaaaataattgtataaattccagatagctataatatatactgtagaattcttcattagataaaatgatcatactaaagagtataataacttaaaaaatatagacagctattattaatgcttgcaaaaattactatttcaatggaacttactttggatttattcatttttttaatcacatcataggaaaactaaacagattctaactcatttagttgttccaatttaactttaaaaggaaatagaaaaagcaaaggagcaaacaaaaaaaatcctgtgattctaatgccaccagttaaatcatagtgttactggtggagggggtacaggttcttgacgtcttgaacaaagaattagatgaaaatgcacaaagcacggaaagaatgaagcaacaaaagcagagactaattgaaaatgaaagcacactccacagtgtgggagcaggcccgaggatagagactcaagagccctgttacagaatttttgggggtttaaatatcctctagagatttccactggtaactttgtgtatgccctatgtaaatgaagaggatatttcctgtcataactgaagtgtttccatttgatttagttctaggaagtccttaggtttccagcctccaggttctattctcctgcctcgatagaggctctttaaattcacgaaaatcattagcccttttgcactgtatatattattgttgtatattttccctgggtgttatattcatattgccttcctttacacccgaattctgcttggatgcgtctcctctgtgttcttaaaacaagacaggtaattcctattatgttgcatattataatttcttcttattgtactttccttaactttttattctacaggactaagagctctgtgagtgaagggaccatgtctaccttgcacactaatatattcaaaatgactaattatgttca

SEQ ID NO: 690728 - DNA, 1788 bp, Homo sapiens
gcacatgtatggctgcataaaaaacctgcacgttctgcacatatatcccagtatttaaagtaagataaaactatatataaaaataaaaaaagaaaaagaaaacactgatttttaactgacagattatgtccccctaattgcaggcattagaataatttaccattgtgataatgcttgaaagttggattatattacagacctgtaagacggcattagactttgagtcaaaagtattcattcattttttttgtgtatttttgtgttaaattaacagctttaaaaatgtttatagggatacatagtaaaatagctatatgttcatgtgtgaggattggataagcatgtgaaatactccacagaatttgtgctcaattttgggacttcacctgccttgctatgaataaagtatgtattcttaggatacataaacttgtatattattttaatcttaatatttctaatcatctcttacgcacagcctacttctttctctataactgatggtgattaattgcctaattacttgccccatatgcttctcattattttgtgttgtattagctttcttttttttcatctattgaattagagtaggggaatttaaagttcccagacagtacgttatggttctttgtatcctctgaagtccctaatacagcactctctccatactgggctatgtgatacatttggaaaagcatgaggtttgaagttcagacttcaaattctggctgtatgtgttaactcagtacacttgagaaaatctcactcttgttaaactcttctataacatcaggctggtgtggtaagatcagtagcagtctatgagaatcaagtgagaaccatttgcacaaaataattgtataaattccagatagctataatatatactgtagaattcttcattagataaaatgatcatactaaagagtataataacttaaaaaatatagacagctattattaatgcttgcaaaaattactatttcaatggaacttactttggatttattcatttttttaatcacatcataggaaaactaaacagattctaactcatttagttgttccaatttaactttaaaaggaaatagaaaaagcaaaggagcaaacaaaaaaaatcctgtgattctaatgccaccagttaaatcatagtgttactggtggagggggtacaggttcttgacgtcttgaacaaagaattagatgaaaatgcacaaagcacggaaagaatgaagcaacaaaagcagagactaattgaaaatgaaagcacactccacagtgtgggagcaggcccgaggatagagactcaagagccctgttacagaatttttgggggtttaaatatcctctagagatttccactggtaactttgtgtatgccctatgtaaatgaagaggatatttcctgtcataactgaagtgtttccatttgatttagttctaggaagtccttaggtttccagcctccaggttctattctcctgcctcgatagaggctctttaaattcacgaaaatcattagcccttttgcactgtatatattattgttgtatattttccctgggtgttatattcatattgccttcctttacaccygaattctgcttggatgcgtctcctctgtgttcttaaaacaagacaggtaattcctattatgttgcatattataatttcttcttattgtactttccttaactttttattctacaggactaagagctctgtgagtgaagggaccatgtctaccttgcacactaatatattcaaaatgactaattatgttca

SEQ ID NO: 690729 - DNA, 3277 bp, Homo sapiens
tgcatacaacaacagatttccataagtttttaaagaaatcgaagtatctttatacttttggctgagataaaaaattcacatttttccagttggcatgtgttacttttatcattaacaactcattacaagtctttaaaagactgttttctttttcttctactgtgttttgtagcttcttctcagagccaggacaatgaggacaggctgagggatgtcagaccatagccttgtctcccgcgggccaggcagagcatcccaggacacccaccttcacagtgagcactgtccttcatgaacaattcaccgattaacaacctcgggccccaggaagttacactgtgcccaagttcttccggaggccacaacaataaatccaagccaccgctaatgttatttataagctgtgggattaaaacagaaaaaaatcaattaattaagattagccctttatcgagactgttagcatcttactttctcagaaccgagaccatgtaagtgaccaattcttctctaagagaatgaaagagtttgccatttttactgtaataaaaggttttcactcagatggattcaaaatggtcttagtctaagagataaagcctaaaagaatgctttattctctaagaaaaaccacctcttatatcacaatggtcaagctatgccagtaagctgagtctcagtttctacgtttataaaatgagaaaaatactacttgctccacagggccattgtgaagatgaaatgggagaacacaaggcaaagacctgatgcagggcctaggacatggaagtccccagcaaagatttcctccttccttgggacaaggcagtactgaacagtacagaaaggagaatgaaaagtaggaagaagaaattaagatcttgaagcagtcacacaaaacagaatcccaaagtaatataaccaaaagggatttaggtgtgttttacagaaaatgtttaagagggatgattggaaagtattatgtagatatatttgtgtatgatatgcttctgcaatagatacagtcagaatttggaatcagaatttctgggctccaggaattactattttaattttttctaccaaagtttagtttcttctactccagaatttcatacaaatcgaatcatatgaccgggcatggtagctcacacctaaaatcctggcactttgggaggccaagacaggagggattgcttgcacctaggagttcgagaccagcctaggcaacataatgagaccctgtctctacaaaaacattagcctggcatggtggcatgcatttgtactcccagctacttgggaagctgaagcgggaggatcacttgagcccgagaggttgaggctgcagtgagctgtgattgcaccactgcactccagcctgggcaacaaggcaagaccctgtataaaaaaaaaagagagagagagagagagaaattataaagcataaagtgtgaaatcttttgcataaggcctcttttaccagcatggtgattttgcaattcatccgtgttattgcatgtaccagtgggtggctctttctattgctgagacgtatttcattgcatggatataccacaatttgtttatccccmatggacatttgggctctttccagtatttggaaattatagataaatagataaaactgctactaatatttttgttcaagtctttttgtgaaccagactttttttactttaatagataagtcatgttacctttaaattgtcatcatttccatatgtttaatagctggtgaggctgtgcatttttccctctgatgataatcccatttcttgagtgctggctatagtgacaggtgctctaatttgtcctcatgagaatcctgcaaagtggatgtaatcatatctatattagtctgttttcacactgctgataaagtcatgcctcagactgggcaatttacaaaggaaacaggcttaattggacttacagttcgacgtgactggggaagcctcacaatcatggcagaaggcaaggaggagcaagtcacatctcaacatggatggcagcaggcaaagagagagagcttgtgcaggggaactgctctttttaaagccatcagatctcgtgagacttattcactatcacaagaacagcacgagaaagccccgcccccatgattcaattaccactgggtccctcccacaacacgtggaaattgaagatgagatttgggtggggacacagccaaaccatataaatatccattttccataagaagggagaggcacaggctcatcaagcaagttgggtgtgtggactctgaattattactgaagctgggctcactctaggccacactgtggctcccttgggctgtgacaatggctcctgagcaaaccagttgaactcatcctttgctcacttcctggaaaggcatctagacctgcacattatacatttctaccaattttaatcatttgcagttagattggtgatatatttttctcaattctgttgttttcctttaatacatcttttgctatattttgttgcataaacatttatttattcagacccaactattttgtctgatgacaagctcaatttttcaagagccagaaatttatctttgctccactgctagaataaatctgcagttctgctttcttatttttaatgttttttgtgttttgctttctgacatattggatatgcagccacatacctatgggaagtatctgctcaataaatcgcaaaatggaaatgtgacttctgttttatacctgggaaatagatgccaagataatcgaacctgtttcctgaagctgtatgggaaggccagtaggggaacttgattcttagttcactgtttttagccctcagcagggtctaccttggcccctgaccacccctagaggaggagctgtgttcaccacactccgcttagaatggagctctctgagagaagtgctgagaattacagagcatgggttccggtgcaggcttcattcttcctccttctttacttctctcctactttctttcaagtttaaagttttaacgatttctaaagtcaacaaaggacaaacacgctcagagctggaaggaacctcatagtcattcatccttttatctggcaaacactggctgagctaggtcttgtggggccccagtctagaaaggctaggtccagtccgaatctattgagggaaatggacatcgagacagaaggagagtaaggggatagagattcctccagggattagggctggggccctggggcttcactcaccccaaccaaccaggg

SEQ ID NO: 690730 - DNA, 2080 bp, Homo sapiens
tttcctgctctccctgattgcggagggaaagactgcacttgggtttctaaggctcctcgagtagctgaaaaagaagagggtgatacaaataaacagaagggcgtgctctgtgccagtccgggccagggccctcttggcatggcaattccactaggtctgagaagctgaaagcaaaggttattagctgaaaatgcaccactgagcctgttcgttctccagataatccagtttatgtatctgatgaaatgggatcaaaatgagaaacacatttccaaaaggagttggaaacagcattgtccttcctccagagcattttacaactgcaaaatcacggtgattcatgactatttcacatgatcgatcctcaagcagcagcgagtgcagcactgcagttacccagaccaggggtggactccagctccaccacatggaagctgggcagccatgtgggcgagtcacagcttctgtgagccctggttttctcaactatgaaaatggaaataatcatatctgatgagcaatgctactggcatgtaattgaaactcaaagggaacttcagaatgtaagcttatgagagagaagatttggtctatttcgttgtgatacctgcaatgttaaaacagtacttagagcatactaggtgctcattaaaatgttcattgaatgaacagtacacaacagtgctcagcaaatacttgttgaatgaataattgaatagatataatcatataagtatgtctttctagcctcacagcatttcctggagatttttgtttgtttgtgggtttttgtttttgtttgttttttattttggtagctgagacatttcgactcagagaggtgaagtaatgcatcctggtccatgcacctaattaggggctgcctcttacctttgaacccagttgtgtttggtcccatatgccttatattttccattgcatctagaagtttcttggaagttgtatcaattaggaatgctttcaacagtatcttaagctataaagcgtaacagtagcttaagcgataaagatggactcctcttccacgaggagaagtggcagatggcagttcaggactggggcaacagctgagcattggcatcatggaaccaggctatttccagctttctcttctgtcatactccaccagatggctttttgtcctaatggttgttgctttatggtcacaaatggctgctacagctccaggcatcacaaccaagttcaaaggcgggaggcaggaaggaaggagggggtggcgagtttcctgaagtgctttcttcttatatcagcaaaggaaaaagggaaccagaggcagctgtctcagaagactttcctttaagccttgcttgttagtttggccacatggccaatcctggctgcaagggcggctggagaagtggacctccagcaaagatggacgggatggccagagtcgcccaggccaatcatgattgttccacaggaacaggctcactgctgctctgaacaaaattggggccagatggtgaggggaagggaaaggggttgctcccttcgagtttcaattacatgccagtaacattgctcagyactgagagatcccctcataatttccccaaagcgtaaccatgtgtgaataaattttgagctagtagggttgcagccacgagtaagtcttcccttgttattgtgtagccagaatgccgcaaaacttccatgcctaagcgaactgttgagagtacgtttcgatttctgactgtgttagcctggaagtgcttgtcccaaccttgtttctgagcatgaacgcccgcaagccaacatgttagttgaagcatcagggcgattagcagcatgatatcaaaacgctctgagctgctcgttcggctatggcgtaggcctagtccgtaggcaggacttttcaagtctcggaaggtttcttcaatctgcattcgcttcgaatagatattaacaagttgtttgggtgttcgaatttcaacaggtaagttagttgctagaacccatggctcctttgccgacgctgagtagattttaggtgacgggtggtgacaatgagtccgtgtcgagcgctgattttttc

SEQ ID NO: 690731 - DNA, 600 bp, Homo sapiens
gggaatcattatttaacaatggcagcctgaggctcaggacaccaaagtaagttgaccaagaccacaatgctaagcagaggaagaaccaggatttgaactcagatctgcctgactgttacgctcttggtttttcattgttctatgccacctgcctcttgaacacaaccgatcacattgaggtgcaattctgcctctccagggctgcctctgtggcagggctcaggcctgggcctggaaggagccagcactaggatctgggtgccagatgcccatggccagagccaactgggaagatgctgagtgacactcatggagccagtctgttactggaaacaggtcctgatccagaagccaagagagggttcttgggtcttgctcgagaaagaattttagttgaatccataaagtgaaagcaagtttattaagaaagcaaaggaataaagaatggatactccataggcacagcagcccttagggttgctggctgtccacttttatggtcatttcctgattatwtgctaaacaagggggtggattattcatgagttttccagggggtgggcagttcccagagctgaggattccttcccttttttgacc

SEQ ID NO: 690732 - DNA, 540 bp, Homo sapiens
atatgtgtatataatatatatgtttatatatgtgatagattgttaaaaaatgaacaaatcatacatttatatagtctctcatacaaaaatttccataaaataaacaaaaaggaagggaaagaaaaagcttgtgtaattctagaaagcaagtaaaagttaaaatccaaagattggtatgaaattctaaaagacacacagtagcatagaggggctgtctggtaactgcactctcaatttttctatagaatatcttatttttgtctgctttatcagtttctgagaaaaagaatgtgttgaagctgtccccaatacttttggaaaagtaaagttcttgtatttgaaacagttgactcatatgtgccatcaatatgttggacagtatacaagtatcttcaccattacatttggagaccatgaaggtatcttaagagcaagatacatttctgtctttatcaattcatggtatcattcccaacacagatatttgygctggacgcagtgctgggtgcaggggaaacagaattcaacaggaagagccag

SEQ ID NO: 690733 - DNA, 613 bp, Homo sapiens
tcctctaccctccctacttcaattatctttctccccttctgattgtttggcatgtattgcctgaattagtaggccatgaaatgttctttttcctataactcagtccctgacatttccaaatcttccttgtgagagatatcaaaaaggagcacttcatttctttacagaattaataagatgtgtggccttaaytgcaaccttttttgctaattaaaatgcagcaggaatgcataatgtctgaatttgctgctggaaatattcatgattttaaaattttatgcttttgaaattgtaccttttttgtatattgaaatatatacgaatatactgaatcctgttgcacaaaacaatgaagatggaaaaaaaataatttcattgttcattgccatttgtggcactctaccatagtgagtgtattttgtaatcgtaattcattaagagcaagaaagagatttctgattcttactaaatttgttctcgtgttttacttggacaatagaaattgcatccttaaagcactagctcacaatttctacagattaaaaattgaataacctcaaatgctcaggaatatcatctgaagatatacagaattatttttacatggcaactt

SEQ ID NO: 690734 - DNA, 604 bp, Homo sapiens
agatgttgccgtgaagatattttttagataagactaacatttacataggcagactttgagtaaagcaagttatcctttgtcttagtctgttcaggttgctataagaaaataccataaatgaagtggcttataaaccagagacatttatttctcacagttctggagactgggaagtccaagatcaaggaacggtttcctgattcatagatgataccttctttctgtgtcttcacatgatgtaaggagcaagagtctctcttgagtctgttctacaagggcagtcatctcattcatgagaactccatcctcatgacctttcagagagagaaagaaagataaaggatgtggttaaaaaacattatgcaggaaatgctgaaagtattgatactctagattatcaactgaattaaaattataatgccacwaccaaagtaactaggaaaatgagataagaattttgtgaaatactctacctttatagtatatcaaaattatataaatagtgatcctaatctgctctattaatttttctttttaggtgtcaatattacccatttgaaataacatataatcattgttgtacttttgtagacagattatgtta

SEQ ID NO: 690735 - DNA, 1511 bp, Homo sapiens
ctagtgaatttggggctaacccctgtaagttttatttcagttttattgttgaaagtctttataaaatgtgaggctacttggcagtgcatttgaacatcgcctcaatttttttttttatgttgaagtgttgtcatttgaagttaggctccgtggttagaaaaggcacaggaaatgaagttctagcttcacagaccacaggatatcttgtagaagctggtgggtggcttttatttaaactgtgatatcaacttgttttatctttctcccacacaaggggaataaaatctctagttcatccattctgcaaatatttattgagcagctgctttgtgccagaaccgcatgaggattctgggtaccatggtgaattggaacacagctcctgtcttcttggtgctttgccagtcttgtgactgcagggcaggaattaagatatagtatggtaaggactgagaactgctcaaggtgctgtgggagggcaggcttgaggagggtcagggatggcttctcacaagatgagatatctatggtagacctgaatttagccaagataagagagtggaacacgctccaggtcgaaggaggagcttttccaaaagcacagaggggctgggcatggaggtttatgtctgtaatcctagcacttggggaggccaaggtgggaggctggcttgagcccaggagttcaggaccagcctgggcaacatagtgggaccctgtctctattaaaaaaacaacaacaaaaaaagcaaaagctcagagagaggaaagaaatgtcacccctgggaggaagggaaaggcccactttgcttccatacacaagcactcactcatcctcctttctctgcacactcaccctgggcagtagagttgtgtcgacctccctggagcatctgctggggcagctgagtttcccttgacttgggagctccatctgtgcaggccctggcctaacccagcctggcttccaccaggaggctgccttacttagcccacttgaggaagggggacacaggagtacctccatttggggtgatcactatggtaacaatcacatcaggttgctggggactaaaacaggtggacaaaggggagtacagaagccccaaacccctggacgtgccaaggtccctccaatgtggttggcaaatcggatctctttcaagactcatgcatactttcattccagatcttttacctagaggccattttctggacagagakccaaaaaaaagtcagaaatgcagcacataccccatagttttctcagcacttggaattatctagtccttcccattattctgcatttgctcatacctgtagggatctggtagacgcacaaccaaggaactacatttgcctttttttgtccttttaaaattaatccccaggtgccatcagcattattaccacctaccctcatgttggaaagggttaacaggttctgttatttatagaataatgcactttgagaaagggaccttccttcatctttgagatgagtcagtcaa

SEQ ID NO: 690736 - DNA, 603 bp, Homo sapiens
gaggaccaggaaattttattgctttatgtcattgaggattaaccccgtttctgtttcagttttctcttttctcttttttctggaatgcctccatcataacattaaacattctggatagatcttccaaatttcttttttgtcctcctatttctacctctttttacttgtactttctgagtaatttcctcagctatattttccaaatcttctattggtctttcagttctgccatagtatttcaaatttccaagagatttttttccttgtgaatatttctattttcatagaaatattttaacttctataaaatattttttctttgtatcactgtatattctctattttcttaaagttgtatttttttttccttgctgtttgtattgatctctttcataatacagattttcctaaaaagtctagtgattgttgacctggaagttccatgccagggggagcaggagttgaagaaaggttttttttgttttgttttgttttgttttytattattatactttaagttttagggtacacgtgcgcaacatgcaggtttgttacatatgtatacatgtgccatgttggtgtgctgcacccattaactcatca

SEQ ID NO: 690737 - DNA, 488 bp, Homo sapiens
tcatctcaaatttttcttcctatcccagaggaaatctaaaggaagtgggcaaatgcccctaaggctactaccataaattccataagttgcgtctaatgaatcaagtgaggatggtagcaaatcgatgtctcagcacagaaatggataagagatctttcactggaatggaaaaatgaaaagttcttctacgaatattttaggacactttccaagatgatttagctgtggataacatgataaatttcatcttgcagaactgcattttcaggattctttgactttaaaaatcattggttaagacagccttacatttatgtatatatatgtatgtgtgtgtatatgtatatatacacaagtacataatctatatacacatgtataatatayataattatataaacacatcagatacacacatgtatgtatacatatataatgtaatatatgtatatattgtataaacattgtgtgtgtgtgtgtgtgtgtgt

SEQ ID NO: 690738 - DNA, 585 bp, Homo sapiens
gtcacgcaggctggagtgcagtggcatgatcgcggttcactgcaacctctgcctcctgggttcaagcacttctcctgtcgcagcctcccgagtaactgggactacaggtgcctgccaccatgcgcggctaatttttgtatttttagtagagatggggtttcaccttgttgatcaggctggtctcgaactcttgacctcaggtgatccaactgcctcggtctcccaaagtgctgggattacaggcatgagccaccatgtctggccctcctttcgtttcaaatgtcactttcttgatctttctggaggctaacacttatgcaatttatatrtacacaatttgagaggactatatgtggtcacaatttgtaagagcttacttatatttaaagtgggctttctgtaggtcacatagttgcagcttttctttttctccaatatgacaatcactgtcttttaattggcctgtttagactgttcatatttaatgtggttgtggatatagcaccattatgttttatcatatttggaattattttctacttgttgcattagttcttttcccctctttttctggttttattttac

SEQ ID NO: 690739 - DNA, 585 bp, Homo sapiens
gtcacgcaggctggagtgcagtggcatgatcgcggttcactgcaacctctgcctcctgggttcaagcacttctcctgtcgcagcctcccgagtaactgggactacaggtgcctgccaccatgcgcggctaatttttgtatttttagtagagatggggtttcaccttgttgatcaggctggtctcgaactcttgacctcaggtgatccaactgcctcggtctcccaaagtgctgggattacaggcatgagccaccatgtctggccctcctttcgtttcaaatgtcactttcttgatctttctggaggctaacacttatgcaatttatatgtacacaatttgagaggactatatgtggtcacaatttgtaagagcttacttatatttaaagtgggctttctgtaggtcacatagttgcagcttttctttttctccaatatgrcaatcactgtcttttaattggcctgtttagactgttcatatttaatgtggttgtggatatagcaccattatgttttatcatatttggaattattttctacttgttgcattagttcttttcccctctttttctggttttattttac

SEQ ID NO: 690740 - DNA, 673 bp, Homo sapiens
ccagtcatcctttggtgggtatataggagattcatacagaaaccttcatggtagcaatattcttcatgtttttgctgttctccatacattatcagatttaatttttatgtttttgaatagagacatgttaaaatatcagtgaggatagatgaatgctttttggatagtgaatactttttgtccttctgttcttgctcctgcctgcttcttgccatctacctggttatagaggcagggatctcagcagctttggttttatgagatgactgwatatcctttggccacagttgattggtccaaggtaggcaccagatctaagttttgacaatgagagtcccaactatggagatttggggagaggagtgagagcaaaagaaagaaagaaagaagaaagagaaattgagagaaagaccagtcattctctgggtggctggacctgtaaataaggctgtttatggccatgtttttagacagtaattaggaaaagcagagagaaaaaaataaatagggcagaggcacagagagatgcagaactaaataagaaagaagatcttgtacgtttcctctagcttccagtttattccagaggcctggctgtttctcttgtttccatgtgacattcttgtaactgtataataaattcgcttattttacttaaataggtttctgctat

SEQ ID NO: 690741 - DNA, 673 bp, Homo sapiens
ccagtcatcctttggtgggtatataggagattcatacagaaaccttcatggtagcaatattcttcatgtttttgctgttctccatacattatcagatttaatttttatgtttttgaatagagacatgttaaaatatcagtgaggatagatgaatgctttttggatagtgaatactttttgtccttctgttcttgctcctgcctgcttcttgccatctacctggttatagaggcagggatctcagcagctttggttttatgagatgactgtatatcctttggccacagttgattggtccaaggtaggcaccagatctaagttttgacaatgagagtcccaactatggagatttggggagaggagtgagagcaaaagaaagaaagaaagaagaaagagaaattgagagaaagaccagtcattctctgggtggctggacctgtaaataaggctgtttatggccatgtttttagacagtaattaggaaaagcagagagaaaaaaataaatagggcagaggcacagagagatgcagaactaaataagaaagaagatcttgtacgtttcctctagcttccagtttattccagaggcctggctgtttctcttgtttccatgtgacattcttgtaactgtataataaattcrcttattttacttaaataggtttctgctat

SEQ ID NO: 690742 - DNA, 660 bp, Homo sapiens
ttgttttccataatggctgaactaaattatattgctaccaacagagttcaagtgttccctattctctacattcctactaacatttgttgtggctttttgataattgtcaatcaacaggtgtgaggtcatgtctcattgtggttttaatttgcatttccctgatgattagtgatgttgagcattttttgatatactgattggccatttgtatgtcttcttttgaggaatgtctactcaggtcctttgctcatyttaaaatctggttgttttcttgctatggagttgtttgagtttcttacatttgggtattaaccccttattaaagtttgtaaacattttctctcattctatatgctgtctcttcattctgttgtttcctttgctgtgcagaagcattttatttgacataattctgtttgtctacttttgctttggttgcctgtgcttttagggtcatatccaaaagaataattgtacagaccaatgtcatgaggctttttccctaagttttcttctagtagctttacagtttggggtcttacatttaagtgtttaatctattttcagttgatctttattgaagagcctgtcctttttacaaaacacatatattttaaaatagaagattaataaatccaaacaacaatttcagcatgccaa

SEQ ID NO: 690743 - DNA, 660 bp, Homo sapiens
ttgttttccataatggctgaactaaattatattgctaccaacagagttcaagtgttccctattctctacattcctactaacatttgttgtggctttttgataattgtcaatcaacaggtgtgaggtcatgtctcattgtggttttaatttgcatttccctgatgattagtgatgttgagcattttttgatatactgattggccatttgtatgtcttcttttgaggaatgtctactcaggtcctttgctcattttaaaatctggttgttttcttgctatrgagttgtttgagtttcttacatttgggtattaaccccttattaaagtttgtaaacattttctctcattctatatgctgtctcttcattctgttgtttcctttgctgtgcagaagcattttatttgacataattctgtttgtctacttttgctttggttgcctgtgcttttagggtcatatccaaaagaataattgtacagaccaatgtcatgaggctttttccctaagttttcttctagtagctttacagtttggggtcttacatttaagtgtttaatctattttcagttgatctttattgaagagcctgtcctttttacaaaacacatatattttaaaatagaagattaataaatccaaacaacaatttcagcatgccaa

SEQ ID NO: 690744 - DNA, 1895 bp, Homo sapiens
cacttttggaattgatgaaccttttaattatgatacattacatatattttaaacaaacatttgccattatgacaggtgacatagacacatttatctataaagcattaattttaaaaagaaaattgttggatgcttgagaagtaggaattttatgtgtcaatgatgtccttttgttttccattaaagggaacctgctgtatgtataaaaacatttttgagtctctgtttctaaatagtgttttctcagttagttttgaaaatcacagtctcaaaggctagcattattcaaaggataaaaattaaacttggtattattgaatgtagtttagtgatatgcagtaggggctcaaaatagcagtggcttacacagatagaagttctttcttayctgagtgaagcatgaagaattgcactcatccttcactcacatggtgatatggtttggctctgtgtccccacccaaatctcatattgacttgtaatccccataatccacatgtgtcaagggaggaacccggtaggaggtgactggatcttggggttagctttcccatgctgttctcatgatagtgagtgagttctcacaagatctgatagttttataaggggctcttccctcttcactactcacacttctctctcctgccaccatgtgaagaaggtccttgcttcctcttcaccttccactatgattgtaagtttcctgtggcctccccagccatgtggaactgtgagtcaattaaactgctttcctttataaattacccagtctcagatatttctttatagcagtgtgagaacagactaatatacatggccacccctggcagcacgaggatgagaaatgaagactttattcaggatggccagatgcgcagttaactgagagagtactggagaatggttgttgaagctttcagttggtcataatcacacattgtaaaacactttctcaggtaaaatttaatataggaactagcagaggcactaaccttttgagttttcatggaactaggcttcttcactgttgtatttacatacactacatatacatacacacatatatagtatgtatacatatgtgtgtatatacattgtatatatattgtacatatatacatatgtacaaatggtacagcatatacacatatatgtgtatatataatttatatatttaattgtttaatactttttattaaacatttttattaaatgttttattaaaaattaaacattaatatgttaaattttattggcatttaagataacctaaatagcattttattgatattactattaaatagacgcaaactattgtcagcagaattattaagataagttgggtgattttccccttgagggactgaatatacaaactgactctatacgacaacagaattgtcacacacaatgtctgtagcaactagttggagaaactatcttagtccctttgggctgctataacaaaataccatcaactgtgtagactgaaaaaaagaaaactagaaatttatttatcatagtgttgatgactgggaaaaccaagatccaggtgctggcagatttagtgcctggtgacggcctgcttcctggttcacaaatggagccttctcactgtgtcctcacatggtagaaaagacaaacgagctcccttgggcctattttatcagaaaactaatcccattctgtggaggtgttatgacctaatcacctcccaaatggccctacctcctaaaaccattaacttgagagttagaatttcaatatatgaatttggaggagacacagacattcaaaccacagcaggagctataccacaacctctgcagcaacagctcagtatggtcacaactcggtcaatgactgcttacttccctattttttgcatcaggaca

SEQ ID NO: 690745 - DNA, 645 bp, Homo sapiens
tatagtttacattttcaaggtttataacatttacagtctgttctgtaaccagcttaactttctattgtttttcactccaaagggtgagttaaagagcttaaaaccaataaacagcatttacactatcatggccatggatgagtctttccttaaggtcccaagtagggctaggagtacatttgcttctctccttgtccagagtcagggtcactaccccatgccattcggcggagaatgctcctagggtcaagttttagtggattctcctttcttcacctcaccaactacctttatcagatcttcaactttccccaagcctcccattacacttcctgttgtccccaccccctcccctttcctgggtcccctctgctggaatcctccccacctcatccatatgccctctccttcaacaggaatgggtgctgacaagactggcacacaaatttcatcctgcaatttcctacgctgctctcccgggggcggggggcrgtccatcaatctcgacaagctgtgccttcttctttcttcacttactcctcattttgttacccccaagtccttagaaagggtatgtggagggatatgctttaaaagaaggggcacagcataatggctaataacagagttctataattcacctca

SEQ ID NO: 690746 - DNA, 610 bp, Homo sapiens
atatgtctctctgacccagccaggaaagcttcttccttctaaggatttatgtgattagattgggtcaaaccagaacatttcaaagtccatacscttaatcacatctgcaaaatctctgttgccatggaagataaatattcacaggttccagagattagagtgtgaacaaacaggaggaatgggtgtcctctgtttgtagtcctctgcatagcagaggactacataattgttccttggtggttttgtgtatgttactcacagaaagatttaaaattcagtacagaaataacaaaattgattgcatacataaggactgcttttatgttaaggaatattctatgaatatttggtattattaacatttactatacttgagagaatttagcttaattgagtaacagctcttctgaaaatattttatgccatttgttatgtgtaattattattataaattgaaattttagtcaggttatatactttactagagcacttaaatgaacttaatagtaaaaatatttatatgtttaatttgttagattcacaagtattatttaagtacttgagtagatttattagcgtacttaataagaaaaccagatgtgttcatatg

SEQ ID NO: 690747 - DNA, 469 bp, Homo sapiens
ccttgattaaaccctagttctgcttcctggaagtgcttctgtgaggctctgagatccatgctccatgccattggctatttttttttttttaatgagtcagtctcctttattattaagaaatgattcatgtttcttttcacagaaagcaggaaaaaaaggaatggctaatgtttatgttacagcaggtagtcaggcagacatgagcagggcaggagacagtcctcaccccctgcaacaaagaaagtcaggcgaccatcaggtgatagtcaagtggttgttaacygtctctctaaaataataattagttgcagccatggagagggagtatctcaatagacagaaacacgtgaaatgtgatcaacagcttcctgataagatctcaggagttgggcaagtgggcttcagcatgcatactaagaggcaaaatggcaaagtttaagtggtgtatgactttcctctaggtcacaca

SEQ ID NO: 690748 - DNA, 612 bp, Homo sapiens
aggggcattatggcaacaggaagaaaaggtcagagctttgtcaatattttttttttcagtcaagatgaagggatatcacctaacattgtaaaccaagttttattaactaatttttttaaggatttctattttatcagcatttctaatttataatgttaattctaagcaacaatctgacaagtttaaggttaaaaaaaaaacaagatgcaaagcaattactttccagcattcagcactaattaatatagttcactaaaaaaaaaaacaagattttgtaactgtttaatgaagcctcccttttcactgctgtagttatgttctactggtctgggtacctggagaatatggagcttcagaaaaaacacacagaacttggtcaggttcctgctcttctcaatttgtagttacaagggagttgctgctgttgtgatcacaaagcactaccttcctggtagctggtacctgctgcacactccccagcaatctatttggtacatagaatctggcaggggaggaaaattttactaagattcattttgtggcctaatatacaatttgtgtgtgtgtgtktgtgtgtgtgtgtgtgtgtgtgtgaacgcattctgaggactt

SEQ ID NO: 690749 - DNA, 629 bp, Homo sapiens
tagtttgttcaatatagatatgcttctggtgtttttctggctgaaaacattgacaatagacagtttgcttacactcactgatgctgaaagcttaactgatatgatcccttaaaaggactggacttttgcaggagagaaaagccactgaaattagattctgataatttggctggacrtcgtttgtttagtttttatagctgtgatcattctggcaaaatactagttttctctaattgttggtttcttaatctatttgaaggaatattattatatggcgagttattaatgtggttaatccaggcattaacaaatatttaactcatgtcaccttatgtaagattctgtgcccaatatttgagataaaatggagagcaaagcagacatggacttgccctcacaaagattaaaatctaatgaaggagacaaatattactgaaataactgccaaaagcacgtgcaaaattacaaccgtggtaagtgaagcaaaggctaaagcatgattaaagcatctaatagataaatccaacctggttataaaaagaaaaaaacctgagctgatgatatcttatggaaaattaaaaattaactggtgacatgaagtagtggagaagaccatactacacagataa

SEQ ID NO: 690750 - DNA, 629 bp, Homo sapiens
tagtttgttcaatatagatatgcttctggtgtttttctggctgaaaacattgacaatagacagtttgcttacactcactgatgctgaaagcttaactgatatgatcccttaaaaggactggacttttgcaggagagaaaagccactgaaattagattctgataatttggctggacatcgtttgtttagtttttatagctgtgatcattctggcaaaatactagttttctctaattgttggtttcttaatctatttgaaggaatattattatrtggcgagttattaatgtggttaatccaggcattaacaaatatttaactcatgtcaccttatgtaagattctgtgcccaatatttgagataaaatggagagcaaagcagacatggacttgccctcacaaagattaaaatctaatgaaggagacaaatattactgaaataactgccaaaagcacgtgcaaaattacaaccgtggtaagtgaagcaaaggctaaagcatgattaaagcatctaatagataaatccaacctggttataaaaagaaaaaaacctgagctgatgatatcttatggaaaattaaaaattaactggtgacatgaagtagtggagaagaccatactacacagataa

SEQ ID NO: 690751 - DNA, 629 bp, Homo sapiens
tagtttgttcaatatagatatgcttctggtgtttttctggctgaaaacattgacaatagacagtttgcttacactcactgatgctgaaagcttaactgatatgatcccttaaaaggactggacttttgcaggagagaaaagccactgaaattagattctgataatttggctggacatcgtttgtttagtttttatagctgtgatcattctggcaaaatactagttttctctaattgttggtttcttaatctatttgaaggaatattattatatggcgagttattaatgtggttaayccaggcattaacaaatatttaactcatgtcaccttatgtaagattctgtgcccaatatttgagataaaatggagagcaaagcagacatggacttgccctcacaaagattaaaatctaatgaaggagacaaatattactgaaataactgccaaaagcacgtgcaaaattacaaccgtggtaagtgaagcaaaggctaaagcatgattaaagcatctaatagataaatccaacctggttataaaaagaaaaaaacctgagctgatgatatcttatggaaaattaaaaattaactggtgacatgaagtagtggagaagaccatactacacagataa

SEQ ID NO: 690752 - DNA, 629 bp, Homo sapiens
tagtttgttcaatatagatatgcttctggtgtttttctggctgaaaacattgacaatagacagtttgcttacactcactgatgctgaaagcttaactgatatgatcccttaaaaggactggacttttgcaggagagaaaagccactgaaattagattctgataatttggctggacatcgtttgtttagtttttatagctgtgatcattctggcaaaatactagttttctctaattgttggtttcttaatctatttgaaggaatattattatatggcgagttattaatgtggttaatccaggcattaacaaatatttaactcatgtcaccttatgtaagattctgtgcccaatatttgagataaaatggagagcaaagcagacatggacttgccctcacaaagattaaaatctaatgaaggagacaaatattactgaaataactgccaaaagcacgtgcaaaattacaaccrtggtaagtgaagcaaaggctaaagcatgattaaagcatctaatagataaatccaacctggttataaaaagaaaaaaacctgagctgatgatatcttatggaaaattaaaaattaactggtgacatgaagtagtggagaagaccatactacacagataa

SEQ ID NO: 690753 - DNA, 629 bp, Homo sapiens
tagtttgttcaatatagatatgcttctggtgtttttctggctgaaaacattgacaatagacagtttgcttacactcactgatgctgaaagcttaactgatatgatcccttaaaaggactggacttttgcaggagagaaaagccactgaaattagattctgataatttggctggacatcgtttgtttagtttttatagctgtgatcattctggcaaaatactagttttctctaattgttggtttcttaatctatttgaaggaatattattatatggcgagttattaatgtggttaatccaggcattaacaaatatttaactcatgtcaccttatgtaagattctgtgcccaatatttgagataaaatggagagcaaagcagacatggacttgccctcacaaagattaaaatctaatgaaggagacaaatattactgaaataactgccaaaagcacgtgcaaaattacaaccgtggtaagtgaagcaaaggctaaagcaygattaaagcatctaatagataaatccaacctggttataaaaagaaaaaaacctgagctgatgatatcttatggaaaattaaaaattaactggtgacatgaagtagtggagaagaccatactacacagataa

SEQ ID NO: 690754 - DNA, 595 bp, Homo sapiens
gaatgttcctattcctttcattttaaaatttataaaataactgatggcaaaaagattttttgggtttatttttgctacgagtctttttcttagaatttccactaatacayactcaaaacaatctaacccgtgttgcagattatttacaattatttttattttgaatgggggtatcatattttgcattttgataccaaatacttctgaggtgtttttttttttaattaattaatttatttttttgactgttcttgctgtgtcacaggctggagtacagtggtgctatctcagctcactacaaactccgcctcccgggttcaagcgattctcctgcctcagcctcttgagtagctgggacaacagacgcgtgccaccatgcacagctaatttttgtatttttaatagagacaaggtttcaccatgttgacctggatggtcttaaactcttgacctcatgatccacccgccttggcctcccaaagtgctgggattacaggggtgagcaataatatttttaaaataagaactacatttatccatctatttatttaataagcatttattgagtgcccagtatatgcctggattgattgtc

SEQ ID NO: 690755 - DNA, 595 bp, Homo sapiens
gaatgttcctattcctttcattttaaaatttataaaataactgatggcaaaaagattttttgggtttatttttgctacgagtctttttcttagaatttccactaatacatactcaaaacaatctaacccrtgttgcagattatttacaattatttttattttgaatgggggtatcatattttgcattttgataccaaatacttctgaggtgtttttttttttaattaattaatttatttttttgactgttcttgctgtgtcacaggctggagtacagtggtgctatctcagctcactacaaactccgcctcccgggttcaagcgattctcctgcctcagcctcttgagtagctgggacaacagacgcgtgccaccatgcacagctaatttttgtatttttaatagagacaaggtttcaccatgttgacctggatggtcttaaactcttgacctcatgatccacccgccttggcctcccaaagtgctgggattacaggggtgagcaataatatttttaaaataagaactacatttatccatctatttatttaataagcatttattgagtgcccagtatatgcctggattgattgtc

SEQ ID NO: 690756 - DNA, 614 bp, Homo sapiens
cagaattagaaacctggcagtcttatttcagcgcctacaggctcaatttccatagtgttctaccttgcattgaacagagttctaacttccgtcataagtcttactactctgtgcactgaacwatggttaaatgtgtctagatctctctttccaacaaaaaaaaggtaatggtatgtaaagagcttagaatagtgcctgacaaaaacgtttaataaatgatagctaaaattaatataattattaaaatagagaaagacgaatttctgtctgacattacctagaagagcctgaacaaagggacttaaaatatgaggagaattttgatgggtaaaatttaggaggaagaatagcaaaggttggattcaaatacatgcaggtagaagggaggagactgggcttgcaggagctatggctgaatcaaaggcggagtgttgggagaatatagtgagaaacaaatagaagagaattcgtgtgttccatttgcagtggaaaatccattgacaggcttctcaggagggaaaggacctgaatatttgcactttacaaaaataccttcggaagcagagtggagggtgagtttgagagagggaatagtaggaaaacaagtagagaga

SEQ ID NO: 690757 - DNA, 653 bp, Homo sapiens
atgtagctggtgatggatgcagtatcaaggttttctcctagtctgtgtgctactgggcccctattttcagaagcatattaaaatggagatgttggraattgaatttggtttcaaagcatccttcttatggcagtgtcctatatattggaactagagtttgtctctttcttgctcctgttattatcatagctgatgggacatgatttcactgaaatatttcttcaaaatcatttgatcagaagtggtggactatttagtactggcttgtttacttaaaatatcatttcttgtgatatgtggtcctgtatattcattgaataactcatttgcttaaatgagcttggtgaagcaaaatttaggaccacatttttatggtcagtgattcttagtaatataatattgttaattgttttcttttcataaacatgatatttgttctatttttgttttcttttcacaaactttatacttgttctattttctttccccaagaatgaaaatcaaaatggattttttagagtttttttaatatacaacaatatatagcacaaatgtaaaattaagcaggaaaaggtaaagaaggaattcaagtggatggccatggctgaggaagatgaaaagggaatataatcaatgttgggtacagagatact

SEQ ID NO: 690758 - DNA, 1454 bp, Homo sapiens
tctggggcccttactctttgcccccaggctaatgcctccccaaagcagggactgcttctttatgccagaactcatctttcctaaatgagcaatctaaaaacgctatttttaattaatgaactaagcggcatacttttatgaaaaacattaatttcctgacgtgtacatttttatatagtgtcgcacaatattaagtgaatgtaatttgagttccttaaccaaactcctgtaaacagcaaactgctacaaaagttaatttagcatcattagcttgtagcatggctatgtggatatcaaaaatgcacttcaaacaccagctaggaaaagatcctcaaatataaaaatgcaagttaaaaatgtaaatgttaaatgcttatcaaagtaataaaatgaacccaagtaacagcatgttcgagctagactggaacctggaaggcatccagtccaaacatcaactagtaagtcagaagccctctgagtttaacagatttgctccaagtcccacagagagctgcaggtctgtaaaccaacccacccaccatgcaccacaggggccaggactccaacgagaagttgctgtgggcaccccagtctcttaacactcttacttctgagactgccctcacctagctccttgcctgcttatcttcaagttctacttttgtcctaaaatcatccccagggcttgaacacagatgcagcttctttggtttcccctgaaaactctctcctggttggaattccacacaggccccagctccacctgcttttatctgcctggacactcagaataacaacagcagatgccaagcccctgtcctcagcacccatccctggcaccagcctggtgcagcaggcttcttggctagtatgtcacagctttcggtggtcagatcattttgccagagaatttgaaataacaggctgggtgcagtggctcacacctgtaatcccagcactctgggaggccgaggtgggcggatcacaaggtccggacatcgagactatcctggccaacrtggtaaaaccccgcctctactaaaaatataaaaaattagtggggcgtggtggcacgcgcctgtagtcccagctattcaggaggctgaggcagcagaatcgcttgaacctgggaagtggaggttgcagtgacccaagattgagacactgcactccagcctggacgatggggtgagactctgtctcaaaaaaaaaaagaaagaaagaaagaatgtacagcagactattaagcctccattatcaactctaactgtaccccagactgtccacgtcacacagagccaggtaactggttttgtttgggtcttatctctagcaggactgccatccatggaaacagagcacgaaggtggaaggcactgagaagtttcacacatgtgaaaaattcacttgatgttaacaaatactgagcagcaagcagaacagtccacagtttc

SEQ ID NO: 690759 - DNA, 1610 bp, Homo sapiens
agtagggtacttggaaagcatcccccgcaaataagggttggaggaatgactctatagcaagggtgcccaacgccagggccatggactggtacgcgtccatgggcagcacagagggaggtgagtggtaggtgagcaggcaaagcttcatctgtttacagccactccccattgctcaaattaccaccggagctccatctcctgtcagatcagggcagcatgagattctcataagagtgggcaaaccctactgtgaacttgtatgtgagggatctaggttgcgcgctccttgtaagaatctaatgcttaatgatttgtcactcccatcaccaccagatgggaccagctagttgcaggaaaacaagctcagggctcccactgattccacattatagtgagttgtataattatctcattatctattacaatgtaataatagtagaaatacagtgcacgacaaatgtaatgcacttgaatcatcatgaaccatcccaccaacccccaggtctgtgtgcccgaacaaggttggagacagctgctcttggtgatatagacatacagtgagatgcacacacaccctgccctttgtgctctacaatggccgacattaagtatgtcctaagaaatgtgcacaagacttacaccatcctctcctcactgaccctaaaaaggtctgacaccatgtgacccaagtcaaagccgcctcttcccgccactcactcgtcccaccacgcctccctgcagacgcgtgtgccacttggctccattttgctcgctaagggtttatataaatacaaatccacccaagaaaggaaaactatttccccttttcctgctctggataaagttccagcagacttggctaaggatgagacaagcttcacagatcaaagacagttggggagagggggagggggaggagcagagcacaaacctagctcagccctctcctctcacaaaacacaagtcaagattataaaaagcccacagtgctgcactgaagtgctttcaaaaggttactctttattttgatagcctgtcacctacttcttactggaaaatggttccagactcagagaggttactgcagacggcataaaagcattcagacgacaacgttctctccccaacattcattttccttgcaagagaaaataggacgaacccttatgacctgaaattataaaactagcgcccaaggaccttatcaaaatctacctgactttgaagtactaaggggaatcatgtgaagtccttaataatgatcagaagccaggccgggcrcagtggctcgcgcctgtaatcccatcactttgggaggccgaggcgggcagattgcttgagaccagaagttcgagaccagcctggccgacatggtaaaacctcatcctactaaaaatacaaaaattagccaggcatggtggtgggcacctgtaatctcaactactcaggaggctgaggcaggagaatcgcttgaacctgggaggtggaggttgcagtgagcctagatcatgccactgtactccagtatgggcggcaaagcaagaccgtcttgggaaaaaacaaatgatcagaaggcgtatacagtcaactcctgaacaacaaaggtttga

SEQ ID NO: 690760 - DNA, 1584 bp, Homo sapiens
ttgttttaataagtcactatgtatggagggcttacaatagtgcctggtataattaatcaatagatgttggcttcaatcctatatataatgtaatgcattatacagaatcattaggactcctttgtaaaatgctcagttatgtgtattaacactttgaaattccaggccaggcgtggtggctcatgcctgtaatcccagcactttgggaggcygaggagtatagctcatttgaggtcaggattttgagaccagcctggccaacatggtgaaaccctgcctctactaaaaacacaaaaaaattagctgggcatggtggcacatgcctgtaatcccagctactcaggaggctgaggcaggagaattgcttgaacctgggagacagaggttgcagtcagccgagattgtgtcactgcactctagcctgggcaacagagtgagactctgtctcaaaaaaaacaaaaacaagaacaacaacaaaaaacacacacaaaaaaacaaaaaagactttgaaattcctattgtttctttaaatttggagtaaaagaacctcccaaattttagtattcttaaaatatccaccagctattggagaataagggttctagtagaagttgaagtgttacaactatatcaaatttaaaaaaaccagatacacctatgaacattttcccaggcttgagtgatgcctctgggagtgagttgtctcttcttatctggatcctgggatggacactggtgtccctggggtaatccatctgcgctcatgtcacatgctatggctaggaataaccaggaaatactggagtgaggattcacactggctcttttacattttcccaaggaggaggaggaaaagaaagaggaggaggaggaggatggttatagtggttcttacaaatccctcagctggatggctggatttagggctgggcatttgtgctttcaagagccaggtcattctaaaggaatgtgagaagtgcatctctgaggacagagattaaacagtgggaaaatagataagtgatctgggggtctgtcgactaattgctagctaaaagttaacatttcactagctcctgctgagaaggtaatggccaggcttcacacatggagttttattatgagaagagagagtagcaagtgtgggaagatgaatttatcatccctgcacacacaccacctcaaaacacacctgtttttttcttaaacagctccttgtttagcattcttacaaaaggcatgataatgttggaggatcaatgtaacatactgtaagtgataagaagtcctaaatgtcctaaatttattaaaggcctgttgtgtcctggaagctgtactaaagcctatggaagatgcaaagaagaacaaggagtgagccttggcctcaagagatttacaatatattaaaacacctaagacaccaaatacgagtgcttttcagagtggttcttagaatcacaggtctgttacaaaaggagattcttaagatccaaagcagatgggacctaggaatctgcctttaaaacaagccctccaggtaattctgatctaccctgtggtttgagtagcattggcccagagcaa

SEQ ID NO: 690761 - DNA, 1584 bp, Homo sapiens
ttgttttaataagtcactatgtatggagggcttacaatagtgcctggtataattaatcaatagatgttggcttcaatcctatatataatgtaatgcattatacagaatcattaggactcctttgtaaaatgctcagttatgtgtattaacactttgaaattccaggccaggcgtggtggctcatgcctgtaatcccagcactttgggaggccgaggagtatagctcatttgaggtcaggattttgagaccagcctggccaacatggtgaaaccctgcctctactaaaaacacaaaaaaattagctgggcatggtggcacatgcctgtaatcccagctactcaggaggctgaggcaggagaattgcttgaacctgggagacagaggttgcagtcagccgagattgtgtcactgcactctagcctgggcaacagagtgagactctgtctcaaaaaaaacaaaaacaagaacaacaacaaaaaacacayacaaaaaaacaaaaaagactttgaaattcctattgtttctttaaatttggagtaaaagaacctcccaaattttagtattcttaaaatatccaccagctattggagaataagggttctagtagaagttgaagtgttacaactatatcaaatttaaaaaaaccagatacacctatgaacattttcccaggcttgagtgatgcctctgggagtgagttgtctcttcttatctggatcctgggatggacactggtgtccctggggtaatccatctgcgctcatgtcacatgctatggctaggaataaccaggaaatactggagtgaggattcacactggctcttttacattttcccaaggaggaggaggaaaagaaagaggaggaggaggaggatggttatagtggttcttacaaatccctcagctggatggctggatttagggctgggcatttgtgctttcaagagccaggtcattctaaaggaatgtgagaagtgcatctctgaggacagagattaaacagtgggaaaatagataagtgatctgggggtctgtcgactaattgctagctaaaagttaacatttcactagctcctgctgagaaggtaatggccaggcttcacacatggagttttattatgagaagagagagtagcaagtgtgggaagatgaatttatcatccctgcacacacaccacctcaaaacacacctgtttttttcttaaacagctccttgtttagcattcttacaaaaggcatgataatgttggaggatcaatgtaacatactgtaagtgataagaagtcctaaatgtcctaaatttattaaaggcctgttgtgtcctggaagctgtactaaagcctatggaagatgcaaagaagaacaaggagtgagccttggcctcaagagatttacaatatattaaaacacctaagacaccaaatacgagtgcttttcagagtggttcttagaatcacaggtctgttacaaaaggagattcttaagatccaaagcagatgggacctaggaatctgcctttaaaacaagccctccaggtaattctgatctaccctgtggtttgagtagcattggcccagagcaa

SEQ ID NO: 690762 - DNA, 1584 bp, Homo sapiens
ttgttttaataagtcactatgtatggagggcttacaatagtgcctggtataattaatcaatagatgttggcttcaatcctatatataatgtaatgcattatacagaatcattaggactcctttgtaaaatgctcagttatgtgtattaacactttgaaattccaggccaggcgtggtggctcatgcctgtaatcccagcactttgggaggccgaggagtatagctcatttgaggtcaggattttgagaccagcctggccaacatggtgaaaccctgcctctactaaaaacacaaaaaaattagctgggcatggtggcacatgcctgtaatcccagctactcaggaggctgaggcaggagaattgcttgaacctgggagacagaggttgcagtcagccgagattgtgtcactgcactctagcctgggcaacagagtgagactctgtctcaaaaaaaacaaaaacaagaacaacaacaaaaaacacacrcaaaaaaacaaaaaagactttgaaattcctattgtttctttaaatttggagtaaaagaacctcccaaattttagtattcttaaaatatccaccagctattggagaataagggttctagtagaagttgaagtgttacaactatatcaaatttaaaaaaaccagatacacctatgaacattttcccaggcttgagtgatgcctctgggagtgagttgtctcttcttatctggatcctgggatggacactggtgtccctggggtaatccatctgcgctcatgtcacatgctatggctaggaataaccaggaaatactggagtgaggattcacactggctcttttacattttcccaaggaggaggaggaaaagaaagaggaggaggaggaggatggttatagtggttcttacaaatccctcagctggatggctggatttagggctgggcatttgtgctttcaagagccaggtcattctaaaggaatgtgagaagtgcatctctgaggacagagattaaacagtgggaaaatagataagtgatctgggggtctgtcgactaattgctagctaaaagttaacatttcactagctcctgctgagaaggtaatggccaggcttcacacatggagttttattatgagaagagagagtagcaagtgtgggaagatgaatttatcatccctgcacacacaccacctcaaaacacacctgtttttttcttaaacagctccttgtttagcattcttacaaaaggcatgataatgttggaggatcaatgtaacatactgtaagtgataagaagtcctaaatgtcctaaatttattaaaggcctgttgtgtcctggaagctgtactaaagcctatggaagatgcaaagaagaacaaggagtgagccttggcctcaagagatttacaatatattaaaacacctaagacaccaaatacgagtgcttttcagagtggttcttagaatcacaggtctgttacaaaaggagattcttaagatccaaagcagatgggacctaggaatctgcctttaaaacaagccctccaggtaattctgatctaccctgtggtttgagtagcattggcccagagcaa

SEQ ID NO: 690763 - DNA, 560 bp, Homo sapiens
tcaaaaaccacagtgagatactacttcacacacattaggatggctattatttaaaaaaaaaaaaagtgttcatacgaatgaggacaaattggaacccccttgtcttgctggtggaaatggaagagctgttatagaaaacaggatggaggctactcaaaaaattaagcatggaattaccatgattcagtgatttcacttctgggtatacacagcagacaagtgaaagcaaggtctstaacatatatctgtataccgatgttcattatagcattattaataatattcattatcattattatgaatattatgaataccattcataatagccaaaatgcagaaacctggccgtgtgcagtggctcacgcctgtgatcccagcctggcccatgtggtgaaaccttgtctccactaaaaatacaaaaaatttaggtggatgtggtggtgcatgcctataatcccagctactcgggaggctgaggcaggagaattacctgaacccaggaggtggaggttgcagtgagctgagattgcaccactgcactccagcctgggcaagagtga

SEQ ID NO: 690764 - DNA, 560 bp, Homo sapiens
tcaaaaaccacagtgagatactacttcacacacattaggatggctattatttaaaaaaaaaaaaagtgttcatacgaatgaggacaaattggaacccccttgtcttgctggtggaaatggaagagctgttatagaaaacaggatggaggctactcaaaaaattaagcatggaattaccatgattcagtgatttcacttctgggtatacacagcagacaagtgaaagcaaggtctctaacatatatctgtataccgatgttcattatagcattattaataatattcattatcattattatgaatattatgaataccattcataatagccaaaatgcagaaacctggccgtgtgcagtggctcacgcctgtratcccagcctggcccatgtggtgaaaccttgtctccactaaaaatacaaaaaatttaggtggatgtggtggtgcatgcctataatcccagctactcgggaggctgaggcaggagaattacctgaacccaggaggtggaggttgcagtgagctgagattgcaccactgcactccagcctgggcaagagtga

SEQ ID NO: 690765 - DNA, 584 bp, Homo sapiens
cccttagctgggtcatctcggactcctaggcacacaatgcctagagcacagctccatcaggtggcatccatcctctcttacggtaaygtttgtttaccagtcatttcccgtttaaccaaactggaaattcccaaaggtggattctgtgtccttaaaacctaacagagtgcttagaacttaaaaaatgcctaccaaataagcactgtgtgccacgtactgacttaggtatgccccgaggacaccaagatgacaggcatattgtgaaataagataacggaagtacacctggcacttgggtatccactcggtaaatgtcgccctcccttgtactaagtactgaaaatccactgagggatatctggtcattcctaaaacacattacagctcatggaagggaggaaaatcaagctaccttgaccatgagcactaagcttgggtaatatgttggaagcgaggaggaacagggcagatgagaaccagaattattaatacaaaggtagacatcggcaaactggaagctggaggcaggagcccctgggaaatgacaggggccttcaagcccaccacctcacagaaggctcagg

SEQ ID NO: 690766 - DNA, 638 bp, Homo sapiens
atgtgatgaaggtggagcatctacattttaatgctatgtgttagcatcccccaacacctaatgcctaccttattgctaacactctgctgccctgctcacagtcttgtatgtgagtagaagacagacaaataaatctaataatgataattacatgtaagatttgctgtgacacatgttgagcagagatcactaaatcatatgggtaggagaaagcttcctggaggaggatggctcaaagtcaatctttaaggatggtcagaaaatagccagatgcagaggaatctgtgctaaggcacttagtatgaaccctgtatgagatatttgggaaattataagtattttagggtagttggrgatggagtgatgatctttgagctcagctaatttagataacagcatccatacaccttaaggagtcatttcaaaagacttcaagcatggtcatgaggtgattatttttgcattttagaatgatttttctggcagtgatgtggaggatagattcgtgaggggccaagttcatggtagagaagtcagttaggaattagagcaatttagtggagaatatactactttgtaaatctaccccactccccttcccaacttacacaacactaagagtcctaagtaaagagcag

SEQ ID NO: 690767 - DNA, 605 bp, Homo sapiens
taatcaaccattatctgctttcatcatttgtttcttcatttgtcyatgcattaaccattgattttaccccaacagtagtagcagacacgcttctagaaaatggagatcttgcagaggtttctaaccagggaccattttgcttacaaagaggcattcggaaatactttcagtcggcacagctggaaggggtgggttctattagccttgagtgggtagaggccagaggtgctgctaaacatcccatagtgtacagaacagccaacccctgccgaccccgacacacaaggaggaatgttctggccccacaagtcaggagtgccctggccgagaaaccctgggatacagtgatttgcaagaacccacaatgaaaacccttgaggcacgtacgctctagggaaggagacagctcatgaaatataatgcatgtgccataatgaagaatcagagatagtaggagagagagcaacgggggcgaaggagatggagcagccagggctgtcttctcccaggctgtgataagtgaagagagacgagtaaggggaggaagcagtcctggggaaagaacactggggagtgggcacagcaggtgccaaggccctggggca

SEQ ID NO: 690768 - DNA, 1316 bp, Homo sapiens
caacacaacatcatgtcctgtatccccaaaacatgcaaaagtctcatgaacatgcacatcctctgtgcttccctcccctgaaccaccctcatcctcctttctaggtccttactgccacgcacgcgtgcagtctcatgaaaaaggggaatactgtgaccgcccctgtttccaaacggatattgggcctcttttcaagcgtacgttttcagtttacactttcagagtttgttgatttgtgagttcaaggccctctctgccctgcggagagcacggaaattcctggaactgggggcgtgtgtgaaggggacgttgtcaacgctaggacagagaagaaagccgctcattttgatgtgtcagagcggtggggggtggggcttccagcccctggcatctcagccctatccttccttcctgcactgtgcttctcacaaacagcaggggcttgtgttactttgagtcgayagcctcattcacgacactctcacagaatagtgcccgtctgtgctcagcacatgcccgtaaaacaggattccccaaacacgtccataggtaactgtaaatcatttagaagaatctaaagtgtgaattttgtaaactgaagctacgtgcatgtatacacgtgtgtgtttgtgtatatcatatatacacattaatgttattattattatttgcaatacccagcatcgcataataggtgggataatgcagatgccactccaagccaaatctcctggccccaccggtcataagcttacctctgtagggaagaaaaggtttctttttggcagtggtttgttgtttgtttgtttgttttgagacagggtcttattctgcggcactggttggaatgcagtggtgcggtcactgaagcctcgacctcctgggctcaagtgatcctcccacctcagcctcccaagtagctggggctacagatacgcaccacaacgcccagttaatttttgtattttttgtacagatggggttttgccatattgcctaggctgatctgtaactcctgagctcaagcgatctgcctacctcagcctcccaaagtgctgggattgcaggcatgggccagtgtgcctggcctctttttcctcaccaattgctaggttcatgactgaggcccctgtaacacaagacagatcaaccaaaaaaaaaaatcatacagatttatttagtataagttttatgtgacacgggagccttccacaaggaaataaagacccaaagaaacagaaaaacgtgtatatttgatgctggtctgatgaagaagtggatggctgtggagaagtatttgacagaggcagtgtgct

SEQ ID NO: 690769 - DNA, 1169 bp, Homo sapiens
  misc_feature 627, 628, 629, 630, 631, 632, 633, 634, 635, 636, 637, 638,639, 640, 641, 642, 643, 644, 645, 646, 647, 648, 649, 650,651, 652, 653, 654, 655, 656, 657, 658, 659, 660, 661, 662,663, 664, 665, 666, 667, 668, 669, 670, 671, 672, 673: n = A,T,C or G
  misc_feature 674, 675, 676, 677, 678, 679, 680, 681, 682, 683, 684, 685,686, 687, 688, 689, 690, 691, 692, 693, 694, 695, 696, 697,698, 699, 700, 701, 702, 703, 704, 705, 706, 707, 708, 709,710, 711, 712, 713, 714, 715, 716, 717, 718, 719, 720: n = A,T,C or G
  misc_feature 721, 722, 723, 724, 725, 726: n = A,T,C or G
gaccccttctactctgagcccttgtatctggacagacatcagaacaggtttgccaaatgaacatgcacaggctccagtggatttctggaggagaaatcatttctatgttcttttcccaagcaagatccaagcaaataaaaccaataaaagccaggttcagcctagggatggggcaaggggaggccttcccatgtttgaggttgaaatgggactctttattctaggtggttacaaacatgtctgcctgtatgtccaggcaggaaggcaggtaaaatgggctgggtggagaccagggcaaacagcaagcacacaccccacagggtttaagctccagttgaaacttgccctgtgggaatttgagtcccctattgccagatactcctattttcctaaagaagccagcaatctggatgtttataagaaatttcctgctttggagatgttaataatgatttcaaattttcccaagatcatcatgtaggccaaacaaaagacgaccaccgggtacactcagctgcaggggaggggcaggtcaggaccccacttcatcattcccagggcaaactcagaggccacccctccttgctggaaggcctctcaggctgggctacctggaggcctcactcnnnnnnnnnnnnnnnnnnnnnnnnnnnnnnnnnnnnnnnnnnnnnnnnnnnnnnnnnnnnnnnnnnnnnnnnnnnnnnnnnnnnnnnnnnnnnnnnnnnngaattcaacaaactgataagcctttggaaawcttttcaccagttaattctcaaactcttttgccagtaatttaaaaaacatatagagagacttgtaccatcaaaacaagacatacttcactgaaatggaactctttggaagacttccttggtgcctcagtaatgttctgcccccttctctgagctctttcttttatcccttttctttggaggttttcatttagtgatcacagaggatattcagatgtgcataatcaatttaatatgttccctaaagaggatgccatctccatacacacatgcatgactgttgccaattgcaggagaaaaagtgtagaattttgtaaagcaggtatggaaataacaactaaaaaggctgaaactgagctagattttcatcctttgggtaggttgtatggtcagaaaaatttttccctaatacct

SEQ ID NO: 690770 - DNA, 1190 bp, Homo sapiens
tcctggatgggatcctggaacagaaaaagaagttagataaaaactaaggaaacctgaaaaagcatgaactttaatcataatttatgattattaaaattggctcattaattgcaacaaatgtaccatactaatgtaagatgttaataacaggggaagctgggtgagagggaaactccgtgtttctatatggaaactttctgtgttatcttctcaatttttctgtaaacctacaatggttctaaaaaataaagtgtattgaaaacaaaattacttcctccctgaagtcctctgcctcccccgagatcccgtgggacttggcacctctgtctactgtggcactgaccacatctgcacatatctatccccagcagttcctaaacctctgccacagcaccatccctgccatcgtttgagaaaaggggattgcgttttctgagaactgctttaaatacaacgacctgtgcttgcatgcagatgtcctggtctgttcctgaaatagcccatcccacttcctgtcaccaactccaaggacactgctgtctccattaggggacttgggtgtcccatgtggactgacaccttcccttcagaggccagggatcacttcggcttattccaagatgaagctccaggaccagaatccagtcaagctccctccccttttgcccaactgctctccacctcctttctggggctcagggaccctctctgcctcaacggcgatcagttgcctagaatcaggaatgcaagctttagttgggattgttttccccaccacctgaagcagttaagaagttctatttttaaagcccttggtttctgtctgtctcgctcagagggtggctggtgctccaggactctgctcaggataaatgctccatcttttgctcttctctctctctcggcttttatgccatcgccaatatcatcctccccctggtgctgtcagggaagctgggctygtaattcttccagggaaggcattagaaagaaagaaattaagttcaatcaaagtgtcaggcctgaattgtttgtgtgtggaggtgcaggtgagaggagcttaataagttcacctctgtgcctcagtcttcccctgtcttctctccccccctaccccaccatactgtaggcacttgaccttcattaggtgaccagaggggctaatcaaataaactagtcccaatcctgta

SEQ ID NO: 690771 - DNA, 694 bp, Homo sapiens
tttacatggtttacttccttatttcattcatatatatgatttattgttatctcccaacactagaatactagaatgtaagttctatgagttcagtgattttttttctgatttgtttatcactacatcccaaggaagcttgggatatagtagtattcagtgcatattttggaatgaatgaataaatgaattcatttgacaaataccctgggacctctggagagagtgatcatttgttatcatgtgtattagtttcctgtggctattgtaacaaattactatgaatttggaagcttaaaataacagaaacttattatttcacagttctggaggccagaagtctaaaataagtatcactgggcaaaaatcaaggtggcaacagagccatactccctctggaggctccaaggtggaatccatttcctgtgtcttccagcttctgctggcttctggcattcctttgctgtggccaaaccactccaatctctttctctttggtcacattgccttctccttctctgtttgtgtcacattctccctctgtctctctcttataatgatacttgtgattgcttttagggcccacccagacaatctaggataatcactccattactccattttaagattcttaatcacatatgcaaagrccatttttaaagtaaggtaacatttatagattccatggattggggcc

SEQ ID NO: 690772 - DNA, 670 bp, Homo sapiens
tcaggataatctgaagttaaacaatggggaacccactacagctgtcagagcggaattccctgagttatgaaatcccagtgatagctgacattgggcctgacagcagraaagtggaaaagatgccttttgaaaacttcttctttaccctgaaattagttttcctttgccttagcccatatttatgtgcctcttcctttttttttttttttttttttttttttttgtcttgcaacagcgtctcactccatcacccaagctggagtgcagcggcacaatcttggctcactgcaaactccacctcctgggttcgagggattttcatgcctcagccccctgaatggctgaaattataggagcatgctaccacgccgggctaatttttgtatttttagtagagtcagggtttcaccatgttggccaggctggtctcaaactcctgacctcgttttgtgatccgcccacctcggccttctaaagtgctggaactacaggtgtgagcgaccaagcctggactatttactattttttttttttttttgagatggagttttgctcttgttgcccaggctggagtgcaatggcgtgatcttggctcactgcaacctccacctcccaggttcaagcaattctcctgcctcagcctcccgagtagctgggattacaggcatgc

SEQ ID NO: 690773 - DNA, 670 bp, Homo sapiens
tcaggataatctgaagttaaacaatggggaacccactacagctgtcagagcggaattccctgagttatgaaatcccagtgatagctgacattgggcctgacagcaggaaagtggaaaagatgccttttgaaaacttcttctttaccctgaaattagttttcctttgccttagcccatatttatgtgcctcttccttttttttttttttttttttttttttttkgtcttgcaacagcgtctcactccatcacccaagctggagtgcagcggcacaatcttggctcactgcaaactccacctcctgggttcgagggattttcatgcctcagccccctgaatggctgaaattataggagcatgctaccacgccgggctaatttttgtatttttagtagagtcagggtttcaccatgttggccaggctggtctcaaactcctgacctcgttttgtgatccgcccacctcggccttctaaagtgctggaactacaggtgtgagcgaccaagcctggactatttactattttttttttttttttgagatggagttttgctcttgttgcccaggctggagtgcaatggcgtgatcttggctcactgcaacctccacctcccaggttcaagcaattctcctgcctcagcctcccgagtagctgggattacaggcatgc

SEQ ID NO: 690774 - DNA, 1080 bp, Homo sapiens
cattttagagagggaaacaagccataaatgaataaatgaacaaggaaatttcaatagtgagtgcaaaaaaaaaaaaaacccctcataaattctatcagtgcaaagtttttggcattttcttataaggaaaacgtagtatgtaatttggccctgagtgccttctctgtgcaacagatctctacagaggaaagaaggatagactgcaagaatttatctaaattactaaactgtaatgatctagttctccaaaatgagacaagcagcagcattgcttaagtgttttaacttggcctgcaatttgctaatcagaggctagaggtgacatgccataaaactgcacaggcttttaactgataggtttacagaaggttcacagcaaatctgtgccctgtaattgaaatktaaaggcacaaatctcaggtcatttgaataaaacagctcaatactcctatcttttctatcttctaaaaatggaaggaaaacatatgtcagaaataatctgatataggtccataactgccagtgaagaaaaaattgagagctagtggcaaccaagtccttactttaggtagccacagcacttttaacatgtaggtgtggataggaaaaattctttcttaaacacataataaacatattttggagatactgttctacattgtctacatgatacaaacggaaacaaacttaattagcctagaccaaatttcaccctgatgcacatagataactcccactgtgatcattatgcaaaagccaaggtggtgtttggatcttggaataatgtgtgtttttccaagggcagaagttgatctttaacacataggcaagtaataatctccacctgtggctttcacagaaacttatgttttaggggttcctgtgatggtggtggtagtggtgggaacttctggtcctctgtgattagttagtagtctgttggtggccaggaaatgggacaaacagcaactgtggccatgaaacagacacaccgtcaatgagggtctacctcaccagtgcttccctccactagcattgcttagttttctttctgatccatgttctgtagatgcctgagcc

SEQ ID NO: 690775 - DNA, 1080 bp, Homo sapiens
cattttagagagggaaacaagccataaatgaataaatgaacaaggaaatttcaatagtgagtgcaaaaaaaaaaaaaacccctcataaattctatcagtgcaaagtttttggcattttcttataaggaaaacgtagtatgtaatttggccctgagtgccttctctgtgcaacagatctctacagaggaaagaaggatagactgcaagaatttatctaaattactaaactgtaatgatctagttctccaaaatgagacaagcagcagcattgcttaagtgttttaacttggcctgcaatttgctaatcagaggctagaggtgacatgccataaaactgcacaggcttttaactgataggtttacagaaggttcacagcaaatctgtgccctgtaattgaaatttaaaggcacaaatctcaggtcattygaataaaacagctcaatactcctatcttttctatcttctaaaaatggaaggaaaacatatgtcagaaataatctgatataggtccataactgccagtgaagaaaaaattgagagctagtggcaaccaagtccttactttaggtagccacagcacttttaacatgtaggtgtggataggaaaaattctttcttaaacacataataaacatattttggagatactgttctacattgtctacatgatacaaacggaaacaaacttaattagcctagaccaaatttcaccctgatgcacatagataactcccactgtgatcattatgcaaaagccaaggtggtgtttggatcttggaataatgtgtgtttttccaagggcagaagttgatctttaacacataggcaagtaataatctccacctgtggctttcacagaaacttatgttttaggggttcctgtgatggtggtggtagtggtgggaacttctggtcctctgtgattagttagtagtctgttggtggccaggaaatgggacaaacagcaactgtggccatgaaacagacacaccgtcaatgagggtctacctcaccagtgcttccctccactagcattgcttagttttctttctgatccatgttctgtagatgcctgagcc

SEQ ID NO: 690776 - DNA, 2159 bp, Homo sapiens
  misc_feature 440, 472, 473, 474, 475, 476, 477, 478, 479, 480, 481, 482,483, 484, 485, 486, 487, 488, 489, 490, 491, 492, 493, 494,495, 496, 497, 498, 499, 500, 501, 502, 503, 504, 505, 506,507, 508, 509, 510, 511, 512, 513, 514, 515, 516, 517: n = A,T,C or G
  misc_feature 518, 519, 520, 521, 522, 523, 524, 525, 526, 527, 528, 529,530, 531, 532, 533, 534, 535, 536, 537, 538, 539, 540, 541,542, 543, 544, 545, 546, 547, 548, 549, 550, 551, 552, 553,554, 555, 556, 557, 558, 559, 560, 561, 562, 563, 564: n = A,T,C or G
  misc_feature 565, 566, 567, 568, 569, 570, 571: n = A,T,C or G
tctctgatggcttcccattcttgtcagaggatcccaaagccttcccttgacctagaaagccaatctaagatccagtcccccaaatattctgggacctcatgccccatcactccctttccgcccacttgactttggccacattagccttgctgccccctccgccaagccttctgtctcagggtttttgcataggctgccctctgtgcctgggggctcttcccccagagacctgcatcaagactgttcccatgcttccttggggtctctgcccaaataccgtttgatcagtgaaatctttcttaaccattctatttaaaagaacacactcccacccccgccctgaaggccctcctaaactatctttccttagctggttttgtgtgaaatgggytgtcacatgtactgatttagttgtagttataagtactccaaaagggcangaaagatttcgcttcatttgttcactgctgtnnnnnnnnnnnnnnnnnnnnnnnnnnnnnnnnnnnnnnnnnnnnnnnnnnnnnnnnnnnnnnnnnnnnnnnnnnnnnnnnnnnnnnnnnnnnnnnnnnnntcaaatgatggtgaacaattgaatatctattttttaaaagaacattgatccatacctcacaccatatataaaaattaactcctgtatattatagaccaaaatgtaaaacctaaagctataagatgtctagggaaaaacatacaagaaaactttgtgactgattgccagatccataattttagaattcctcttctataatgaaaaaaaatttctttacatatgtagagtgacatctggtcatcccattaccctaaaatgggagaatgggatgtgaggaacccacgtggttataataactctgcctctgatccagaaacctcatgtttgctcccaagaaaaaaaaatatatctactaaaaacttttaaaacatattacgccttccacccttgttatgggtaaccccatcactccatcactctcacatcttcactaccactgatctgatgactctgaaacttatcttttcagtccagacttcttggctttcagactggtattttccactagccctgcatatatctacttagatgtctcactgacatctcaaagcaatgtccaaaattgcaattaatatcctcttccacacacctgcttatttttccatagtggcatcacctccacttagccacccattctagaaacctggtgatcaccaaaaacatgtgacaataccactgagtaatcagatataatttcaaagtttgaggctggaatgactgagagagtggtttgtcattcacagaaaaaaaaaagtccagggaaggaacatttctttcaggagggaagatgctaagattgtggaactgtcaatttcaaggtgctggcagggcatcaaggcagagatttctagcagtcagttggaaatgccgctgtacatgacagatcgctgatcttggttacaggaatgaaagctcaagagcttttctgtaaagtttaagctgtggtttgacaggaatcatactgtttctaagagtaaaaacattcagaagcattcggctgtagaggacagaccatcagggaggaagataaagagagggacattgagaagaaggaggagtggcatttagagtatgctttcttggccagttaagggacaggagcacaagtcaaattttttgtggtaggtcctctactaaagggttcgtgaaaacatggctttttctcctttgttgcttgataaaatctcttccctctgttttctcttccctcccttgctcttttttttttcttttttctagcctgggagtgccagcatgggggtacacagcgtgaaggacaagggcctggctgtaggtttttcactccagtgcattaggaaggcggacagtaaggaataggctagcagaaaaagtcttcaggctctggctgccttttttgatttgtgcattaatgctgcagagtcgacagcctgcctgagagaggctgaagggacgtgtgttctgtatgtctggaatttattcctttggctctgtaagatgtgacactgcataatggccacgaagaagtaattttgatcctgtgactatcttggcaaaagttccagaaagacatatggacataatcttctggacatttgtagaagagcct

SEQ ID NO: 690777 - DNA, 588 bp, Homo sapiens
tatttagacatatagtaggtaggcctccagttgtactattgtcctgggccctacaaatattaaggttgtgcctatcctgttccggtataggacatgaaaatcaaccgcacggctccatatcctcacattctcaatggtcaactgaagagggagcctgaagtaagatgctgaagacaatatgcatggaaagatatactagactttggtttcaagcaaggtagatttatcctacctattacatcttggcagaatgtacatacttactcttattcatggagtatattacttaaatgctcactttaygtttcagttattcaagataagtaagttatggagatctactgtacagcatagaacctataattaatgataaaatattgtacgcttaagacttgctaagcgggtagatcttatgataagttttgttactgcaaaataaataaagaaagaaagaaaaggcagggaggaaactttggaaggtgatgggtatgtttatggccttcatggtggtaatagtttctcagatgtttacttatcccagagctcagagctgtatacattatatatgtacagctttttatatgtaat

SEQ ID NO: 690778 - DNA, 588 bp, Homo sapiens
tatttagacatatagtaggtaggcctccagttgtactattgtcctgggccctacaaatattaaggttgtgcctatcctgttccggtataggacatgaaaatcaaccgcacggctccatatcctcacattctcaatggtcaactgaagagggagcctgaagtaagatgctgaagacaatatgcatggaaagatatactagactttggtttcaagcaaggtagatttatcctacctattacatcttggcagaatgtacatacttactcttattcatggagtatattacttaaatgctcactttacgtttcagttattcaagataagtaagttatggagatctactgtacagcatagaacctataattaatgataaaatattgtacgcttaagacttgctaagcgggtagatcttatgataagttttgttactgcaaaataaataaakaaagaaagaaaaggcagggaggaaactttggaaggtgatgggtatgtttatggccttcatggtggtaatagtttctcagatgtttacttatcccagagctcagagctgtatacattatatatgtacagctttttatatgtaat

SEQ ID NO: 690779 - DNA, 2029 bp, Homo sapiens
tgcattcagctggttggatattttcttggttattagagcagcctaagtttactcaacttgtattcatctgtattttctggttttcttaaagaagttttcctcttatgtattctaaatcaccatgcctcttctctggctcttgcctttttattacttggttctaattaatcctctcttccctaaaagagatattttgacaacctgtaaatttgaagttacctcaaccacagtggatatttgtactttttaaatattattttttgagaaaactgtgtcaaaaataaggctcataaaagtgtttttaggaaaattacctatgatgccattacccagacatagcaatttttattgtatttcttgataccttgtacacacatacatgtttgcaatcttgtataaaaaacaccttgcatcctacttttctcactaatttaaagatatttaaaggttagccatagctttccctcccccacacacaaataatcagaagtctttgacaagattacagacaagaaactatgtacattttgaactgacttgcaacattattgttggaaattatccaatacgaatagaactggctcagagagagactaaagatgctggctattcaggcagtcctctgagtcaggtcttctgatgcctgcctgaggctcacatgccacaccaaaattaagaccagctattttactctgtaatttctaagattaagcaaatgatgtctttgacttgaagccagtgtgatctgtggccagaatgaaaagggggaggaacgcaaataggctcccatggggaacttccctgtgcctggtcctgtgctggccacttcctccagggcatcacacgtgaccttcactctctgtgagtcaggtagccatctagttttcatagaggagaaaatcaaggctcagagagggttaagccactcatccgaaataccayggcagcaaaatgcataagggcatttgcacactgacccgcccagcttccaacccggaattctgtgtagcatgccattatttactccgtttccatctgggaatcctgagtcacttttaattattttcctctcagttttgtctcatcttctcaaaaggttcaacactggagcattgtacattgtttccaaggatatcttggaagacaatgaactctatcaacctaagtttacagaacagttaacctgtttcattagatgcagaagtggttcctgaataacttcccttttcaatgaccgttattttggttcctacttcttatgcttctgtgtaacacatacaatatcattatttacttgtttttactttctaattcttagctatattttatctgtcttacttcttttgtgacctctgtgacacaaggtaaaagactgctagaaatacttcattaatatttaacgtatctgccttttggatttctcctgaagcaggtttagcatcggccctacaaaatacaactaaagtgatcaaaacgtgaagtgggttggccagaaatggacaagactcaacaatactgcaagtcctttcgagctacattaaaggccgtacttatagtataccctgatctgtcatggaatactaatgccacttgctttcttcctcatacaggccgtactccaaaaacaccagactggtacaatccaggtgagttaagaaaactgaaatttaaccaaagctgcttttaccttgtcactaatgcatttagttaattatttaagtgccagcttcttctctatacatcttcaagtgagacaaaatttctccaggcaaggaaggtgagcgactggtatgggatgaggtgatgagggtgactttttccttccctgtgagtgtaggggagtggcagagtcactggctcaggaatctcttgttccttgtagtcagtactgccccagccagagagggccggtaatctgaattactatttatagttttgaacattaactcatgcttagaggacacagtttgctttgcatagtcataattctaatctttttcttcttcttctttagaccgtgctggaattc

SEQ ID NO: 690780 - DNA, 2029 bp, Homo sapiens
tgcattcagctggttggatattttcttggttattagagcagcctaagtttactcaacttgtattcatctgtattttctggttttcttaaagaagttttcctcttatgtattctaaatcaccatgcctcttctctggctcttgcctttttattacttggttctaattaatcctctcttccctaaaagagatattttgacaacctgtaaatttgaagttacctcaaccacagtggatatttgtactttttaaatattattttttgagaaaactgtgtcaaaaataaggctcataaaagtgtttttaggaaaattacctatgatgccattacccagacatagcaatttttattgtatttcttgataccttgtacacacatacatgtttgcaatcttgtataaaaaacaccttgcatcctacttttctcactaatttaaagatatttaaaggttagccatagctttccctcccccacacacaaataatcagaagtctttgacaagattacagacaagaaactatgtacattttgaactgacttgcaacattattgttggaaattatccaatacgaatagaactggctcagagagagactaaagatgctggctattcaggcagtcctctgagtcaggtcttctgatgcctgcctgaggctcacatgccacaccaaaattaagaccagctattttactctgtaatttctaagattaagcaaatgatgtctttgacttgaagccagtgtgatctgtggccagaatgaaaagggggaggaacgcaaataggctcccatggggaacttccctgtgcctggtcctgtgctggccacttcctccagggcatcacacgtgaccttcactctctgtgagtcaggtagccatctagttttcatagaggagaaaatcaaggctcagagagggttaagccactcatccgaaataccatggcagcaaaatgcataagggcatttgcacactgacccgcccagcttccaacccrgaattctgtgtagcatgccattatttactccgtttccatctgggaatcctgagtcacttttaattattttcctctcagttttgtctcatcttctcaaaaggttcaacactggagcattgtacattgtttccaaggatatcttggaagacaatgaactctatcaacctaagtttacagaacagttaacctgtttcattagatgcagaagtggttcctgaataacttcccttttcaatgaccgttattttggttcctacttcttatgcttctgtgtaacacatacaatatcattatttacttgtttttactttctaattcttagctatattttatctgtcttacttcttttgtgacctctgtgacacaaggtaaaagactgctagaaatacttcattaatatttaacgtatctgccttttggatttctcctgaagcaggtttagcatcggccctacaaaatacaactaaagtgatcaaaacgtgaagtgggttggccagaaatggacaagactcaacaatactgcaagtcctttcgagctacattaaaggccgtacttatagtataccctgatctgtcatggaatactaatgccacttgctttcttcctcatacaggccgtactccaaaaacaccagactggtacaatccaggtgagttaagaaaactgaaatttaaccaaagctgcttttaccttgtcactaatgcatttagttaattatttaagtgccagcttcttctctatacatcttcaagtgagacaaaatttctccaggcaaggaaggtgagcgactggtatgggatgaggtgatgagggtgactttttccttccctgtgagtgtaggggagtggcagagtcactggctcaggaatctcttgttccttgtagtcagtactgccccagccagagagggccggtaatctgaattactatttatagttttgaacattaactcatgcttagaggacacagtttgctttgcatagtcataattctaatctttttcttcttcttctttagaccgtgctggaattc

SEQ ID NO: 690781 - DNA, 621 bp, Homo sapiens
taccctgatttgatcattacacattatatgcttgtatcaaaatatcacatgtatccccgtaaatacatacagctattatgtatccataaaaattaaaaataatttttaaaaactgtattacaatatagataatagacaaaaatgtattaaatgtatatgtacactttcatttgagacagggtctcagttgcccaggctgcagtgcagtgatgcaatcttggctcacttgcagcctcaactttctgtgctcaagcgaccctcccacctcagcctcccaagtagctgggactacaggcacatgccaccacacccagctaatttttgcattttttgtagaaatgggatttytccatgttgctcaggctggtctcaaacacctgaactcaagcgatctgccggctccggcctcccaaagtgttgggattacaggcgtgagccaccaggcccaacctacactttcaaaatagtacgaattacacaacaatgtacccatcacctaggctgagaaatattaatacattataagtcattttaaagtctactccctgcccttccctaattacaccctgttctccctcactccccagagaattaaccactgttctgactttaatgttaagc

SEQ ID NO: 690782 - DNA, 674 bp, Homo sapiens
gatccctgtttttcttctcctaacttatctcaccctctcctcctgcaatcaactcaagaggctgactttcagtttcccaaatgatttttatcccctaccagatttgcccaaattgcttttctctctacctagaatgccttaaaactaaaactcactccctcccatctacccatcctccttaacttggctaactagtatttattcttctgctctcaggttagatatcctttcttttgggaaactatccctgacagtataaggctgggctgaatmatcctcctgagtactccagagcaccctctgcttccattcccctcgcatttaccgtatttcttcgtaatgagtttgcgtatcttcccctgtctactgtaaattcctggcacatgaggacttcctctcgcacaacaatgtatccccatttcttgacacagttcttggtacagagccgcactcgatcaaaacttatcaagtaaatgaataaatcaatcataaaacacaattgataccatccaagaagtcataaaattcttggggcacaaggtcttaggagagtagatctttctgtgtgtatcagccatatccctttttttttttttttttttgagatggattctctctctgtcacccaggctggactgcagtggcactatctcggctcactgcatcctccacct

SEQ ID NO: 690783 - DNA, 631 bp, Homo sapiens
aataaccaaacagaacaaagacaagtcgttgttgttttatgcaaacaggctttgaacttggagcaagtcacctagtcaatcttcttatccacagcaaaggagttctgaaacaaacaaacaaacaaacaaaagcaatttttacctttcacagtgtttcttgtgtcatcccagatggttaaaatgaaaaggctttaatgaagggactattcacagagyttctggactggataaggtaacaaacaaggtatggtaggacacctagagactagcaatggtgagaagctattactaccctccccgcttccagggcctattgagacaagggaaggaaacacttatcagagcccagtgagtaagagttgtacctaggatgcagctacagttagatatagcatgccaaagcaggaagagagctggaaagagctaccctgacctctgctgaatcccaccctcccatcttcccacagagcctcccactggctgaaccccaaaagccagctaggaagaaagcctggacagtgcagtccactggattcagtggagcagggaagagcatgaaactgggagggaccctaggcccacaaataaccagcatcacacattacgcattgtcttcctgctatgacagatg

SEQ ID NO: 690784 - DNA, 631 bp, Homo sapiens
aataaccaaacagaacaaagacaagtcgttgttgttttatgcaaacaggctttgaacttggagcaagtcacctagtcaatcttcttatccacagcaaaggagttctgaaacaaacaaacaaacaaacaaaagcaatttttacctttcacagtgtttcttgtgtcatcccagatggttaaaatgaaaaggctttaatgaagggactattcacagagtttctggactggataaggtaacaaacaaggtatggtaggacacctagagactagcaatggtgagaagctattactaccctccccgcttccagggcctattgagacaagggaaggaaacacttatcagagcccagtgagtaagagttgtacctaggatgcagctacagttagatatagcatgccaaagcaggaagagagctggaaagagctaccctgacctctgctgaatcccaccctcccatcttcccacagagcctcccactggctgaaccccaaaagccagctaggaagaaagcctggacagtgcagtccactggattcagyggagcagggaagagcatgaaactgggagggaccctaggcccacaaataaccagcatcacacattacgcattgtcttcctgctatgacagatg

SEQ ID NO: 690785 - DNA, 1470 bp, Homo sapiens
atgctttcaatttatatgtatgtaatattttataaacatagcaactctttaaggttattgttatttcttttgagcaaaaggaagagaaaggctaaatgatttcccaagtcacctagaagacttattgcagaacctagactagaatctgggttttttggcatccgatcaatccagtcacaggcagaaagtgtctacctctgctgctttcttagaaatcagtgtgtgatttctagaaaacaatggaagtggcttgggaactcccctcaccatcgctccctttgtaccactgcagtatccagggatctcggtggtgatcagatcctggaacaagcactgatgagcatcctgtaatccagaagatgatctaaccatccagtgctagaatccctgataccaccacaacaaatgactgtcttcttcctctttggaccattttattgatgggaaactcattattgagaaagtggcttattctgtgttccctcatctgtgcaactggaatgacaccaaacagggaaagatgtgacatttaaatgggagaatgaatgcaaagtacatagtaggtactcataaggaatcctcccagaaaagctggcacatcctgctcatttagagctgtttgtttgtaaaggcacagctgagtgaatctgggagccaggtccacaggcaggcaatgaagcatgctatctgcctcctgaagagacatgccaggggctgggatggaaaagacaaactccagctttcagatctgccactgcaagaaaaccagggtttttgctgtggtggctctgggtggagtggtgatggtggtgggggcagatgggcagtaaacaaatagccaaaccccacatagccatgtggattggtgacatccaggtgactctgtgaccctaggatgcacggggaagcacagaaaacccttctcaaagacaaaaaactgctttagttctgtgtagcagtggcttgaaggttgatcactggtatgatgtgcctaagttaggatgcagctggcatggaacagcacggttttcctctgtccaaagaaggtttgcaaacaaragtaaaattcaaaacatttaataattgctgtggtacaggcacactgccaatgagaatggagatcagctacaaccaaacagcatggtcatgggggggtgtgccagccaaacatccaccctagcaacaaggaagcccaccctgcaaacagggagaagaggatctgcagggtgggggcctagaagtcagcagaaaatctgcctatctcctatggaaatcccagagaggatttcattaacctctcagggctctgcagagcatgatttaaaagccattgctgggccgagggggtggaagtggggaagtaagtgccttcagtgtccagcttccaggcgcagtattattactccagtgtacagggccagcctccaaaagggcaaagccctggttccacccaaagacaagtccatgaag

SEQ ID NO: 690786 - DNA, 602 bp, Homo sapiens
ctggcctccaaagaccagctgtatcctcctctgggtgctctcatcacagctgcctccgctgcaggtgctccccagctgaagacactctgcatcaacttcctttcagagtgagatcgttttctgtgttgtgcagcagaaataacagattttcttatttacctaaaaacatggaaagtctaagaacaatctaagaggttgcctcatactgtcacttcttttcagccaggcccacagaaccatgtgagaaagcctttttaatagaaaaacaaaaacaaggaagtcagctcttcttgaaagagaaacttctccactcagcaactttctactcaccctctttcatttaacaagcaatgttgattgcttactgtgaacgtcagactcagattacaattggtggctgggaagagtgaaaagagcatgggcctgatccatggtcaaatcccagctctggctyatgtaagttgtgtgacactgagaaagttacttaactcctctgagcatcagcttctttatctgcaaagtgaagatctttatgccagcctttcagagctgatgtgagaattagcatttctcaaacatctagctgaggccttcaagtcagt

SEQ ID NO: 690787 - DNA, 1128 bp, Homo sapiens
gcctggccacagcagcccaaatcctgaaggctgtgggcctggctgcctcagagccgacctgtggagggtcctttcaggaaccaactgcaaaaccatccacccaagctgttcctctctgactctgctggcgcaggggctcctctgcttcaggccctctgatccctgcaccactcaagtctggagccacggacagggtgactgggctgctgccctagcctgtaccmgtccaattaattcaattccatgcagttaaatgatgtttttgtgtggatcctgtgctcatctttgagggttgtatgacactgtaagagacaaggcacacgagctttatggtaaaagagacacagctgttctgtaacccaaagctgagtgctggaaaatgctcaagagagggctgagtgacagtgttccactcagggatatgggagacagggccagggatcctccttggcagcatcagaaaagctttatagaagaggagcacacttgcctgggcctggagactaagaaggcccttgatagtcaaaggatgagaaaggggcatttaggccgagggaaggtgtgtggggaaagtgctgttgcctgtggtggctagaccacagtaaggaaaggaggtgagagaagaccagggcaagataggtgggctgaggtcgtgctgggaagggcctgaggtcactttctattttcttccctaaggcaagaaatggtcacataaggagcaagacagtaattttcattcagtaccaactatgcccctggtagtgtgcattatatgaactctacatgcacacatttagtctgcattttataaccatcctcagaagcaaatattatcaccatgcccatttacaaccaaagaaaccaaggcttagagggattatgtggcctacctgaggctgctgaggcagaaatggaactcaaattatgcattccagcccaatgatgccccctctgtacaataccaactccctaaatggtggaggcagatgtatgtccttcattcaaacagccaagaaaacctagactcatcatcaccaccactgctgccatagtcgtggactccaaattttatttcgtaagggagaaaatgtaccagatgtgcctctttgtaaaaggatcttttaagat

SEQ ID NO: 690788 - DNA, 1128 bp, Homo sapiens
gcctggccacagcagcccaaatcctgaaggctgtgggcctggctgcctcagagccgacctgtggagggtcctttcaggaaccaactgcaaaaccatccacccaagctgttcctctctgactctgctggcgcaggggctcctctgcttcaggccctctgatccctgcaccactcaagtctggagccacggacagggtgactgggctgctgccctagcctgtaccagtccaattaattcaattccatgcagttaaatgatgtttttgtgtggatcctgtgctcatctttgagggttgtatgacactgtaagagacaaggcacacgagctttatrgtaaaagagacacagctgttctgtaacccaaagctgagtgctggaaaatgctcaagagagggctgagtgacagtgttccactcagggatatgggagacagggccagggatcctccttggcagcatcagaaaagctttatagaagaggagcacacttgcctgggcctggagactaagaaggcccttgatagtcaaaggatgagaaaggggcatttaggccgagggaaggtgtgtggggaaagtgctgttgcctgtggtggctagaccacagtaaggaaaggaggtgagagaagaccagggcaagataggtgggctgaggtcgtgctgggaagggcctgaggtcactttctattttcttccctaaggcaagaaatggtcacataaggagcaagacagtaattttcattcagtaccaactatgcccctggtagtgtgcattatatgaactctacatgcacacatttagtctgcattttataaccatcctcagaagcaaatattatcaccatgcccatttacaaccaaagaaaccaaggcttagagggattatgtggcctacctgaggctgctgaggcagaaatggaactcaaattatgcattccagcccaatgatgccccctctgtacaataccaactccctaaatggtggaggcagatgtatgtccttcattcaaacagccaagaaaacctagactcatcatcaccaccactgctgccatagtcgtggactccaaattttatttcgtaagggagaaaatgtaccagatgtgcctctttgtaaaaggatcttttaagat

SEQ ID NO: 690789 - DNA, 1398 bp, Homo sapiens
gtgagatgctttctagatttctttccctctgtctccctctggctggagatgttccagatggtggctgcattctcagcccgaatccctgagagatccctgagtaactacaatgagaaaatcattcttctagtaccaccttcacctccagcaacccatgatagaaaggtagcatcagcagaaaatacacatttattattttaagccacagacattttagtgtttttatttttgttatccctactgcagcataacctagcctattttgactgatacctagcttaggtatcagacttctcctatcaggttcctgaaataataagtcatatctttactagtgatgaacggcaacctggttttgaaaggaaaagtgtttttgaaaatcaaagtggggattgctgatttagaagaatgattcccattagctattttcttacttgttcctggactagaaatcccctagctaaatactgaccaggatgacacagctcagcttgaaatttgtatgagagcaaggatatcaatacacaggctgtttgctgactaagcctgtagattccagcagggaattgacagtttgatttattctacaaaaatgggctttaggatttagttttgggtcaaaatgaaaaaatgccaggggacagcagaaaaaatttatgatgatatattgtttaactgtgaataagaaatatttgagattagataagaagcctagccccaaaagacggggtaggcagccttaatgtcatcttactcctatcctttgcacaaattctcattaatatctttgactccgtatttgttatttgtttcacttcaagtcaactagcaatattatataacccacatcttgttaaatatactgatgctttcagaattaagtattatcatattggaaaattatcaaactactgaaaattgaaatatttaacaactgcaatgtattggttgactgaaaatctgtgtkcagaattctgttcagcctctgattaggctatttcatcttgctaacatttatagaaatctaccagggagtctagttagaagtgctttgctttagcttttttccttgtgagccagttcctgaacaaaaattcagatatccaatttttaaaataacttttttctcatttaaatatagtaaatgataattattgaaaatacaaacaaaaaagtaaataaaagcactcaagtttattatcaagaggaattaatgttaatattttatatacttttgtaaaaattggatcatactctttggtaacttacttgtttcacttactatatcatgggatttttcatctctttaagtaaacttttacagtacattttgtggccttattctatcatatggatatacaataatttgtttaactgatatccttataaatgcacaaa

SEQ ID NO: 690790 - DNA, 1528 bp, Homo sapiens
tttttttaatttaagggtacaagggcaattttattgcatggatggatatagtatgtcggcatgaagtttgagcttttagtgtatccatcatctgaatgatgtacattttgtacccattaagtaatttctcatcatccaccgccctcccaccaataactagatttgtgtgactttttaaagtcacatgctagtttatgttttatgtgactttttaaagtcacattctttgactgggtgcagtgggtcatgcatgtagtcccagcactttgggaggccgaggtggacagattactggagcccaggagttcgagaccagtttgggcaacatggcaaaaccatgtctctacaaaaatttgctgggtgtggtggcacgcacctgtggtcacagctctcagaaggctgaggcaggagaatcgcctgagcctcagaggtcaagggtgcagagagccaggattgtgtcattgcattccaacccaagtgacagagggagaccgctgactcaaagagagagagagaagaaaagccacattctttgaaaactgacttaaatcaataataaatcttaacatttaagagttgcatacgttgctcgagtctggaaaacattaacttagcaggtaattcaacacagaattttcagaccaggttcatcattatgggaaaatgtcagcacaaacagccaaataagtcttttgctggagaaaatcagcttttggattcgagttgaatgcatttataaatgtttctctactccaatgtcagagaataaatgattcataaaaatgggcatattagaaagcctgggcctaggaactaggctggatttgcttcctgacctggctctactatataaaaaacccagctgctttttcactagagatttataataataccaaacttacatgtttgctataagcattatatttgacatatttaaagcatctgggttatcttaggggtattcaatgacagccactgatattacagggacatttgagctgtaggtttttggcatgttccatgagttttatgtcatgcttaatccttttccacatttggaaaaatatcctaaascgggtaacccggtattactcatataatcaaagtagtctgtgctaaggcaaaaatacaaacaaaacaaaattaaaatgcaaaaatataaacaaaattaaaactcttaaactttaactgcattttatcagatatcttaatctgctatttcttttttttttttttttttttttgagacggagtctcgctctgtcgcccaggctggagtgcagtggcgcaatctcggctcactgcaagctccgccttccgggttcacgccattctcctagctcagcctcccgagtagctgggactacaggcgcccgccactacgcccggctaattttttgtatttttagtagagacggggtttcaccgttgtagccgggatggtctcgatctcctgacctcgtgatccgcccgcctcggcctcccaaagtgctgggttaatctgctatttcaaccctcaatgctgaaa

SEQ ID NO: 690791 - DNA, 625 bp, Homo sapiens
tgatcacattcttttataatgttctatgatatatgtttgccttattttgttgttgatgttatcagttattacaactgataccacagaattaccaaagattatttaaagctactatgaacacctttaaatgcacaaactagataatctagatgaaatggataaattcctggaaatatacaaccctcctggattaaatcaggaagaaatagaaactctgaatagaccaataacaaatagcaagattgaagcaataataaaaatattgccaacaacaacaaaaaaatctaagaccagatagatgcacagctgagttctataagacatttaaagaattggtaccaatcctactaaaactattccaaaagatagagaaagagataatccttcctaaatcattctatgaagccagtatcaccctaataccaaaaccaggaaaggatataataaaaaaaaattacagaccagtatccctgatgaacatagacgcaaaaatcctcaacaaaatactagctaactgaatctaaaagcatatcaaaaaagaatatatcatgatcaagtgggtttcataccagggatgcagggatggtttaacacaygcaagtcaataaatgtgatacaccacata

SEQ ID NO: 690792 - DNA, 2127 bp, Homo sapiens
acacacacacacgtacatatacacatatatgtgtgtgtgtgtgtatatatacacacacacacacatatatatatacacacacacacacgtatatatatttagttgaattaggtacatgagctaagcaaaggtgtactttaggtacttttaccaagagtaatgtgtaaataatgagagaaggaaagaattacgaaatgtactttgaaaaactatacaattatacatggaaaaagtaacaaatgaaagtaatagaataaagatgtgagagactgaggtagaggaagaaatgataggtttttttgtttcaatcatgaatttatctgagatttttaaggagatatataatacatctataaggatttaattttggattatggggaaaatactgacacaatatgagaaatattaaattcaagggaagaagaatgactgggaatggagaagatatatctagttttttgacctgaaggcgggatagcaataccacactgtgatgacaaagcaaagctactgtgagcattttaggctataatttgcatgtgggttatatttaaagatgtgcaaaatgatcaaattcaaagtctggagagaatcttggaaaaggctcacatttaggacctgaatgaaaaaatattaaaaagagccagagaaaaccgggaaattaacaggaaaagtagttggtaagaatgtagatgcagacaaattcttatgcaaatagatcaaaacccagtgctttagaccaaaaccagtgtagtcaaacttactcctcagccattcaaaaacaaatttcagaaaaaactgctatatttggaggcagaaattgcatgtgggttatagttaattttttaattgtgccctccaaaacaaccagttgtaaatgtacttaagcaattgaactaagttacttgttacataatatttttaaaagatagtttgtgtaaaagataattgtgttaattttagagtctgtctttctggtatctagataaaaatgtcagctatggatttattcatttatttaacaaacaaatttatttgcacatttgcaccttctatgtgcaaagcattattttaggtcttgggggcatagctgtaagtaagatagacataaacctcactcatttggagcttacattctaacaggtcatgtttcttatasaatatgacactttcatagaaaggtatcccttaactatatattaacatatgaagaaggacatgcaactagctgtagcaaatacaatgtcaggccttaccactgcataagagccacattaacatagtgtatttttgggggaagaccagatattgtttgaagtccaccacggcattactcatttgtgccgctgagttgttttgatatctccacctcctattcaacattttacttccctctttggtggctttggtttgaaattcttattacccttggtacattttgataccagtccccactcacaggatttggtctagacttcagtccaactctcttttctctctaggcagtacataggacacaggaatattcagtggtacatttctatacatacgacttactaagtcaagaatagtaccatgatagtgatggtggtaatgacataggggttaatcagagaaggaggactgatctgagcccaccaaaccagggtaagaattagcactccaaattcaatagctgtcgacgtttgttattgacactcccagcacatgcaaacaattgaagtataatggtagcactccaagtctaataccatgaggtcttcccatttgtacaaatgcaatataaagtctaagatatttatccgttgagtgatgtttcccaagtatttacaacaatacgtagaacaagtaaaaactcagtaactattgttggatgaatgaatatgtgcattatagctatgtgtaatttttgtaaaagtctatgttcatccctgttagttatctttttatcatgcatactcatgcacaaaaccccacaaactttaattttcagagaaagcacagtataaacctacgagaaggaagagaaacattttcatgttttatattttagaaaaacatttcatttaatgatggattccatgtatgtattattatgcagcatagcgctatttcttcgtaaccaaa

SEQ ID NO: 690793 - DNA, 2127 bp, Homo sapiens
acacacacacacgtacatatacacatatatgtgtgtgtgtgtgtatatatacacacacacacacatatatatatacacacacacacacgtatatatatttagttgaattaggtacatgagctaagcaaaggtgtactttaggtacttttaccaagagtaatgtgtaaataatgagagaaggaaagaattacgaaatgtactttgaaaaactatacaattatacatggaaaaagtaacaaatgaaagtaatagaataaagatgtgagagactgaggtagaggaagaaatgataggtttttttgtttcaatcatgaatttatctgagatttttaaggagatatataatacatctataaggatttaattttggattatggggaaaatactgacacaatatgagaaatattaaattcaagggaagaagaatgactgggaatggagaagatatatctagttttttgacctgaaggcgggatagcaataccacactgtgatgacaaagcaaagctactgtgagcattttaggctataatttgcatgtgggttatatttaaagatgtgcaaaatgatcaaattcaaagtctggagagaatcttggaaaaggctcacatttaggacctgaatgaaaaaatattaaaaagagccagagaaaaccgggaaattaacaggaaaagtagttggtaagaatgtagatgcagacaaattcttatgcaaatagatcaaaacccagtgctttagaccaaaaccagtgtagtcaaacttactcctcagccattcaaaaacaaatttcagaaaaaactgctatatttggaggcagaaattgcatgtgggttatagttaattttttaattgtgccctccaaaacaaccagttgtaaatgtacttaagcaattgaactaagttacttgttacataatatttttaaaagatagtttgtgtaaaagataattgtgttaattttagagtctgtctttctggtatctagataaaaatgtcagctatggatttattcatttatttaacaaacaaatttatttgcacatttgcaccttctatgtgcaaagcattattttaggtcttgggggcatagctgtaagtaagatagacataaacctcactcatttggagcttacattctaacaggtcatgtttcttatacaatatgacactttcatagaaaggtatcccttaactatatattaacatatgaagaaggacatgcaactagctgtagcaaatacaatgtcaggccttaccactgcataagagccacattaacatagtgtatttttgggggaagaccagatattgtttgaagyccaccacggcattactcatttgtgccgctgagttgttttgatatctccacctcctattcaacattttacttccctctttggtggctttggtttgaaattcttattacccttggtacattttgataccagtccccactcacaggatttggtctagacttcagtccaactctcttttctctctaggcagtacataggacacaggaatattcagtggtacatttctatacatacgacttactaagtcaagaatagtaccatgatagtgatggtggtaatgacataggggttaatcagagaaggaggactgatctgagcccaccaaaccagggtaagaattagcactccaaattcaatagctgtcgacgtttgttattgacactcccagcacatgcaaacaattgaagtataatggtagcactccaagtctaataccatgaggtcttcccatttgtacaaatgcaatataaagtctaagatatttatccgttgagtgatgtttcccaagtatttacaacaatacgtagaacaagtaaaaactcagtaactattgttggatgaatgaatatgtgcattatagctatgtgtaatttttgtaaaagtctatgttcatccctgttagttatctttttatcatgcatactcatgcacaaaaccccacaaactttaattttcagagaaagcacagtataaacctacgagaaggaagagaaacattttcatgttttatattttagaaaaacatttcatttaatgatggattccatgtatgtattattatgcagcatagcgctatttcttcgtaaccaaa

SEQ ID NO: 690794 - DNA, 2127 bp, Homo sapiens
acacacacacacgtacatatacacatatatgtgtgtgtgtgtgtatatatacacacacacacacatatatatatacacacacacacacgtatatatatttagttgaattaggtacatgagctaagcaaaggtgtactttaggtacttttaccaagagtaatgtgtaaataatgagagaaggaaagaattacgaaatgtactttgaaaaactatacaattatacatggaaaaagtaacaaatgaaagtaatagaataaagatgtgagagactgaggtagaggaagaaatgataggtttttttgtttcaatcatgaatttatctgagatttttaaggagatatataatacatctataaggatttaattttggattatggggaaaatactgacacaatatgagaaatattaaattcaagggaagaagaatgactgggaatggagaagatatatctagttttttgacctgaaggcgggatagcaataccacactgtgatgacaaagcaaagctactgtgagcattttaggctataatttgcatgtgggttatatttaaagatgtgcaaaatgatcaaattcaaagtctggagagaatcttggaaaaggctcacatttaggacctgaatgaaaaaatattaaaaagagccagagaaaaccgggaaattaacaggaaaagtagttggtaagaatgtagatgcagacaaattcttatgcaaatagatcaaaacccagtgctttagaccaaaaccagtgtagtcaaacttactcctcagccattcaaaaacaaatttcagaaaaaactgctatatttggaggcagaaattgcatgtgggttatagttaattttttaattgtgccctccaaaacaaccagttgtaaatgtacttaagcaattgaactaagttacttgttacataatatttttaaaagatagtttgtgtaaaagataattgtgttaattttagagtctgtctttctggtatctagataaaaatgtcagctatggatttattcatttatttaacaaacaaatttatttgcacatttgcaccttctatgtgcaaagcattattttaggtcttgggggcatagctgtaagtaagatagacataaacctcactcatttggagcttacattctaacaggtcatgtttcttatacaatatgacactttcatagaaaggtatcccttaactatatattaacatatgaagaaggacatgcaactagctgtagcaaatacaatgtcaggccttaccactgcataagagccacattaacatagtgtatttttgggggaagaccagatattgtttgaagtccaccacggcattactcatttgtgccgctgagttgttttgatatctccacctcctattcaacattttacttccctctttggtggctttggtttgaaattcttattacccttggtacattttgataccagtccccacwcacaggatttggtctagacttcagtccaactctcttttctctctaggcagtacataggacacaggaatattcagtggtacatttctatacatacgacttactaagtcaagaatagtaccatgatagtgatggtggtaatgacataggggttaatcagagaaggaggactgatctgagcccaccaaaccagggtaagaattagcactccaaattcaatagctgtcgacgtttgttattgacactcccagcacatgcaaacaattgaagtataatggtagcactccaagtctaataccatgaggtcttcccatttgtacaaatgcaatataaagtctaagatatttatccgttgagtgatgtttcccaagtatttacaacaatacgtagaacaagtaaaaactcagtaactattgttggatgaatgaatatgtgcattatagctatgtgtaatttttgtaaaagtctatgttcatccctgttagttatctttttatcatgcatactcatgcacaaaaccccacaaactttaattttcagagaaagcacagtataaacctacgagaaggaagagaaacattttcatgttttatattttagaaaaacatttcatttaatgatggattccatgtatgtattattatgcagcatagcgctatttcttcgtaaccaaa

SEQ ID NO: 690795 - DNA, 2127 bp, Homo sapiens
acacacacacacgtacatatacacatatatgtgtgtgtgtgtgtatatatacacacacacacacatatatatatacacacacacacacgtatatatatttagttgaattaggtacatgagctaagcaaaggtgtactttaggtacttttaccaagagtaatgtgtaaataatgagagaaggaaagaattacgaaatgtactttgaaaaactatacaattatacatggaaaaagtaacaaatgaaagtaatagaataaagatgtgagagactgaggtagaggaagaaatgataggtttttttgtttcaatcatgaatttatctgagatttttaaggagatatataatacatctataaggatttaattttggattatggggaaaatactgacacaatatgagaaatattaaattcaagggaagaagaatgactgggaatggagaagatatatctagttttttgacctgaaggcgggatagcaataccacactgtgatgacaaagcaaagctactgtgagcattttaggctataatttgcatgtgggttatatttaaagatgtgcaaaatgatcaaattcaaagtctggagagaatcttggaaaaggctcacatttaggacctgaatgaaaaaatattaaaaagagccagagaaaaccgggaaattaacaggaaaagtagttggtaagaatgtagatgcagacaaattcttatgcaaatagatcaaaacccagtgctttagaccaaaaccagtgtagtcaaacttactcctcagccattcaaaaacaaatttcagaaaaaactgctatatttggaggcagaaattgcatgtgggttatagttaattttttaattgtgccctccaaaacaaccagttgtaaatgtacttaagcaattgaactaagttacttgttacataatatttttaaaagatagtttgtgtaaaagataattgtgttaattttagagtctgtctttctggtatctagataaaaatgtcagctatggatttattcatttatttaacaaacaaatttatttgcacatttgcaccttctatgtgcaaagcattattttaggtcttgggggcatagctgtaagtaagatagacataaacctcactcatttggagcttacattctaacaggtcatgtttcttatacaatatgacactttcatagaaaggtatcccttaactatatattaacatatgaagaaggacatgcaactagctgtagcaaatacaatgtcaggccttaccactgcataagagccacattaacatagtgtatttttgggggaagaccagatattgtttgaagtccaccacggcattactcatttgtgccgctgagttgttttgatatctccacctcctattcaacattttacttccctctttggtggctttggtttgaaattcttattacccttggtacattttgataccagtccccactcacaggatttggtctagacttcagtccaactctcttttctctctaggcagtacataggacacaggaatattcagtggtacatttctatacatacgacttactaagtcaagaatagtaccatgatagtgatggtggtaatgacataggggttaatcagagaaggaggactgatctgagcccaccaaaccagggtaagaattagcactccaaattcaatagctgtcgacgtttgttattgacactcccagcacatgcaaacaattgaagtataatggtagcactccaagtctaataccatgaggtcttcccatttgtacaaatgcaayataaagtctaagatatttatccgttgagtgatgtttcccaagtatttacaacaatacgtagaacaagtaaaaactcagtaactattgttggatgaatgaatatgtgcattatagctatgtgtaatttttgtaaaagtctatgttcatccctgttagttatctttttatcatgcatactcatgcacaaaaccccacaaactttaattttcagagaaagcacagtataaacctacgagaaggaagagaaacattttcatgttttatattttagaaaaacatttcatttaatgatggattccatgtatgtattattatgcagcatagcgctatttcttcgtaaccaaa

SEQ ID NO: 690796 - DNA, 662 bp, Homo sapiens
ttgtaagaaaaacatttcttgaaattattagttcttagagtatttgtcttaggaaacaaacttcatggatattaaatacacacactccttgacttactatgaggttgtttccataaatccatcataagtaaaaaaatattgtaagtyataaatgcatttaatgctggccccatagtagatggtccctgacttatgttgatttgacttatacttttttgactttactatggtacaaaagcatatgcattcagcagaaattgtaacccaattgtaagttgttaaggagctcaacgtacaagggggttatgtcctgataaacccaccacaaagtcaaaaaatcataagttgaaccattgggagttggagaccctttgtgattttgttctatacctacagaattgtactggaaattagtttttaattctgtattttatatatacacacacttttttgcctttacattctttttacaataatgtctttgctagcatggagttttcaacatttaaagaatgagagccttcaaaatttacaactaaagaattttaaaagcttttctgtacaaatttaaatgtcacagatgttgcattcataactgtttaaaatctttagatcagtgtggaccaactgctaaagatgttctggacaagtgggaaaagcac

SEQ ID NO: 690797 - DNA, 605 bp, Homo sapiens
cattatcatttattcttattacagaaactttaatatactattttggacaaggctgctgagtctaattgttaaaaaacaaaacgagaatgaaacacaggggcttggagttattggtattctattctgcctcatttaagggatttgtggtggcaatacagtgatattagtagtattctcaaaggaactttgrtgattttaaggacaacagcctcaggaaagtgaaaacagaaactcacagattgctaatttcttcctacaggttgactatggatttattgattgaactgaatgggcaaatacgacaacggctgaggaatgttgctgtgaagggaggagggtttctctatttttctgtgggtctagaaggatatccattccttgtctctacccccaacttaccccaaaggggaaaagtgatatatttgagtaatggatttgggaagaaaaatcagtatgtataactatctcacttctactcatcttgacctcaggattttccatctgtagaaaacgtggtctggtctccttccacctataacacaaatttactggcaaaggctctgttcctgttggaaaaacctgaagttttccagggactgagtggg

SEQ ID NO: 690798 - DNA, 586 bp, Homo sapiens
cataaaatgaaaaaaagttgaaacagaaacaaggagagagaggagaggaatggagatagagaggaaggggaagagataatattcagggtctgtgttgaccatgccagaaagaccaacagtattatgtagggcaaagattttggttaatatagctagacctcctaagatcagtsatgagagcaatcatgcctccacaaagaagccttagtaaaacttctgcacaacgaggttctagtgggctttcctgattcacaatactccatgtgtacagtctcacactgatgctaagaaagtcatattgttctgacttcacgaggggaggacaaccgaaactctatgtttggtattttcttggagtctgccttaggtacttcttcctgcggtggtttttaatccatatcatttttctgtagtaaaccataaccatgggtataatagctctcaatgagttctgtgagtccttctagcaaatcaccaaacatgagggtagttttgggataaccctgaatttgtagttggtgtcagaagtgagggtggtcttgtgtgaactgtgctccctctaacttcacagattgctaaactctcc

SEQ ID NO: 690799 - DNA, 1812 bp, Homo sapiens
aaaatccagtatctcctatccattatgacaacttctctttccctgaaagacatcatgctagtccaagccaccatctggcaccatcacccggacatctgtgataaccattttactggttccctgtttctctcaggctcctctactactttcagtgagcaaccgaacaatctttcaaaaattcaaaccagatcatatgattcctgtatgtacaatcacaatctattggtgcctttacatcatgattaacaggaaatctcatcttacacttaccaataaagctgtcataatccagtctgattttcttgtggaccccacctatttctttcttccttacacataatactgtggccctcatggtcttcttacagatctttaagcatgacttcaggataattattattgcccctccctcagtttgcaacactgatctcttacatatacttgtatcttactctctctatatgttcatgtctcagatcaggaatacccccctygggagagcatgtctatcctgctctatccccttcctctgctttaatattccacctagtgttgaccacaattttacattatatcatatgttctagtctatctctttattgtctctctcactagagtttaagatcaaggaatgcaggtatttttctctctttttctaggtatttaataaatattatttaaataactggataaattaattaatagggaagtatcagaattaactcaaatgagcaacaacaaaaatagctaaattaaatggaatattgcaaatcatatttgcaaaaaatatttagtaatgaaaaatagttaatattaactgaattaatctaaatgagctcttatttagggcagttgattcaatttaccaagcattccttttttttttttttgagacgaagtctcgctctgtcacccaggctggagtgcaatggtgcaatctcggctcactgcaacctccgcctccctggttcaagtgattctcctgcctcagcctcccaagtagatgtgattacaggcgcatgccaccatgcccagctaatgttttgtatttttagtagagacggggtttcaccatgttagccaggatggtcttgatctcctgacctcgtgatctgcctgccttggcctcccaaagttgttggattacaggtgtgagccactgcgcctggccttaccaagcattcttatacaaataaacagaatcttaaattacagtaattatttctgagctataatactaagggtgatttttttttgtttgtttcatataaacatctttatctcacaaaatttttatttttctttaatgttaaaaaaaaaatctcagtcagaggtctgaaaccaagctgaggtccaaccaggcttgtcatctgtagaactgatcaagattagataagatcaaagtaaaagtgggcattcaattaaaaaacctccagtgaatcagtatgccaggtacctttagtttcttcttccaggtctactttccaactttcaccactctgctgtctgctttagaaagctgatgtgtgagaacacatcaagatagcagtcttcgtgcaatcttggattttcatttcagcgaatagagaaatctctgtcggacactgagggccacaggagagtttcttaatctccagctccctctctgtcaagcagcctactgctgtctcctgtattggaaggccatcactcctctagaggaagctgaaactactcatctcttgctgtctgcacacactcttcttgacattttcaggtggcaagcactcaatttactaagctctcattactgcttcatccctgtggtcttca

SEQ ID NO: 690800 - DNA, 1383 bp, Homo sapiens
caggaggaacccagggttcttcctgccagtggctgggccatctttcagcaccagctccctgccccgcgctcctccctcccctgctccaggacgtggggctccgccatttcccagccgggctcctcagaggtgcttccgtgcaggcaccggaaggaggtgaggaggaacgccctggtgtccccgtcagatttgtccataaaggctccgactcagagaaccgctggcttcaggtgtacccggccgccctccctccttgcgggtctgagcccctgctctgaatgattccccgctgagcctctaggctctgcaaggctctgtgtctgtttgcctgcatcgaatcctttctgtggaaatacctgtttctattttcctaacgggaatccaacatacttagtactaacagttgataggtttatgtgactgtcttggctatcttcttgtggtttgtgatacctcataatttattaacatatgaagataatttttaaaaaattggtgatctggttttggaaatgtattctgtatagtccttgagtatccgctggctatgggaactgttctggcttttcacatatgctgtgttctctattttttacaagataattttcttatactaaatttttaggtgaaaaatgctaagaatccacaaaactggtcattatgggaaacatcagattgttacagctgctctcaagcttcaaggtggatgtcttatagttttagaaataatagcatacatttaacaggaacaaaaaaatcagaccaaagagatacataaaagggaaaaataagattggaaatgttaatttaagtttaaaaaaataaccagagttaatcagcaaaagatgtatcgtgagatagagtcctaacggcagggccgattcagggtcttcggtaaagtctcggaatgccgtggactcatcagcaagactttcttcatcatggcattaaactcatcagcctrtattgacctgatgctgataaataatttaaaggataatacctcgtactagctgtatatgagttcaataaactcaggatttaaacttagtgtctccagggagagaccgtggtgaccctcacattgcatgtgtcttggctgtgtgactatttttattgcaaatgtagaagaatacattctgagctccggaggcaaagtcctgacctgagctcatctgtgggtgctttgagctgcctcccctcattgcaggtgccaatgggctttgagacaacgtggtggagggacagacccagagcactctggaaggtcagagatggtcaccccagaaagttccctccttgctccacctgggagcagggagcaccctttcatttatgtgaaaacattattgtctacacttgtgcatatttcacataaatttt

SEQ ID NO: 690801 - DNA, 1383 bp, Homo sapiens
caggaggaacccagggttcttcctgccagtggctgggccatctttcagcaccagctccctgccccgcgctcctccctcccctgctccaggacgtggggctccgccatttcccagccgggctcctcagaggtgcttccgtgcaggcaccggaaggaggtgaggaggaacgccctggtgtccccgtcagatttgtccataaaggctccgactcagagaaccgctggcttcaggtgtacccggccgccctccctccttgcgggtctgagcccctgctctgaatgattccccgctgagcctctaggctctgcaaggctctgtgtctgtttgcctgcatcgaatcctttctgtggaaatacctgtttctattttcctaacgggaatccaacatacttagtactaacagttgataggtttatgtgactgtcttggctatcttcttgtggtttgtgatacctcataatttattaacatatgaagataatttttaaaaaattggtgatctggttttggaaatgtattctgtatagtccttgagtatccgctggctatgggaactgttctggcttttcacatatgctgtgttctctattttttacaagataattttcttatactaaatttttaggtgaaaaatgctaagaatccacaaaactggtcattatgggaaacatcagattgttacagctgctctcaagcttcaaggtggatgtcttatagttttagaaataatagcatacatttaacaggaacaaaaaaatcagaccaaagagatacataaaagggaaaaataagattggaaatgttaatttaagtttaaaaaaataaccagagttaatcagcaaaagatgtatcgtgagatagagtcctaacggcagggccgattcagggtcttcggtaaagtctcggaatgccgtggactcatcagcaagactttcttcatcatggcattaaactcatcagcctatattgacctgatgctgataaataatttaaaggataatacctcgtactagctgtatatgagttcaataaactcaggatttaaacttagtgtctccagggagagaccgtggtgaccctcacattgcatgtgtcttggctgtgtgactatttttattgcaaatgtagaagaatacattctgagctccggaggcaaastcctgacctgagctcatctgtgggtgctttgagctgcctcccctcattgcaggtgccaatgggctttgagacaacgtggtggagggacagacccagagcactctggaaggtcagagatggtcaccccagaaagttccctccttgctccacctgggagcagggagcaccctttcatttatgtgaaaacattattgtctacacttgtgcatatttcacataaatttt

SEQ ID NO: 690802 - DNA, 839 bp, Homo sapiens
tccccactccattggcctatttcatctttagtgtgatgggagccaagggaaaaaagaaagccccccttgttaaaaaaaaaaaaaaaaaaatctttcccatggcaatcactggttatatatgtaagactgacctctgtcaggtgcccgctgtgtgccagatggctttgtgtactacaagtataaagttttcagaggattgtgaagggaacctctttgtggcagagtctctcaataaagaatgtctgctttgattcaatgccttcttgcccttcccctcctctcttagctccaattgcaaaagtacacctcacaaatttctttgtacatcatcttgggaggatggagaatgtgtctaagagctcaaacaccattgaatgtcatgtcattcctagaaaatttattcatcctcgccaaaccaaataggaggaatgcatgattccccactttkgaaatattaatcttcccaaacttacttccccagcctttttttctgtatgctcaaatagtcatcgtcatcagtttctttcacttatcattaacataagcagtctataagtctgagagtgtgaggctgtcctttgtccaagcactccaatttctctaaataactacattgaagcttcttcattgtgctggtatatcgttttcaaattcttctccagtttttctttttttctgcttttcagtcaggtgtgaggaaatggagaagttgaattggtggctgggagtctacacttcaactgtttgcaactcccttcagaaaacatggccctttgatgtctcttcatgtttagcttgtagtcagagtagccaatgtaagtgcatttagaagagtttca

SEQ ID NO: 690803 - DNA, 857 bp, Homo sapiens
tgttgtctccaaatggttttcatgataattgtgatattaagattaataamaagtgctccaaggttcctcattagagctagtttaccaagggtctaattggcataatagaaacagagtcattgttatgccaggctaaatgtgatcttttttctgcaagcaaagaaataatattagcctaaagctttcatattgactaacactaattgtgtgtgctttgagttctcctcataaaatttagcatttatttatttattattcagtctctgtagagatggtcaaaatttgctaatgctggagtctgggctcagtggctcacacctgtaatcctagcacttcgggaggccaaagtgggaggatcgcttgagcccaggatttcgagaccagcttgggccgcatggtaaaccctatctctacaaaaaatatgaaaattattcgggcatggtgttaggtgtttgtagtcccagctacttgggaggctaaagtgggaggatcacctgagcctgggaggttgaggttgtggtgagctgtgactataccactgcactccagcctgggtgacagagtcagaccatttcttaaacaaacaaacaaaaaattgccaatactgactatatcgcaagtcattacagtgaagtattgggaacagttttcaattaataataattgcacattggataaactgcattggctaccatactgccactgctcaaagcttcctgataaaatttaatttgaccaaggtatatcagcttctcagaacccttactgcttactcttgtaagtctccctctcttgacatgcttgcatcaatggctgcatggtggatacggtttcatttcactggagtgtagggggca

SEQ ID NO: 690804 - DNA, 857 bp, Homo sapiens
tgttgtctccaaatggttttcatgataattgtgatattaagattaataaaaagtgctccaaggttcctcattagagckagtttaccaagggtctaattggcataatagaaacagagtcattgttatgccaggctaaatgtgatcttttttctgcaagcaaagaaataatattagcctaaagctttcatattgactaacactaattgtgtgtgctttgagttctcctcataaaatttagcatttatttatttattattcagtctctgtagagatggtcaaaatttgctaatgctggagtctgggctcagtggctcacacctgtaatcctagcacttcgggaggccaaagtgggaggatcgcttgagcccaggatttcgagaccagcttgggccgcatggtaaaccctatctctacaaaaaatatgaaaattattcgggcatggtgttaggtgtttgtagtcccagctacttgggaggctaaagtgggaggatcacctgagcctgggaggttgaggttgtggtgagctgtgactataccactgcactccagcctgggtgacagagtcagaccatttcttaaacaaacaaacaaaaaattgccaatactgactatatcgcaagtcattacagtgaagtattgggaacagttttcaattaataataattgcacattggataaactgcattggctaccatactgccactgctcaaagcttcctgataaaatttaatttgaccaaggtatatcagcttctcagaacccttactgcttactcttgtaagtctccctctcttgacatgcttgcatcaatggctgcatggtggatacggtttcatttcactggagtgtagggggca

SEQ ID NO: 690805 - DNA, 857 bp, Homo sapiens
tgttgtctccaaatggttttcatgataattgtgatattaagattaataaaaagtgctccaaggttcctcattagagctagtttaccaagggtctaattggcataatagaaacagagtcattgttatgccaggctaaatgtgatcttttttctgcaagcaaagaaataatattagcctaaagctttcatattgactaacactaattgtgtgtgctttgagttctcctsataaaatttagcatttatttatttattattcagtctctgtagagatggtcaaaatttgctaatgctggagtctgggctcagtggctcacacctgtaatcctagcacttcgggaggccaaagtgggaggatcgcttgagcccaggatttcgagaccagcttgggccgcatggtaaaccctatctctacaaaaaatatgaaaattattcgggcatggtgttaggtgtttgtagtcccagctacttgggaggctaaagtgggaggatcacctgagcctgggaggttgaggttgtggtgagctgtgactataccactgcactccagcctgggtgacagagtcagaccatttcttaaacaaacaaacaaaaaattgccaatactgactatatcgcaagtcattacagtgaagtattgggaacagttttcaattaataataattgcacattggataaactgcattggctaccatactgccactgctcaaagcttcctgataaaatttaatttgaccaaggtatatcagcttctcagaacccttactgcttactcttgtaagtctccctctcttgacatgcttgcatcaatggctgcatggtggatacggtttcatttcactggagtgtagggggca

SEQ ID NO: 690806 - DNA, 670 bp, Homo sapiens
aacaaattgtgaaatcacaggatgacactaaggaatattgcatcactctcctccctgcctcaacacccccacttccattttctgctcaaaagatttcctaacatctgagagcatcatcagtgtaagttggcatttaaaagggctgaaatggtttttaaagcttccaaagcatttaaccttaaaaatcatatatggaacaaatttaccactgaaagttaatctcagatatgtttatrtcttttatttatttattttttgacatagggtcttgctttgttgtccaagctggagagcaatggcacgatcacggctcactgcaacttcgaccttctgggctcaagagattctccctcctcagcctcaaaagtagctgggaccacaagcacacaccactacactcagctaattttttattttttgtagagacacggtcttgctatgttgcgcaggctggtctcaaactcatggcctcaagcaatccttccaccttggcctcccaaagggctgggattacaggggtgagccaccataccaagcctgtttgcatcttattccatttgaagcacaactaaaaggaatactgttttgtcatcaaaacaatattaagatggcatttcttttacttgttgtttttactgttttgataagtaggaaacaaagaagtaaagtt

SEQ ID NO: 690807 - DNA, 638 bp, Homo sapiens
cagtgttgctattatgcaataggatcaagaagggtgttggtagaaatccagcaatcctctggggtgcttcttaatactgccatgtccagcatcaaaagttaaaggaaatccacagcaacccagtatgggaagaatgatcaagggacagctttctcaggatcaaggtataggtaaatccttggttgaggggaaaagaaacttgaaattgataatagaggagttgagtcatcagtgcaaatacagcaccaagacgaattatagaaataagactgtaacacctacccatattttctttcatgtatatatgtataaatcttaactgtttttcctaccttgtatctccgttctattatttctttattaatagtggcttttacaaattagtccatagtttacagaatattgagacaataccatggcacaattccagaataattggatatcttccagaatgcctgaattttgatctggatgaaacttcaactggtcccttttatatgaggaagaatagttactttaagttaagtaggaacatttttttttcctggaactttaagcrtggggagaagcttgtaagttggtgttgagctgccggaagtttggcttatagtggacattcgtgattcattttgactgta

SEQ ID NO: 690808 - DNA, 593 bp, Homo sapiens
tgataaacaatggagtatgtataatgaattattgttgttatgccagaagtggttagagggtaccatggatcacartgaatataagggtcaagactctcagagaggtcagacaaagtctttacagaattagcaatccagtactcaggaggctgagaggagaggatcacttgagcccaagagttcaggtccagcctgggcaacatagtgagaaccccgtcaataaaaaaaacaaaagtaggttaaataaaccaacaaataaaaggaaagtgtaatacttgagagctgagtcttgaaagatgattagctgttggcccacctttatgaggttttggtgaaattccttatcatacatttttctataaattaagtagccattctcaaagtttgtattgcagaataaatcatagtgaattgaaaggaaataattatgtattaaaaactataatatggcaaacattatgctatagagattttacatatttcattttagttatcatctcaataactgtgaaatattattagccctattgtagagataagaaaaaaataattttcaatttgcccagtgtcaagcaattaacaagttatgtaca

SEQ ID NO: 690809 - DNA, 584 bp, Homo sapiens
tgattagcattttatactcatgacaatcaaactcatactttacttttaaagttttagaaggaacacatattaaaaaccaaaatgaaaacagggcatcataagttcaaggaagccacaaagtagaccaagaagcataattctactatgcaccattttattagctaatcaacgtgtcatttttttttcctatgggcacctacttactgtcttgtaatttccataagggcaccatctgtatttataaaagaattatctttgtggtgatctagcaatctacaaacaacagtgatatttaacttttcttaggggatcaactgtagaattaagttaaaggatttataagtctctttgtcaggatgaaccttaaaaggacttattcatacatctctgtgatgttggaagcacttgaaacaacaaaaaaatgtaattttgattcattaaaatataaagttctggatcttgacatgtacatggcatggatccaygtcatggatcttacatttgtaatcaagcataatgaccctctactataaagtccagtaaaacaataataagtaaaatattttcttttttccattttagct

SEQ ID NO: 690810 - DNA, 672 bp, Homo sapiens
agtgcagttctgtaatcttggctcaatgcaaactctgcctcctgggttcaagcaattctcctgccttgacctcccaagtagctgggattacaggcatgcaccaccatgcccgactaatttttgtatttttagaagagatggggtttcacaatgttggcctggttggtctcaaactcctgacctcaagtgcctcacctgcctcggcctcccaaagtgctgggattataggtgtgagccactgcatccagccttacattatgttttcaagattgatattctgttctacaactccaatcaaggtttatgttctttgtttacaggctgaatctaacaactgaaaatcaagaarcaacgtttacacattacgactaggcaaatattgatggcagttcagccgatacagtaaagtactatgagcacactgcttttcttgcaaactttttatttctcctggagtttctatttatctttcttttctcttgtcctatttgcttatatcacatcctcacttttttcaaactttccatcatatcaaatattctaagaagcaaggaattatactaaaaacatttaatcaccaaccaacccaatttaattccatttatggggatcacttatagcagagagcaatcagaatagacagagcccttgtcaccaaagcaccaaggaagg

SEQ ID NO: 690811 - DNA, 672 bp, Homo sapiens
agtgcagttctgtaatcttggctcaatgcaaactctgcctcctgggttcaagcaattctcctgccttgacctcccaagtagctgggattacaggcatgcaccaccatgcccgactaatttttgtatttttagaagagatggggtttcacaatgttggcctggttggtctcaaactcctgacctcaagtgcctcacctgcctcggcctcccaaagtgctgggattataggtgtgagccactgcatccagccttacattatgttttcaagattgatattctgttctacaactccaatcaaggtttatgttctttgtttacaggctgaatctaacaactgaaaatcaagaagcaacgtttacacattacgactaggcaaatattgatggcagttcagccgatacagtaaagtactatgagcacactgcttttcttgcaaactttttrtttctcctggagtttctatttatctttcttttctcttgtcctatttgcttatatcacatcctcacttttttcaaactttccatcatatcaaatattctaagaagcaaggaattatactaaaaacatttaatcaccaaccaacccaatttaattccatttatggggatcacttatagcagagagcaatcagaatagacagagcccttgtcaccaaagcaccaaggaagg

SEQ ID NO: 690812 - DNA, 527 bp, Homo sapiens
aggaagcggctgaatacatcagagcatctgggcaggacttcttgaagcccgactgccagcggagactggccttgatgaggagaaggcatccctgagggccagctcagctcctgagagctacagagcccctcagcagagggatggcctgaggcctgccttccagacaacattgtcagcagtaaagttggccatgtagtgccaactacgtggtttccacaagtgtttcttcatgaatcttcacaacattctgaggaaagtcctagttccctaatgtgaatgaggaaaacaggcggggggagcccggcaggggttgaagtcactttttcaaaggaagagtcacagctgagtctaactcaagttcacatgataccagtgaactgaagagcacttatagctgggcatggtggctcatgcctgtcatcccagcacattaagcccaagaatttgagatgagcctgggcaacatagggagaccctatctctacaaaaaattaaaartaaaaaaattagctgggagtggtggcaca

SEQ ID NO: 690813 - DNA, 573 bp, Homo sapiens
gaaaaaatggatgcatgggcagtggacagatggtgagtggatggataagtagatgaatggatggatgagggattggatggagggcagaatgagattttattcacctgtcttccaatatggttgctgccctcccctctgctatggcccaagtcagcaggacccactaagaaattatagcagccttttacttaatctcttaaaattcagggacggggctgaaagacaaatttctctttcagcactgaggtttatgtttacataacaataaaattatagatatgaaactgtatatctatatatctatataatgttacaggaaaaagttaaattgaaggattaataatgtatgtaaatacataaaacttctaatatgtatttatatggcctctaaaagaacacaataaagagagtactactcaaagaaaaaacacatcatcttaatggcatttgcaatattttagattcrtaataatgggccctatataattaattcatgagaaatattttcaaggtcttccttctttgacatttcaaaaagatgccttcagaggacctggagcttaaaaaagaaaa

SEQ ID NO: 690814 - DNA, 1890 bp, Homo sapiens
  misc_feature 1256, 1257, 1258, 1259, 1260, 1261, 1262, 1263, 1264, 1265,1266, 1267, 1268, 1269, 1270, 1271, 1272, 1273, 1274, 1275,1276, 1277, 1278, 1279, 1280, 1281, 1282, 1283, 1284, 1285,1286, 1287, 1288, 1289, 1290, 1291, 1292, 1293, 1294: n = A,T,C or G
  misc_feature 1295, 1296, 1297, 1298, 1299, 1300, 1301, 1302, 1303, 1304,1305, 1306, 1307, 1308, 1309, 1310, 1311, 1312, 1313, 1314,1315, 1316, 1317, 1318, 1319, 1320, 1321, 1322, 1323, 1324,1325, 1326, 1327, 1328, 1329, 1330, 1331, 1332, 1333: n = A,T,C or G
  misc_feature 1334, 1335, 1336, 1337, 1338, 1339, 1340, 1341, 1342, 1343,1344, 1345, 1346, 1347, 1348, 1349, 1350, 1351, 1352, 1353,1354, 1355: n = A,T,C or G
gccctttgggcatccgaggtgggcagattacctgagatcaggagttcaagacgagcctgaccaacacagtgaaacactgtmtctactaaaaatacagaaaaaaaaaaaaaagatagctaggtatggtgatgggcacctgtaatcccaactactcgggaggctcaggccggagaatcacttgaactcggcaagtgaaggttaacagtgagctgagccgaggtcacgccattgcactctagcctgggtgacaagagtgagactctgtttgaaaaaaaagaaaatattcaagttttacaagtttaataataactactactgtttgtactacatatttttctaaatattttacgtatttatttacttaactctcataacaaaaaaaaactagattttttttattgctctaattttacagatttagggactgaaagaacttttccataatttgtataggtacgcagcttctaaaaatcaaaacatgaattagaacacagatagtctagttccacaatagtctagttccacagtttgtgtttttaaacaccaacttttaatatattgcttcaaagtatcttaatgcaagcacaagatggtgtgtatttccccatctgtatagtctcatttgttataaactgaccttcaaaatgtcaattatattgttaacacttcttcaaaagtcttcacctgttttttgcaaataaatctttgacttctgaatctgtgatattagtagtatttgtgtttctcttcatctctgactagatttttaaacgtttttgggagacattatttcaaacataaagaaaaatctataaatacactactacatagtatactacaagaaactgctctgaacccttttcccagatccaaacactgtttgctttttattccaaatggtttgctctgtcaaacattctgcttttaagaaatttgatagcaaaattataaatttttgtttatttgtacctaaatatttcagttagcatttcttaagaacaaaaacctccttttttaaaacgaccaaaataaaattatcaaaatcaggaaatttatcattgattataatactttttctgatttcctatctctattcaaatttaattattttcattaaccaacctttgtaagaaataaatttacagcaacactgatctataagtatgtttttgatcaatactagtctaagttacataaaaaaatatgaaactgaaataagacattgtatattaactcatagcttctagcaatagctnnnnnnnnnnnnnnnnnnnnnnnnnnnnnnnnnnnnnnnnnnnnnnnnnnnnnnnnnnnnnnnnnnnnnnnnnnnnnnnnnnnnnnnnnnnnnnnnnnnnttgggtttatattcattacaattataatttttacattcagaacatacgtttgcttctttattatgtctacatgtcacaagctcatatttgacatttttgctttatctttgataatgttatgtgcatatttttcaattctattttctataattccataatctgaattgcaaaagcctgtttattttctgattgttgactctaagctttttgtttttcttgaaattttgtctaatactttgaagcatgttttgaagtaaagttctgccagggttgtttaacgaaacttctaaaagtaacctaaagattaccttgattcacatcattctaaattgaattatctgagattttaaaaaattatatggaaaacatcaattgaaaatgtgaatgtgatagggcatagttgtggttataaatcctgaaagggactttttccttgccttaacacagtaataggttttagataggtaattgtatttgttgtatttctaggaatagtggagtttatttcttataccctctttggtaagctatgtaa

SEQ ID NO: 690815 - DNA, 1890 bp, Homo sapiens
  misc_feature 1256, 1257, 1258, 1259, 1260, 1261, 1262, 1263, 1264, 1265,1266, 1267, 1268, 1269, 1270, 1271, 1272, 1273, 1274, 1275,1276, 1277, 1278, 1279, 1280, 1281, 1282, 1283, 1284, 1285,1286, 1287, 1288, 1289, 1290, 1291, 1292, 1293, 1294: n = A,T,C or G
  misc_feature 1295, 1296, 1297, 1298, 1299, 1300, 1301, 1302, 1303, 1304,1305, 1306, 1307, 1308, 1309, 1310, 1311, 1312, 1313, 1314,1315, 1316, 1317, 1318, 1319, 1320, 1321, 1322, 1323, 1324,1325, 1326, 1327, 1328, 1329, 1330, 1331, 1332, 1333: n = A,T,C or G
  misc_feature 1334, 1335, 1336, 1337, 1338, 1339, 1340, 1341, 1342, 1343,1344, 1345, 1346, 1347, 1348, 1349, 1350, 1351, 1352, 1353,1354, 1355: n = A,T,C or G
gccctttgggcatccgaggtgggcagattacctgagatcaggagttcaagacgagcctgaccaacacagtgaaacactgtctctactaaaaatacagaaaaaaaaaaaaaagatagctaggtatggtgatgggcacctgtaatcccaactactcgggaggctcargccggagaatcacttgaactcggcaagtgaaggttaacagtgagctgagccgaggtcacgccattgcactctagcctgggtgacaagagtgagactctgtttgaaaaaaaagaaaatattcaagttttacaagtttaataataactactactgtttgtactacatatttttctaaatattttacgtatttatttacttaactctcataacaaaaaaaaactagattttttttattgctctaattttacagatttagggactgaaagaacttttccataatttgtataggtacgcagcttctaaaaatcaaaacatgaattagaacacagatagtctagttccacaatagtctagttccacagtttgtgtttttaaacaccaacttttaatatattgcttcaaagtatcttaatgcaagcacaagatggtgtgtatttccccatctgtatagtctcatttgttataaactgaccttcaaaatgtcaattatattgttaacacttcttcaaaagtcttcacctgttttttgcaaataaatctttgacttctgaatctgtgatattagtagtatttgtgtttctcttcatctctgactagatttttaaacgtttttgggagacattatttcaaacataaagaaaaatctataaatacactactacatagtatactacaagaaactgctctgaacccttttcccagatccaaacactgtttgctttttattccaaatggtttgctctgtcaaacattctgcttttaagaaatttgatagcaaaattataaatttttgtttatttgtacctaaatatttcagttagcatttcttaagaacaaaaacctccttttttaaaacgaccaaaataaaattatcaaaatcaggaaatttatcattgattataatactttttctgatttcctatctctattcaaatttaattattttcattaaccaacctttgtaagaaataaatttacagcaacactgatctataagtatgtttttgatcaatactagtctaagttacataaaaaaatatgaaactgaaataagacattgtatattaactcatagcttctagcaatagctnnnnnnnnnnnnnnnnnnnnnnnnnnnnnnnnnnnnnnnnnnnnnnnnnnnnnnnnnnnnnnnnnnnnnnnnnnnnnnnnnnnnnnnnnnnnnnnnnnnnttgggtttatattcattacaattataatttttacattcagaacatacgtttgcttctttattatgtctacatgtcacaagctcatatttgacatttttgctttatctttgataatgttatgtgcatatttttcaattctattttctataattccataatctgaattgcaaaagcctgtttattttctgattgttgactctaagctttttgtttttcttgaaattttgtctaatactttgaagcatgttttgaagtaaagttctgccagggttgtttaacgaaacttctaaaagtaacctaaagattaccttgattcacatcattctaaattgaattatctgagattttaaaaaattatatggaaaacatcaattgaaaatgtgaatgtgatagggcatagttgtggttataaatcctgaaagggactttttccttgccttaacacagtaataggttttagataggtaattgtatttgttgtatttctaggaatagtggagtttatttcttataccctctttggtaagctatgtaa

SEQ ID NO: 690816 - DNA, 622 bp, Homo sapiens
ataaagaactggagtttacaaatttgaaatgctggaaacatatacagcatagaaatggccttttgttatcatacaatttaatgataattatgtacttggccctagttggtatggtttacatatgccatgaattaatttctayataatccaacaacttgaccaacactcagttattacatctttcttacttaaataggaaaaaatgttatgcttacacattaatacagaaaaaaattcatatgccaaaaatagaatgcttaaataatcagttttcattttcatgataatattggataaatatatgtaaattaaaaatttatgaaattataagagctacttgaatatattataaattgattgactaaaataatttctgacacatacaaaataatcaaataaaatgaatataaggtccatgaagtcagagtgctttctttcttttcactatggctgcactcccattacctagtatgacatctgacccataattgtttgttcaatgaatgaatctataaataaatatgagctacatcctcattcataaaaagattgaatgaatagaaaatcaaattgaatgtctggatttagaaagaatttttaaggaacattttcaatgatatca

SEQ ID NO: 690817 - DNA, 258 bp, Homo sapiens
taatttatataatgtaacatttatattaaaattacataataaaattattttaattatgtttttcaaattttgrttacaaataatatatttgcttctgtaaccaaacatatttttcagatttatttttatatacatgcttatcagattggtttcttatgactaagaaaaataagaaatttggctagaattattaactttaaattaaaaataaaacatcacttacaaatagtttcaaaattcttttaaataatgttattt

SEQ ID NO: 690818 - DNA, 258 bp, Homo sapiens
taatttatataatgtaacatttatattaaaattacataataaaattattttaattatgtttttcaaattttgattacaaataatatatttgcttctgtaaccaaacatatttttcagatttatttttatatacatgcttatcagattggtttcttatgactaagaaaaataagaaatttggctrgaattattaactttaaattaaaaataaaacatcacttacaaatagtttcaaaattcttttaaataatgttattt

SEQ ID NO: 690819 - DNA, 607 bp, Homo sapiens
tcatagttatcagtaatgcttattgtgaatgctttaatgtagcaattcttgcatttttatgcatcttgctaattaatggtttactgttttcctggtcttatgtatctatagtctcatttaattttaacagttatgtcttctaactaaaggaattaaagccagaaaaggaggtaattattggactgatgacaaagtgatctattcagttatcttagattaggtagggccaaagccgaacttagaatctaggtaagatttggaaaggagcggaagagggcatccctatttaggccaaaactattagagtagggatttttgaaggatgaggattgacgtcaattgagattccagcatacctggaatagaggatttgttttaggaattggtaataaatatgttagattaaaaaagcaaaagaaaaagaagtttgcacttgatggagtgggcagtggagaacttgtataacatcatgttaataatgctttatggagatttttctgrtgataatattcaattaaaatctttaaagtttgtaaaacatgtttaactccctcgtatatgtctattacatgctagacactatgctgggtagttatattcacgtaag

SEQ ID NO: 690820 - DNA, 666 bp, Homo sapiens
tacaaatttttaaaataaacgaaaactttatgcaataatgtactttttaaaaataaacgtgtgttatatgtatggcattcattttaaatagatgtttttataatatgttttctttgtgataatgtatgtgttaagagttataactgaggccgggtgtggtggctcacacctgtaatcccagcactttgggaggctgaggcaggcagattatgagtcaggagacagagaccatcctggccaacatgttgaaaccccatctctactaaaaatacaaaaattagctgaatgtggtggtgcatgcctgtaataccagctacttgggaggctgaggcaggaaaatctcttgaacctgggaggtggaggttgcagtgagctgagatcacaccactgcrctccagcctggctgcagagcgagactctgtttcaaaaaaaaaaaaaaaaaaaaaaaaaacttataactgaaactttactattggggtgaatcatctacacttgagaaatcaatagccagctatttacaaaggctaaataaatctgctatttattagatccccatcatttgatttgacaatatcagttcactaggtgacatcatgtttttccactctagttacctgagagaaccagttaggacaaattaatcttattgagagctttttttctttt

SEQ ID NO: 690821 - DNA, 651 bp, Homo sapiens
ggcaagcccatatggttgccactgagctccaagagctccaccgatgtggtcttgagaagaggaggaaataaagccaaatcctcacaactggttattaacagggccctgtaatgcttatttgtggaaagaaacttaatagataacaattactgggggctcattatgtgccaggcattgagcttagtgctacacacacacacacacacacacacacacacacacagacagacasacacacacacacacacacacacacacacacagacagacacacacacacacacacacacacacacacacacacacacacacacagagttttcatttatttcccataataatctcatgagataggccctgttcatctccattttactatggggaaacccccaaatagcatgttctcatttgaaaaggagaaatagtaatctcacagacttgttacatatttgtactgagaagacgcacgtaaaacagaactatttctagcagggttagctttcaagaaatgttagctgttatcgttactaggcaaatatagagataggcatataaacagctatactacaaagaagactgtgacaatagttgcaatcataacaagcaaagggctgtaggagacaaaaaaagccagatgcatatattggtgat

SEQ ID NO: 690822 - DNA, 654 bp, Homo sapiens
aggttaatttttccttctttttctctcagagctctttagtaaagtgtagggtgagatacagcatttgtgagatctgattatttgttttgcagctcctttagaaataatgggccagatacagtggctcatgcctgtaatgtcagcacttcagaggctgaggcgggtggatcacctgaggtcaggagtttgagagtagcctggccagcatggtggaaccctgtctctactaaaaatacaaaaattggccaggcgtggtggtggacacctgtattcccagctacttgggaggctgaggttggagaagctcttgaacccaggaggcacagattgcagtgagtggagattgcaccattgcactccagcctgggcgacaagagtgaaactccatctcaaaaaaaaaaaaaaaaaaaaaaaaagaaagaaataatgaagcccacacaatttyctaatgtcttctggaacctatctagttttacatatcctcacttgtcacggaaataatggtatgaaatattttaccttgggtacaatatcaccaagaaaaatgaagagccattatgatctgaccactttgaggacacttttgacattaacaattatcataccttagaccaaaaaaaaacaaaaagaaagaaacgaactttcatggggaga

SEQ ID NO: 690823 - DNA, 1745 bp, Homo sapiens
  misc_feature 1716: n = A,T,C or G
tgcatcttaactaaccagtgataaattgttaaagtaatggaaaacaaatacatacacggcaggctttataaaaactgatttaaaatgattaaaaacaggaacatgtaattactaatgacaactttaatagattctgaggatacaaataggcagaggggttatgcacctaggtattgatgtcaacatggttttaatgactgtttaaaactgagactgtcatacttyaaatcaaaattccttcataaatgatacctttctggaaccaaaactatctatatgtgctgagggcagcattgtttttctcacataccaatttcctgcaactcctagctcagctcaaattcttagtatactgtgggaataatttcaaaatttggtcattaaacaaatctataacaagagatatgtcattcttattcttgataacaaacagatgttcagagcagcttgtgtccaattatgatacgaatgcttaaaatctgcgttaatatacaatctccactcttcgtaatcagaggcaaagatgagtgtgctttttcagagaatttattttaatgatgctttaatgggtagtacaagctacaatgaataaagtcagcactgacaggtggcacaaaatccaaagacaagctatcattccctactctacaaagagggttttgtggttgctttttttttcactctacttcgtaatactgcttgaccacaatggccacagcaaccacaaatcacctccaatgtttttctagattacattatggaatgaatggcttatcatagaatctcttgtagaaagaaaacaaatgtcacaggataaattaggttacactggaagaaccatattcatttcctaggaaaagagaaacaaaaatttaagaacatacactccaaagacacaaacactatctttagtgtatacacgttttaccttgtcattactataaaattgtttgtgtgtgcctatatgtgcctgtgtgtgttgtatgtgtagtttctaaaatactgcatgggatttctagacttcatagtaacaactttagaagttgtcagtttaggatttcctcactcagaactttgtcaaaagactgtgatgtgcctcacagagagccttaagaacatgtgctcattaagtatttgtaaattacattttgtaagcttttggtctattgactgtattcactttcaacaatttcctcataggaactagaatttcctttagaataaagtgaattatctaagagcaaaaagcagttggatttctaataaaggatcaccctcatcaatcctgatttattgaattatcttttatttcttctggtatcgatactatggtatgatggtctcatttatcaaacaagttatagaatcaatattaattaattaattaatttaccaattaaattccttagataatgaaatgaataaaatcttttcattatattaggtgattatttttaagtatacattctagagaataatattgattctgttaaactcaattgtttaaaagtttgatacattttaaaatcttatattgagattataattgacccaactactatttttttaatttgtttaaattacagaacattagtggcatataagaaatacaaactatcataaatggaatatcaaataagagcaattattattaataatagtattatttatatctagtaatagaaactacatcatgactttagaagattatcttantagtaattattttcatacttatgagaatt

SEQ ID NO: 690824 - DNA, 597 bp, Homo sapiens
tctataacatgcagaagaccgctactacaataattttgtcttcactcaacggttagaaatatttttaccagggcttataggatatttcaaaactaattttaaagaatggacctaagtaagcaaatctaaattayatcttgcactagttactatctttttgtgtgtggaaacctggttggcagggtttatttggaacagatgcaatcttaactttgaaatcttttcaatctcatataacccaaaaatgtatctgttgattcagctcagcaagttatgttcacatttatcagcttgtatttctgatcatgatgtctagagagtaaaactctatgatacaattacctttgaagtgcaaggagctgaatgttgtagtggaagctgcacccaggcgcctctagggcaatgattcaattcagctacaacagaaaccaaaactaagactgagtgtcattatctgcttcttatacatattttatagtcattgtaccgtgcagaactaaaatggtgcttatttcaagaaaactgtgggaatcaagctccattttcagtacaatatatgtcaatttggagattaagggagaaattcaacatatacta

SEQ ID NO: 690825 - DNA, 585 bp, Homo sapiens
gttgtcatttcttccttggctaaagagcttttgtatttgcctagacacattggtgctaggactgaaggctgtactttccagcctccctggcagctatctgtgctcaagcaactaaatcaccaccactgggagagaagcagtagtgttgggtggggcttcttagaaagctcttcaaaagggaagaagttagttccctctccaccttttcgttttcatgctgcctggtcattctgggcagcgagttatcatgaagatagaagcaatgtcacaaagcagaaagagaaaaggagcccggatcatcgatgacggtggagtggccaccccagcccagggccagaaaacaacttattttctgttgttttatgtggaagaatttaccaccatgtttgggtccttgttagcagcagcsaaatgcaattcctaatttacacacctaggctctgatccaggcctgccaaaatatgccaggccttgtcttccagctctggctctaagaaataaaaagaagcaaccccactgaggcttcttcctccttctctttgcctcttgattcttgtcttcttcctcttgcttcatacacctgat

SEQ ID NO: 690826 - DNA, 579 bp, Homo sapiens
gacagatgttcagccagagagggagggagggaaagtcaatggaaaacatggctcaaaaagaagcccaaagagtttgaatattttggtgtgcagggtatgaaatagtttggagaaaaatacttgggtaaaaatttatgattaattcaagactttgagaggctaaattttgccttgtgcctagtgcatgaaccagggcaacaaaacgtgttttcaccctggaaaatacagcctgaaccaaaggcaatcagtgcctctatttataagacatttgggaagtaatataaaacacatgtgtccattttctaatcagctaaacctcaccctcrtatgatccaaattatttaaccattaaaaaaacgctgtttgactgcacatctgtgtgctttttaaaaacagatgattctaaacataatccacctttccattaatgatcagtcaccattatgactgccaatgttgtactttggtttccagttcatttttgtggtcaggttgtcacctgtcatttccgatatcagtatgcctgcttctcagaggctccacttttccaagtaacagctttcaaatttctacagccca

SEQ ID NO: 690827 - DNA, 1414 bp, Homo sapiens
tgagtggataaagaaaatgtggtatatatacgccgtggaatactactcagtcataaaaaggaatgaaataatggcctttgcaccaacttgaatggagctggaggccattattgtaagtgaagtaactcaggaacgggaaaccaaatgtcatatgtttccacttatatttgggagctaagttatgaggacgcaaaggttggagaataatataatggatttctcccagggaaaaaactgggaggtgggtgagggataaaagactacatattgggtatagtgtacactgctgcaccaaaatctcagaaatcaccactaaagaacttatacatgtaaccaaaaataattatgtgttgtttatattaaaaatcccctgtaccctcaaaactattgtaattaatatatacaaaatgttagtctgataaagttgcagttttgctttcctaataaaacatttgagatggaaaaatggaaggcttcttatcaaaatagatctatacattcacactatggtttaatattttgttgttgttgttctgatagtaattatagatatagtaaaactaggctcaaaatatcttcaatgtccataaaagaacaaaagcctaaaatgataagctgaagagaaggcagaatccagttaggcccctcaaccaagagtagcgagttgggcctaggtgttggctcctgagagatagaaaagagcaaaagtgattgagtgggtgggagattggggaactagaaaaccagagtcaaagtttttctctttaaacccaagaccaagagtgtcacttgaaagaattttcagtggtttgtagaaggatgcagtcccaaagaaataagaaagcacagattcaagaactgaggcaagttgctcatttgtttgaaaatattattgtcatgatcccactataatggtgcaggatctcagatgctcttatagaacctaattctggacaagaggtctggcaaactccagggatgcaacagaaaactcacagccrgagaagtgtctgcagagagtaagatagaacaagagaaataaaaatagaaggaaaaaaaagcaaacacttgaaaacactgcccacttgaaataactctagaaactactatttcaaaatgtctaaagctaatatatttttaaatcaccaagcagttcaggaatttacttcagatgaaattacttttatgaaacagtctttacagatgacttaaaattaatatgtattctatgttaaaagagaaaaatgaaaacacatcttcctttaaagttctgttgaatattttttaaagtggaaaggaaataagaacaagaaaacatgaaaaatcatgaaagcaatagataagataaagtctagatgagtgcattttaaactatttgtggtaaaaaatcattcttttccaatttgatattttt

SEQ ID NO: 690828 - DNA, 594 bp, Homo sapiens
tgcacactatgcatgtgtatggatcatcagaggtactggaggggtggggaaggaagatccattggtctgatagactgcagcaatttcctggcctgtatcttaccagtaatctctcttaatatgttgaacaaatcgaacaagaagggtagaacgttgtaccatgcactgctagaaatggcatttgtggcagaaaataaaattatttcatcaaattatactgtgtttccctaacggtttttcttggtgagattcggaaaaaacattaccatctcatcctgacttagaagaatctaggttagtactttctcagataaattacaaaaataacttttcccatgatttacacctagaaaaatgagaaatgtcaaaaactagcataaagagcagaaccgcatttactattattttaaatatttctctatacaagagaattatactgctgaaaactagagaaatgtaaaagttttgayttaggggatttaatttcagccaatttaccttctttttttaacaaacacaaaagcttaaaatgtcatatccttatggttgaattattggaccatcttttcagtagctgttgccaaacaactttat

SEQ ID NO: 690829 - DNA, 598 bp, Homo sapiens
ctcagcctttaggccatggaggaggcagaagggcaggctggtctggattttaccaacccccctcctgtggtgcctacctcttgatttttgctatttcgctcaagtgacttgtctgcaatatagagtggtcccttatgtctttctgttccagtcctccaaacaccaccagcttggcctacaaacatttaggatgttggtgattaaaaatatataytgcttttggatttatagcacttactggttacttgaattgatcatttaattttatcattaccagccaatctattagttgaatgctcctgaagctttcatcaaagggtttggggaaagaaaagagaaaaaaaaaagtccaagttcttgcccattggaggaaaaaaagaaagccaaccagagactctaaggaaaaaatatataaacaagtataaactcatacttatctgaaaactgggactttaaacttgcaggcagtggcttcctacatcagaggatctttagggaaccaccagcagaaagttcctccctgtggcctgacacgttttgcccaggacattcagggggtgaatggaatgatagcaggtggtgggaggggttcagccca

SEQ ID NO: 690830 - DNA, 597 bp, Homo sapiens
gtctgtcttttcttattttttgctaatgacatttttccaattatactttagtgatacatgtttatagaaaagtcggaaaacacaaaaacaagagaattataattcttaatccagttgcccagtggtgagcattattaaaattgtagtttttctacctatgcatatacrtttaaaaaatggaactatacatacataccagggcatgcaaactcagttgcttggagggacaatgaatttacaagtgtcaagtgggctggatggtggggccagggcaagttggggagcataggtctgatctaaattcattcctattcatatgttttacaaacaaagcatatctgttggtagatttgtgacagaagaaaaaattctgtgaatttctcagcttctttatatgccattcaatgttcttctgcaacatgattttaatggctggatggtgattacctgtcagatggtgataatctgtcatactgataatactgtcaaatgggtcaagtcattggatatgggattttttctgaattatcagcacctttttacatatttcttggtgtatacttctgattacttttttagggtaagttcctagaagtg

SEQ ID NO: 690831 - DNA, 675 bp, Homo sapiens
atcccacattgagtcccaagcatactcttcttctaagctctctcaggcttttcagtgtttgagaaaaatctctgatataactagaatttttaataggaatctcaagagtctaaaagtgtctaggcattatgtaaatcaaatatgggagaaaatctgtcttctgaaagaattattatctgagtactcttaattgaaataatgtcacattaatagtcaattttaaatgtatatggtatatttggggaggctctttactgtacagatctaacttaatcatcaaataaaggtctcttcaaggaggtggtgttatccccattttgctgatgaaaagaactgattttcagagatactaattaacctytctattgtgacattaatattggagccacaatttggagttaggttttgtttttgctctttttaattagctgttttttccgttattcaatgatgtctacacgtcagaaagtgactttgatcagtcctgattacaggtctagtgtcatgtgtgtacgtggactagaatggaagaatcctgacacagagattgaattcttagagatactcctgagacccattggaacttggcttctctgcccatttcagctgacttgagttgctaacttcagttcctgtcttcatcttctctcctaaatttgactcagttgcttaact

SEQ ID NO: 690832 - DNA, 1285 bp, Homo sapiens
ttatatcatgagaagtagatgtttacatgcttgagtacctataaggaaaacattaggatcataataatctcctctaggctgggcgcagtggctcacacctgtaatcccagcactttgggaggctgaggcaggtggatcacttgaggccagttgttcgagaccagcctggccaasatggtgaaaccccttctctactaaaaatacaaaaaacttagccgagtgtggtggtgtgcacctgtaatcccagctactcggaaggctgagataggagaatcgcctgaatccaggaggcagaggttgcagtgagctgagatcgtaccactgcactccagcctgggaaacagagcgagactctgtctcaaaataataataataataataatgataatctcctctgatggtgctttcgagactaggaaaatgcctattttatttttaatttcatcaggcttgccagatgagaaaggccgactacagattcttcacatccacacagcaagaatgagagggcatcagttactctctgctgatgtagacattaaagaactggccgtggagaccaagaatttcagtggtgctgaattggagggtctggtgcgagcagcccagtccactgctatgaatagacacataaaggtcaggaaaatcagctaaacagattataaacattatgccggtattctttctctttcctttcaagcatatcaaggggtagggaaatgctgacttttggtggagaagagatggtaaaaggaataagaattaattgtcaactgctaaatcttcagagtagcaggaaggaagataatgtttgcatctgccctgtagtaaccactgactcatctaccttaggtcatcaccatctgacacagacacgtaaagtgaaaattttgaagaagtgtttttaaatctttgtattgtattaaaagttgtaatatggccaggcatggtggctcatgcctgtaatcccagcactttgggaggctgaggcgggcggatcacaaggtcaggagatcgagaccatcctggctaacacggtgaaaccccgtctccactaaaaatacaaaaaattagccgggcatggtggcgggcacctgtagtcccggctactcgggaggctgaggcaagagaatggtgtgaacccaggaggcagagcttgaagtgagctgagattgcgccactgcactccagcctgggtgacagagcgagattccgtctccaaaaaaaaaaaaaaaagttgtaatatgtcagaggaagtgggagtttccacgtactagaattttgg

SEQ ID NO: 690833 - DNA, 1285 bp, Homo sapiens
ttatatcatgagaagtagatgtttacatgcttgagtacctataaggaaaacattaggatcataataatctcctctaggctgggcgcagtggctcacacctgtaatcccagcactttgggaggctgaggcaggtggatcacttgaggccagttgttcgagaccagcctggccaacatggtgaaaccccttctctactaaaaatacaaaaaacttagccgagtgtggtggtgtgcacctgtaatyccagctactcggaaggctgagataggagaatcgcctgaatccaggaggcagaggttgcagtgagctgagatcgtaccactgcactccagcctgggaaacagagcgagactctgtctcaaaataataataataataataatgataatctcctctgatggtgctttcgagactaggaaaatgcctattttatttttaatttcatcaggcttgccagatgagaaaggccgactacagattcttcacatccacacagcaagaatgagagggcatcagttactctctgctgatgtagacattaaagaactggccgtggagaccaagaatttcagtggtgctgaattggagggtctggtgcgagcagcccagtccactgctatgaatagacacataaaggtcaggaaaatcagctaaacagattataaacattatgccggtattctttctctttcctttcaagcatatcaaggggtagggaaatgctgacttttggtggagaagagatggtaaaaggaataagaattaattgtcaactgctaaatcttcagagtagcaggaaggaagataatgtttgcatctgccctgtagtaaccactgactcatctaccttaggtcatcaccatctgacacagacacgtaaagtgaaaattttgaagaagtgtttttaaatctttgtattgtattaaaagttgtaatatggccaggcatggtggctcatgcctgtaatcccagcactttgggaggctgaggcgggcggatcacaaggtcaggagatcgagaccatcctggctaacacggtgaaaccccgtctccactaaaaatacaaaaaattagccgggcatggtggcgggcacctgtagtcccggctactcgggaggctgaggcaagagaatggtgtgaacccaggaggcagagcttgaagtgagctgagattgcgccactgcactccagcctgggtgacagagcgagattccgtctccaaaaaaaaaaaaaaaagttgtaatatgtcagaggaagtgggagtttccacgtactagaattttgg

SEQ ID NO: 690834 - DNA, 1285 bp, Homo sapiens
ttatatcatgagaagtagatgtttacatgcttgagtacctataaggaaaacattaggatcataataatctcctctaggctgggcgcagtggctcacacctgtaatcccagcactttgggaggctgaggcaggtggatcacttgaggccagttgttcgagaccagcctggccaacatggtgaaaccccttctctactaaaaatacaaaaaacttagccgagtgtggtggtgtgcacctgtaatcccagctactcggaaggctgagataggagaatcgcctgaatccaggaggcagaggttgcagtgagctgagatcgtaccactgcactccagcctgggaaacagagcgagactctgtctcaaaataatartaataataataatgataatctcctctgatggtgctttcgagactaggaaaatgcctattttatttttaatttcatcaggcttgccagatgagaaaggccgactacagattcttcacatccacacagcaagaatgagagggcatcagttactctctgctgatgtagacattaaagaactggccgtggagaccaagaatttcagtggtgctgaattggagggtctggtgcgagcagcccagtccactgctatgaatagacacataaaggtcaggaaaatcagctaaacagattataaacattatgccggtattctttctctttcctttcaagcatatcaaggggtagggaaatgctgacttttggtggagaagagatggtaaaaggaataagaattaattgtcaactgctaaatcttcagagtagcaggaaggaagataatgtttgcatctgccctgtagtaaccactgactcatctaccttaggtcatcaccatctgacacagacacgtaaagtgaaaattttgaagaagtgtttttaaatctttgtattgtattaaaagttgtaatatggccaggcatggtggctcatgcctgtaatcccagcactttgggaggctgaggcgggcggatcacaaggtcaggagatcgagaccatcctggctaacacggtgaaaccccgtctccactaaaaatacaaaaaattagccgggcatggtggcgggcacctgtagtcccggctactcgggaggctgaggcaagagaatggtgtgaacccaggaggcagagcttgaagtgagctgagattgcgccactgcactccagcctgggtgacagagcgagattccgtctccaaaaaaaaaaaaaaaagttgtaatatgtcagaggaagtgggagtttccacgtactagaattttgg

SEQ ID NO: 690835 - DNA, 606 bp, Homo sapiens
ctgggattacaggcgcccaccaccacacccggctaatttttgtatttctagtagagacggggttttaccatgttggccaggctggtctcgaactcctgacctcaggtcatccacctgccttggcctcccaaagtgctgagattcgtgcccggcctcccaagtagtcttcttagagcatgtggcccacctccaattcattcttgaccttcattgttccttcccgtgcctattactacttaaacccctcctcagcagcatcccattacttttgggagaaaaccaaatccttartgaggccttcaggactctttgtggttctgctcctgcttctttccactcattctcttactctgtgtgctcaggttatatggtaaacgagcctttcaattccttgaacctgtagtttctcttaccacaaggtctttgcgagtggtgtttcctttctttgtaacgttcttccccccaaccatttacctcctactcagacatcacttagctactcaagggaggcctactctgaccccacattataagtcaggatcctttgttatatactcttgaagaactgtattcctctccttagagatttatctttttgttactttg

SEQ ID NO: 690836 - DNA, 707 bp, Homo sapiens
tttacttcagttacagggattgtttttatctctctgaaagtgcccccaataagccacaacaataaattaatcaattgtctcggtyacctcttttgcccaaatttacgtattggaaaaaattcaaacaagccagaaagatgaaagaatagtacagaatccaatcaaagatcaggcactgcatgtcatgtcttcatttcctttaatctaaaacatgcctctactttctttgatctttcatgacactggcattttttaagagtcaaagatagttgtcttgtaaattgtcccacaatccagatttgtctgtttcctcatgatgaaattcaagttaagcatttttgggaaaaatactgcataggtgatgtatccttcctgcctcgtaaccgcagatggcctgtaatactaagtttgatcacttgactaaggtgatcttccaggtctctccattgtaattattttgctggctacagtggctcccacttgtaatcccagcactttggaaggccgaggtgggaggattgcttgagcccaggagttctacaccagcctgagcaacatggggaaactctgtcactactgaaaatacaaaagtacaaaaaaaaaaaaaaaattagctgggcatggtggtgcaagcctatactcccagctactcaggaggctgaatttggaggatcccttgagcccaggggggttgaggctgcattgag

SEQ ID NO: 690837 - DNA, 288 bp, Homo sapiens
tagtactacgcaagcccaatatagtacgtgttatagtgtattatacacttttgttttcattattcatttggtttttcattcatgcattcatccatccawtcaacaaatatttgttagtcttttaaatgccagccacgcagggtgctgagcattagagaacaaaagagaagaagtaccttttcccagaaagctggaattctagtgactgatacaggcagtaagcaattaattacagtatttccctttaatccaaggggatatgttttaagatccccagtggatgactca

SEQ ID NO: 690838 - DNA, 1470 bp, Homo sapiens
tgccacgtgcaaaattagcactccttcagttactctggagaaactaggtgtagctctagagaggaatttttcaaaacctcttttttttttttttttttttttttgagatggagtcttggtctgtcacccaggctggagtgcagtggcgtgatctcggctcactgcaacctctgcctcctgggttcaagcaattctcctgcctcagcctctcgagtagctggcattacaggcacacgccaccacacccggctaatttttgtatttttagtagagatggggtttcaccatgttggtcaacatggtctcaaattcctgaccttgtgatccacctgcctcagcctcccaaagtgctgggattacaggtgtgagccaccgtgccctgccttaaaacctcttaatgcctagatgatgtagctgaagaaaactgtacttgacacaagacagggatgtccagccttgtgttcattaagcctctttttccttataataattctaatgccttactttgcgtaacagacttgatctggtttctaaaactatttcatgaacattagtttattttatttacataaatataagtctttcacaagtgtcgtctgaatcccagaaagcaatgctgcttttattgaccagaaaagtcttacagggagaaggcaggggtagaaagactggagagttggcaaggggcttaggctgtggtagcttccaccagaacctcgggatgtccctttggttctctcaaccgtatctgaactgacactggactctggcgaatttgtgccaacaatatgttcattcttagttgaatatgcagggaatgtgcctttgccaaggtgttccctgttacagaggtcagactgtacattctcaatgttattcgtggcaatagcaacaatagatactgttcctgggcacttcacagtgattatttcacttaatcttcactacagctctgacaggggagtggtattatcccaattttccatatgaggaaactgaaacaaaacaaagctaaataatttgcccaaagatccatggttagtaagcagcagaggcaggatcckaacccaggtcttaaatcctctaaacttacaaactcctccctggcctcacagcttcccactggatcttctcttttttgctattttcgtcccattcctcaggagcttcctcctggactattcctggaaagtccaaattcttctttcttacttttcttttttcttttttttaaatgtgtatacatcttgtttctttactaagcaaagctgagcagaccctgcaagaatctcaggaaaacaagaggactctcctgtcatagatccctctgctttagaaagcaattgtggtagtttatagtgtggttgttatttttctcctttacacacacattatctcaatattcagtataaccctatgagaaaagtattattattgttcccttttgcaggtgagaaaatagtcacaaaa

SEQ ID NO: 690839 - DNA, 1470 bp, Homo sapiens
tgccacgtgcaaaattagcactccttcagttactctggagaaactaggtgtagctctagagaggaatttttcaaaacctcttttttttttttttttttttttttgagatggagtcttggtctgtcacccaggctggagtgcagtggcgtgatctcggctcactgcaacctctgcctcctgggttcaagcaattctcctgcctcagcctctcgagtagctggcattacaggcacacgccaccacacccggctaatttttgtatttttagtagagatggggtttcaccatgttggtcaacatggtctcaaattcctgaccttgtgatccacctgcctcagcctcccaaagtgctgggattacaggtgtgagccaccgtgccctgccttaaaacctcttaatgcctagatgatgtagctgaagaaaactgtacttgacacaagacagggatgtccagccttgtgttcattaagcctctttttccttataataattctaatgccttactttgcgtaacagacttgatctggtttctaaaactatttcatgaacattagtttattttatttacataaatataagtctttcacaagtgtcgtctgaatcccagaaagcaatgctgcttttattgaccagaaaagtcttacagggagaaggcaggggtagaaagactggagagttggcaaggggcttaggctgtggtagcttccaccagaacctcgggatgtccctttggttctctcaaccgtatctgaactgacactggactctggcgaatttgtgccaacaatatgttcattcttagttgaatatgcagggaatgtgcctttgccaaggtgttccctgttacagaggtcagactgtacattctcaatgttattcgtggcaatagcaacaatagatactgttcctgggcacttcacagtgattatttcacttaatcttcactacagctctgacaggggagtggtattatcccaattttccatatgaggaaactgaaacaaaacaaagctaaataatttgcccaaagatccatggttagtaagcagcagaggcaggatcctaacccaggtcttaaatcctctaaacttacaaactcctccctggcctcacagcttcccactggatcttctcttttttgctattttygtcccattcctcaggagcttcctcctggactattcctggaaagtccaaattcttctttcttacttttcttttttcttttttttaaatgtgtatacatcttgtttctttactaagcaaagctgagcagaccctgcaagaatctcaggaaaacaagaggactctcctgtcatagatccctctgctttagaaagcaattgtggtagtttatagtgtggttgttatttttctcctttacacacacattatctcaatattcagtataaccctatgagaaaagtattattattgttcccttttgcaggtgagaaaatagtcacaaaa

SEQ ID NO: 690840 - DNA, 1470 bp, Homo sapiens
tgccacgtgcaaaattagcactccttcagttactctggagaaactaggtgtagctctagagaggaatttttcaaaacctcttttttttttttttttttttttttgagatggagtcttggtctgtcacccaggctggagtgcagtggcgtgatctcggctcactgcaacctctgcctcctgggttcaagcaattctcctgcctcagcctctcgagtagctggcattacaggcacacgccaccacacccggctaatttttgtatttttagtagagatggggtttcaccatgttggtcaacatggtctcaaattcctgaccttgtgatccacctgcctcagcctcccaaagtgctgggattacaggtgtgagccaccgtgccctgccttaaaacctcttaatgcctagatgatgtagctgaagaaaactgtacttgacacaagacagggatgtccagccttgtgttcattaagcctctttttccttataataattctaatgccttactttgcgtaacagacttgatctggtttctaaaactatttcatgaacattagtttattttatttacataaatataagtctttcacaagtgtcgtctgaatcccagaaagcaatgctgcttttattgaccagaaaagtcttacagggagaaggcaggggtagaaagactggagagttggcaaggggcttaggctgtggtagcttccaccagaacctcgggatgtccctttggttctctcaaccgtatctgaactgacactggactctggcgaatttgtgccaacaatatgttcattcttagttgaatatgcagggaatgtgcctttgccaaggtgttccctgttacagaggtcagactgtacattctcaatgttattcgtggcaatagcaacaatagatactgttcctgggcacttcacagtgattatttcacttaatcttcactacagctctgacaggggagtggtattatcccaattttccatatgaggaaactgaaacaaaacaaagctaaataatttgcccaaagatccatggttagtaagcagcagaggcaggatcctaacccaggtcttaaatcctctaaacttacaaactcctccctggcctcacagcttcccactggatcttctcttttttgctattttcgtcccattcctcaggagcttcctcctggactattcctggaaagtccaaattcttctttcttacttttcttttttcttttttttaaatgtgtatacatcttgtttctttactaagcaaagctgagcagacccygcaagaatctcaggaaaacaagaggactctcctgtcatagatccctctgctttagaaagcaattgtggtagtttatagtgtggttgttatttttctcctttacacacacattatctcaatattcagtataaccctatgagaaaagtattattattgttcccttttgcaggtgagaaaatagtcacaaaa

SEQ ID NO: 690841 - DNA, 1523 bp, Homo sapiens
tatacactcaactctggcacttagttactcttaataaacttatatggaatgaaatgtgctctgtttgaacttctccttttagctctatttgtatgctgaaaaaaaaaatcacaaaataactctagttttttcactttattacttagttctcagtcctgcatatactcgaagtcagctttcttttctctgggttgaacaaccacatcagatgcctggtagtctcaaagggattgattacttgaggataaatccttaaatattcttgaaacaacagagattaaagcacacacacgcatatatatgtgtgtgtatatccatatatatagatatatatagattttctttyttttttttttttttagacagagtctcactctgttgcccaggctggagtgcagtggcacaatcttggctcactgcaacctcctcctcccaggttcaagcgattctcctatctcagcctcccgattagctgggattacaggcacatgccaccaagactggctaatttttttatttttagtagagacgggatttctccatgttggtctggctggtctcgaactcctcacctcaggcaatccacccgcctcagccacccaaagtgctgggatacaggcatgagacaccgtgcccagccagcactcccaaattgtattggccaccatgttaagtgcttctgggcactacagatctacagatctgctacagacattcttttgtcgggaagggaaaacttttcctctagcctctttagtgacagagtaatgagtgaaaaaaacagttttagttacacacatatgcatggttctgggtaaagtaaaatgtggctcaaggaggcagccagaacttagtgtttacatgccttcttaggctagacaaagaaaaagaggtttggggcttgctgagggggtaagttatgcaaggtgaccaagggctgtgtggaaacaagagttgtttatcaaggtttgttatgcagatttcaggtggtgccttctccattgataggagttgcagcagccatcctcctccttcctggtttgggagagggagacacttttgcaaatgtaaatttcttttataaaatgtaagcttcctttaagaaagggaaatttatgctctgcttcagagctttttctgggtatgatgttcctcaattgccttcagctcagaataatccttatgccaaaaaggcctattttggggtggcatattctggtctccttcactattatagttcattctacatcaggatagattttgaaaagtagttgtgcttccctatacacaatcagcacactttggaagcaataatactcatttctataggtctctggggttgctagggtgcttcactgggcagagtccaataacctcaattatggaagccttactctatgtcttagagtaaaatcattttcaccctttcatgatgggcaagcaataggctcaggctccattgcatgtatctcagtatgcgggatagcacaaacaggaaagagaacacggcaagttagaggaat

SEQ ID NO: 690842 - DNA, 1294 bp, Homo sapiens
  misc_feature 2, 3, 4, 5, 6, 7, 8, 9, 10, 11, 12, 13, 14, 15, 16, 17, 18,19, 20, 21, 22, 23, 24, 25, 26, 27, 28, 29, 30, 31, 32,33, 34, 35, 36, 37, 38, 39, 40, 41, 42, 43, 44, 45, 46,47, 48, 49, 50, 51, 52, 53, 54, 55, 56, 57, 58, 59, 60,61: n = A,T,C or G
  misc_feature 62, 63, 64, 65, 66, 67, 68, 69, 70, 71, 72, 73, 74, 75, 76,77, 78, 79, 80, 81, 82, 83, 84, 85, 86, 87, 88, 89, 90,91, 92, 93, 94, 95, 96, 97, 98, 99, 100, 101: n = A,T,C or G
tnnnnnnnnnnnnnnnnnnnnnnnnnnnnnnnnnnnnnnnnnnnnnnnnnnnnnnnnnnnnnnnnnnnnnnnnnnnnnnnnnnnnnnnnnnnnnnnnnnnnggtctcaaactttttgggcttggactcacttgactcactctggtaatgcaaattacacttatattttgttttgataatggctgtttctgggattgagaccacaggaattatccacactgtaatttgattcattgtagaggattcgatgcaatcacattattgtagttcactcaatattggccatctgcctatggtagaaataacttggttaagaagaacatttctttgtaatgatgtttgctacaaatgggtttaagaaagaaaagtgcactctctgttatttgtgtgtgtattcaatatttggttgctctttatgtcctttatgacagggatcatacatctaaaattatgctaaactaaatgaagtgcttaaatagttcgatatttgtttatagttttgttgaagatgattataatggatacaatgataatgataacagtgcaaatttgatgatgaagatgataatgcataaaaataaatgacaagctcaaacacaggagagataatggactcttcttcaatgacaagtgtttatgtaattgaaaatataacactgtacagttctgtctatattagaaaattcaaattctgacatacatattgcgtactaattagagtttttgtcgtgttatcaaattgctagtttaatgactatttttccaaaatgccaattctatttttttcttttagtgtgtatattagtttcccaggactttttgaacaaagtgcttcaaactrtgtggcttaaaataccagaaatttttgtgcaccaaaattaccactaattataccagaaattaccagaaataccagaaattaccagtaaataccagaaattaccactacagaacttatccgtgtaaccaaaaaccacctgttccccaaaaactattgaaataaaacattaaaaaattaaaataggccgtgcgtggtggctcacgcctgtaattccagcactttagggggccgaggcgggtggatgacgagatcaggatatccagatcatcctggctaacacggtgaaaacccgtctctactataaaaatacaaaagaaaattagccgggcatggtggcaggtgcctgtagtcccagctactcgggagtctgaggcaggagaatggcgtgaacccgggaggcggagcttgcagtgcgccaagattgcaccactgcactccagcctgcgcgacagag

SEQ ID NO: 690843 - DNA, 2800 bp, Homo sapiens
  misc_feature 1606, 1607, 1608, 1609, 1610, 1611, 1612, 1613, 1614, 1615,1616, 1617, 1618, 1619, 1620, 1621, 1622, 1623, 1624, 1625,1626, 1627, 1628, 1629, 1630, 1631, 1632, 1633, 1634, 1635,1636, 1637, 1638, 1639, 1640, 1641, 1642, 1643, 1644: n = A,T,C or G
  misc_feature 1645, 1646, 1647, 1648, 1649, 1650, 1651, 1652, 1653, 1654,1655, 1656, 1657, 1658, 1659, 1660, 1661, 1662, 1663, 1664,1665, 1666, 1667, 1668, 1669, 1670, 1671, 1672, 1673, 1674,1675, 1676, 1677, 1678, 1679, 1680, 1681, 1682, 1683: n = A,T,C or G
  misc_feature 1684, 1685, 1686, 1687, 1688, 1689, 1690, 1691, 1692, 1693,1694, 1695, 1696, 1697, 1698, 1699, 1700, 1701, 1702, 1703,1704, 1705, 1719: n = A,T,C or G
cagagcgagactccgtctcaaaaaaaaaaaaaaaaaaaagaagacagggacccatgtaggttaataccatgtactgcacaataatagctaaagaaagaattccagaatatatctggcattttttgacatttttctctgctggccattactcgggagttttgtctcgctgaatttctctacacaaacctaggacaaatgctagcaccagacagccaagattctcttgtaagccactaaatcaagacaagcttgcatttgatcacactatttttgttcttctcccagagtctgtgctcttaactttagtctagaatccctggttccagatccctaatcaccatgtctgaaacaatgatatccactgttttattccctgtttttaactcatctattaaaaatacatatgactgtatgcatcatgcacactcatgaatttccctctacattgmccctgttggtttttagtttgtagtttttctatctctccatgtctcctttcacctgtatttcaggctatatctactttctagtgcaattcctgccctatgtaatgagcattaggtgtttgaaatacgtttatttaacacaaatgtggcttcccaggacttttacacaaatagaacaaatttgaaaatgaaacaaaaaacaaatctaatctagagatatttagaataatataaaggaatgaaccttccagacagcagtcagtataccacggaatagcaaaggatgtcgaaataagtgaccatctccaatatgccagggaatcttatttaagggtttttcccagttgcagtgtaatacatttatatattatttgtcatgtgggatttgatcaatcattttctcactatattgctcaaacaaacactttctgaggttcaacaggcaaaggcgcaaagattattaagtcatgagagctgcacttcaggatcatatgaaagagacagacacaaaataagtaagcataacgcaaatcgatgcagactatatttaagacatatgcaatgtatttggaatcacaaaggaaaaaagatgaagaagcttggagtgtcattgtagaaagagagacaattgagctgaagagtaatatactggatagacagaaggatgaaagggcataacaggaacattaatcagaaagtgcaaaatcataaatacatgaacagttatgaaaaggttatactttagagctgttagaggtggtaagtgttttatagagaaaatagaaaggggttgaacataaaactctagagagcactcctaatttaatattgaggaaggcatcagacgtgaaaagggtattgagaatgaggtgagatataagacagtgatacaaaattgtaagaagataataagaatatatttagcaaaataaggcattcttaagctttttttttcactgtcttctgcaggaaggaaaggaaaaacaagcaaaaaaaaaaaaaaaacccgcaaaaaacaatgatagttcagaagacaaacaataattgcaaacacatatttataaaaataaaccctcttacctggatagcaaggcaatgaactaggccagtgcttccagtctcctccaggagcattccagttccactttgtaaagctgaannnnnnnnnnnnnnnnnnnnnnnnnnnnnnnnnnnnnnnnnnnnnnnnnnnnnnnnnnnnnnnnnnnnnnnnnnnnnnnnnnnnnnnnnnnnnnnnnnnncgcgtgacgtctanagcatacccctattttcctctgttttaatgatattgtaaataattctctatggttgttttatttttctttagtgcccacacaacctcctacatggccaaattcatttcttgatggcatgctggtgactgaacacgtaggtgcttactaaaatagatgtgctgatgggacatatgggcacagttttcttccagctagtttaatatttttctttgaatgtctgcatattattttgattttctaaaccgtgtaactggcattgataattaccaattttgcaggattcttttcctcattctcaatattcctgttatcatctgccatgtaggttgatgttttacttcattgccttaagaagattaaatataaaatttatattcaggccattgcagcaaaaagtctgaaatattctctttctcaagttctctctgtacttttctttccttaagagaaaatcacctacctaagggtacaacaaacttttattccagaggaaactgttctatcagctgcaggttgtaggcactgacatcatgacagcataatacaactcatctgaatagagaaggacattttcaacttaaaaaaaaattttgcaccaacacattgttattgcattattaaaatatagttgcttatgttattcctaaaatgatggtaacatgattttggaaaacattaataggttttagttatgaggattctataattttttcctatgtaaaatattctgtgtaaatatatggctagcccactctaggcttgttgtaagcacgggataaaatgcactatgctctcttctaggagaggatgcatttacacacaatgcttgaaatgctaattcttacagcctattgtgaattttctttttattgctactatgttttgtcaaattttttttagtttttgtatttgatgttagcaatttgcatcaaaacagataataatttgggctggaaatactaagaatgcatttctaacactgtatagacctattgtggagtgccagaatatgagtgtttgaagtgcagaacgtactggcaagaaataaacatggctgatgctacatagggcccttgttgc

SEQ ID NO: 690844 - DNA, 601 bp, Homo sapiens
acccattttctctagttcatttatgtaattgatgagattgcaattgacttgaccgcacttgacagcaaggccagaaataattgaattcagtaccttctgaaacctgttgtattaccatgattcaaaataagaagagaagaggatctagtaagaaagaataggaatgtttatttctgtgtaacaaataagtaaggctaatactgaaggatttttccctgaagttaatcctccagcaagtatctgctttggaggataaaacaaagtcaaattccttttgcccatgttccctcccttccattttctcccctgagtgaccctttcctctttctcctctcccatcctttacatctccgtttgcctggcatwattaaaatccagaaatccatgtgctaattagtgtggttatgatttgcaacctgtccaatgatgccaggaagtgagacgcaaccttttcaagtttagcagcaaccatctaactcgagtcaaaacagagagatgtgttcagttaatttggaaggagacggtgattgggatttgtatattcaaagttcaatgatgacaggtcacattcaagggggacagactgtgtgttaaaatgcac

SEQ ID NO: 690845 - DNA, 601 bp, Homo sapiens
acccattttctctagttcatttatgtaattgatgagattgcaattgacttgaccgcacttgacagcaaggccagaaataattgaattcagtaccttctgaaacctgttgtattaccatgattcaaaataagaagagaagaggatctagtaagaaagaataggaatgtttatttctgtgtaacaaataagtaaggctaatactgaaggatttttccctgaagttaatcctccagcaagtatctgctttggaggataaaacaaagtcaaattccttttgcccatgttccctcccttccattttctcccctgagtgaccctttcctctttctcctctcccatcctttacatctccgtttgcctggcattmttaaaatccagaaatccatgtgctaattagtgtggttatgatttgcaacctgtccaatgatgccaggaagtgagacgcaaccttttcaagtttagcagcaaccatctaactcgagtcaaaacagagagatgtgttcagttaatttggaaggagacggtgattgggatttgtatattcaaagttcaatgatgacaggtcacattcaagggggacagactgtgtgttaaaatgcac

SEQ ID NO: 690846 - DNA, 842 bp, Homo sapiens
ttttcatgatcataaaaacaaagttttagagaaagatgaatagaaaactgattcttaaattggttaaggcttactttcattctctacattcccctatttgtctttaaccacagccaaatggggaaatgtataagattgtgtatacatttttaccaccatcatcaggtactttatagactctgccaacatctccttttttycctgagcccaaacaccccctcaacacttgcacaccatactttgccctctttttccaatattattctttacttaaacccttttctctactaatacctgtgaatatttcaaacatgtagcaagccagtgctattagtgtctctcagttttctccactaaaaataggagacacataaacttcctaattccccactgcacctaatggaattccagcctcaatgattttaacagttatctcctccacaacccaagctactgaaatgtcccctgctctgccagctcaggtgtcattatttgggaaatattacttctcaacattctttttctagttgtttgctttttccattatttgcagctcagcagctattaagatccaatgctgcagaaaacaacaataacaacaaaagagccgcttaataactaaacttaaaaaccaaactagtcagcagcgaacaatgccttgtcaacatttctaaatggagcagaaagaaggcaagccaaaaggacagagagagggcaaaagagagaaagggacgcttcctgatggatgagtatgcataagtgcttcggataatggctaagaggtagagtttgcaacatattaaagagggggaggagagaaataggcgaatagcctcagaagg

SEQ ID NO: 690847 - DNA, 665 bp, Homo sapiens
taaaataaaacacttcagattcgtgtgagagaaaaaaaaaaaaaaagatctcccacacagacgaccaaacaatgggaaacgatgactatggaacgagttctttccagttctggaaagcataatggtaataagagttaacaattagtcaatccctgtcaactagtaggaggaggtatgtagggaagaagtcaagcctaaaagaatcaggtcccaggaccagggtcaggcagaatgggyggagaaacatcaaccacagcaaaatgtaacaaacagttgatattagtgatatgattcagacttttaaaaaataacttgacagttatattttattttaatctccccaaaaccctgtgaaagtgtcagcccagggcaaaaacaaacaaacaaacaaacaaacaaacaaaaaaacaccaccacactgtaaggaaaaaatgtttttaaaagtttaagcaatttttccacagatcccagggatatgaccgaccgagagaaactttctttaaaacagttcttataatcacagtcttcagttgagctccatgggaaaggcttaaatttaaattattacattgctgcaaaaacatgaatagctgaaaaagaacttatgaaaatgatgctactgcaactaactgattgattatggactgtcatacgaaaattttagc

SEQ ID NO: 690848 - DNA, 1082 bp, Homo sapiens
ccggaagcttctgtctatcatgttttattaggatgtgagtatgggaaaggcatgtaattagagttgcctaagaaagttaatttgcaaatttttatctaagaaagtttctgaatttctcaatagtagtcaaccctactccattcttaattataaaaataactttaaatttaaaaagtataaatgcatggccacattttaaacccatcactcacacgtcttaatgtaggcagcagcatgtcatcctgaatttatttaaaattcactttgcattaagaggagttgtaattattagctgccaagcctggaagagattgaaaacataacctttctttttccataatataataatgcctaaactcaaagtatatatgtgaatcttggctaaaaaatgacatctgactggcatcctattcatgatatgccatcttctatctttatgccaaatatacagtgatacacagaagttgaagaaaaacttatggaaatactgacattgaagacarattttcctaggactgtagaggcattcttattaatgtgaaactggactaagaaacaaccagtgtctacccaccagacaaacattggcacacacatcatcccaaatttactattttctttgaatctcagagaactgagctgtgccaccagaaaattatttttttttttttaaaaaaaaaaaggtagtctctttttttttcaaatgtttttcccccatccatccagaaaatgaatttcccagaaaacaagaaatacattttctttgttgattgatttagttggttaggtgtggtcactggtgctgtcacaataatctctgtggttaaatgttaatcccacaagtcaaagccagataggcaaggaataaagtagcaatatgttaaggttcctgcaggaagagttttctatgcatcctactggtaaaagtgtgagagctccagatgataagataaaagggatatagaatatatgaaaagtccacactaagtaaatgcttagacaaatgcttcctaaatgttaggacttttgctaaaagctgtgcttatatgcctgcttttgaacttctcacatgaaaacgggtt

SEQ ID NO: 690849 - DNA, 630 bp, Homo sapiens
ctgcatacttatagtatattatcaagaaagaatggaagatataaaaacagacaaaggagggaaaatcattctgggtggaaacaatggcagattcaaagatatgagggcatgacatggaaagaaattattatttaatgactattacatagaaaaaaattctgagaaggacaagtaataaggctggaaagaaagacatgagtcagatcacaaaggtacttaaattcttggtaaaagatcttagatttaaacctgtagtcaattaaacaataggcagccattaaaagagttttagtacaagagtagcgtggttgaaattgcattttggaattaaatacctacttcttgacttatgtactgaagtagaggatgacatgmcagtggcaattagactagggttgccaaaagcaaaataattaggacacatttggaaaatatcttgagttttaagtagaacaatgtagaaagccataacaagatgagaaaccagaagcaaatactgtattttgactacagtgcaataatgaacaggagatttggagctgttaaaaaaaaagccatgttcagacatatccatgtagttttctaaatttcaaagacaccaagaacatttcagacatttttcaagtcaga

SEQ ID NO: 690850 - DNA, 1545 bp, Homo sapiens
gaggaagagtgagagagattatctgtgtgctcttaccaaggaaaggccgtgtgagaacatagcaagaagacagctacctgcaagccaggaagagagccctcaccaggaactgaattgrctggcaccttggtcttggacttcttacctcaagaactgtgagaaatatatttctgttgtttaagccactcagtctgtggtattttgtcatagcagcccaagctgactgatacaccattatatatagaaaaagtatagacatccctgtgctgtggagaggctcttaaaccaaatttcctaattcgttttctacccttaaacaccgaaaggaaccctctttcctcctggcttaggagatcctgggcttaggagatctgttcaggtaatgttcttggtggtgcatttagatgtaagagctccaggttaagggtctgacaagacacttttggctaaaacaagcgttaggattgggagaatgtttctcagtggaaacagtataatcacctaactgaaggaaaaaatggcccctttccccaaatattctgagcctgctttagagcaggagagcccacttttacagcaggaaacaccctgagaaggaagtagagaatggtgacgtcagtggccctggatctgggtcccgtccctgctcttcagtatgcagagctgtcaggcgtcgtgtgctcctgtgtagagtgtcaggggtcgtgtgctcctgtgtggacagggacagcagcagggtcctgcctgagatcatgaatatggatgtgagtgattgttcccaggcctaagtgaaaggctttcttgaggcagatttttctctgggatgctgattgtgagtttttaatgtctcccctttcgttattcagtgttcttggcttctttagattgatcatcatgtcttctgcctacaaatatctgctcatattttacaagcagagaagtgactggagctgtaaccagcctagctgaccaaatgaagtccatgtggggccctgtcatttatatgggtgattaaaacaaaaacaaaaaacccttaaaccctgccagagggtaatttttcatggtctgccttttatgtttcttccttttttctcttcagtttttttctcctttccttgcagttattttttttttttcttttattgcctgtttcatttcacaacctggcactattctggtagaaatgtctgcttcctgccaccctcaggaagtcagagaacagggtaaatttgtccagggcttcaccccatgatttctaatggtgtgactcaaggctcccatgggagagatctacccaggaaaataaattgtgtgttggtttttaatacaagaaccttcataaactgagctcctaggagaaaatgaagacatttaaatactcttctctttttgcagtttgctctgtggtcatcagttaaccacccaaatggaagtgcatgtgttaatgttcaacagtgggttaatgtctggaggatggttttggacagcatagttcggagcaggttaatgtttaatgtaaaagtacttagatgagtacttggtaca

SEQ ID NO: 690851 - DNA, 613 bp, Homo sapiens
cgtgggacttattcactaccatgagaacagtatgggggaaaccacccccatgattcagttatctcccaccagtccctcccacaacatgtgggaattatgagagtacaattcaagacgagatttaggtggggacatagccaaatcatatcagtccctaataaaagaaacatcattgctccctcactgactaccaactaaaaatagtctccataatctcaccccaccccacctttcctattttaactctttttgtttattctttaacacacacacacacacacacacacacacgcaaactttttaccaaagaaaacttcaatgctgggtgcagtgggtcacacctataaccccaacattttgggaggctgacgtgagcagatggcctgagctcaggagttcaagaccagcctgagcaacgtggtaaaaccctgtctttacaaaaactagccaggtgtggtggcgtgcagctgtagtcctagttccttgggaggctgaggtgggaggatggcttgaacccaggaggcggaggttgaagtgagctgagatcgtgccactgcactccagcctaggtgacagagccagactctgtctcaaaaaaaaaaaaaaaraaaaa

SEQ ID NO: 690852 - DNA, 939 bp, Homo sapiens
cttacagtcactacattttttataagagaaaggcagaaaatttttaaaaatctttatatctcctgactttagctcttcatttcatttttatatagaggtatctgactatgaaataatatgcatactcatcttctatttaaaaagacaaattataaaacagactgtagggactctgtactgcttctcagacactgcaatcccacataggagcaaggtcagatttactgatacaggcaactgtccaaagcagctcttctcctgctagctgttgatgttctcttcctctctgccagctccataacaagggccctcacccggtgcaccaccctcgcccacacacacaccctgaccgaggccctgagagttccaggttcctgcacctgcctttcctgcccagggctttttgagaacagacagttgctctcaagcccagggctttctgagagcagacagttgctcttgagcccttctctgaggtcctctgaacacccctactccaccatcaatcagagcagttatactttttttttttgcttttacctattaggtttctgttaggttgaaacatatgaaactgctgatattcaaccgtattacctgcaaaaatagcaatttcatataactcarcctacataaacttttcttttaacagagttctctggctaaataatttgaaaaccatttctctaggccttaagtgagcctgacattttgctggccccagtaaaattgaactctttcccttcttagacatcactagtaagagtataaagacacatgcacatgtatgtttattgcagcactattcacaatagcaaagacttggaaccaacccaaatgtccatcaataatagactggataaagaaaatgtggcacagatacaccatggaatactatgcagccataaaaaggatgagttcatgtcctttgcagggaca

SEQ ID NO: 690853 - DNA, 939 bp, Homo sapiens
cttacagtcactacattttttataagagaaaggcagaaaatttttaaaaatctttatatctcctgactttagctcttcatttcatttttatatagaggtatctgactatgaaataatatgcatactcatcttctatttaaaaagacaaattataaaacagactgtagggactctgtactgcttctcagacactgcaatcccacataggagcaaggtcagatttactgatacaggcaactgtccaaagcagctcttctcctgctagctgttgatgttctcttcctctctgccagctccataacaagggccctcacccggtgcaccaccctcgcccacacacacaccctgaccgaggccctgagagttccaggttcctgcacctgcctttcctgcccagggctttttgagaacagacagttgctctcaagcccagggctttctgagagcagacagttgctcttgagcccttctctgaggtcctctgaacacccctactccaccatcaatcagagcagttatactttttttttttgcttttacctattaggtttctgttaggttgaaacatatgaaactgctgatattcaaccgtattacctgcaaaaatagcaatttcatataactcagcctacataaacttttcttttaacagagttctctggctaaataatttgaaaaccayttctctaggccttaagtgagcctgacattttgctggccccagtaaaattgaactctttcccttcttagacatcactagtaagagtataaagacacatgcacatgtatgtttattgcagcactattcacaatagcaaagacttggaaccaacccaaatgtccatcaataatagactggataaagaaaatgtggcacagatacaccatggaatactatgcagccataaaaaggatgagttcatgtcctttgcagggaca

SEQ ID NO: 690854 - DNA, 939 bp, Homo sapiens
cttacagtcactacattttttataagagaaaggcagaaaatttttaaaaatctttatatctcctgactttagctcttcatttcatttttatatagaggtatctgactatgaaataatatgcatactcatcttctatttaaaaagacaaattataaaacagactgtagggactctgtactgcttctcagacactgcaatcccacataggagcaaggtcagatttactgatacaggcaactgtccaaagcagctcttctcctgctagctgttgatgttctcttcctctctgccagctccataacaagggccctcacccggtgcaccaccctcgcccacacacacaccctgaccgaggccctgagagttccaggttcctgcacctgcctttcctgcccagggctttttgagaacagacagttgctctcaagcccagggctttctgagagcagacagttgctcttgagcccttctctgaggtcctctgaacacccctactccaccatcaatcagagcagttatactttttttttttgcttttacctattaggtttctgttaggttgaaacatatgaaactgctgatattcaaccgtattacctgcaaaaatagcaatttcatataactcagcctacataaacttttcttttaacagagttctctggctaaataatttgaaaaccatttctctaggccttaagtgagcctgacattttgctggccccagtaaaattgaactctttcccttcttagacmtcactagtaagagtataaagacacatgcacatgtatgtttattgcagcactattcacaatagcaaagacttggaaccaacccaaatgtccatcaataatagactggataaagaaaatgtggcacagatacaccatggaatactatgcagccataaaaaggatgagttcatgtcctttgcagggaca

SEQ ID NO: 690855 - DNA, 818 bp, Homo sapiens
attcttgcctccaaggcaggaaggagggcaactaattagaaaggggcaagaggaaactttctggggtgatggcaatgttctatattttgttttgagtggtgttatacctatgtaaataattaaagttcatcaagctatatacttaagatctgtgtatttgattcttcaattgtgaaaaacaagatgtttcacgaggaactattttaaaaacaaagccaacacaagtaacatataactattcagtaaaaagaagataactagaatgtcaatagacctacctaatatatatttcaaagatttttttttcaagtatttaagtacaagtaagtagaaaaattcaggcttgtgggttaatatactggagagaaacaaagagaaaagagtaatamccatttcagtcactctgaatttgaaatagattgcttcacaatctagaggattttaagacgtgaaataactgaaagaaacaaaggtgaaaaagatcaaacacaggatgcagaactaacagctgtgacttagttaatgcatatgctgaataaaaacaaactcaacaaagcactgggaagccggcagcttccaagtaattaactaagcagaaacacatgcaatgtgttatcagccctatctcatattgaaagcaaggactccttcgttacaatggatgctctccatttacaggtagagttacaagaaaataaactacataaaggtatacaagaggcaaaggaaaaggaaccaatttgctacatctaagtagtatctattttcagtgaatgagataaaagttctgccgttacctcacctactcaatatcagtc

SEQ ID NO: 690856 - DNA, 1400 bp, Homo sapiens
tttcagtgatctattttatacttgtactgcattctattttcaatgcaacagccacttctctgacctcatctctacctcatctgccatcctttctctttactcacacagctccagtcacactaataagccacactgtttacataaatttttctgagctttaattcacaggatctatctcatgaaattatttaaataattatatgtaaacatgcatttaaatgtttcttgttatgtttcctaaaaacttataattaaatattagcaggcatattaatattattgctgattaaaattttggtttctcaatagagaaaaacatcataccattcaaagagacttttatagttttgtttctagttgttacttaagttaatataatactactrtaatttgcacactgcatcttattttgtaatgcaccaagttaaaaataaattattaattttgtattaacattgctgtaaatttgagccaagtagaaaaataatattcttgattcaatatttagattttaggtgactataaatgcacaaaaacaatatccttcaaagaaagacggattataggtcaaattagcacagggacttgacataatctgtgattcttgtgtgaatgagtaaagagtggcaagaggttcttaacatccacaaacactgaaactaattagtgtaatcaagaggacattacaaaaaatatgtggtcttttttattacttatttgcaatttttcactttgagttccttattcttgcatctaaaaggcaatttaaaaagggacttggagaaaatactttagccgagaataactatctgtatcttaactgtgaaccccgaatatctgagacaggtctcaggtaatttagaaagcttaccttgccagggttgaggacacgcacccgtgacacagcctcctcaggaggtcctgacgacttgtgctgaaggtgatcagagcacagtttggttttatacattttagggagacatgagacatcaatcaacatatgtaaaaaaaaccttgatttggtctggaaaggcgggacaactggaagcaaaagctggaagacttgaagcagggatgggacttccaagtcataggtagagaagagacaaatggttgcattcttttgagtttctaattagcctttccaaaggaagcaaacagatgtgaatttatcttagtgagcagaggggtgactttgagtagaatgagaggcatgttagccctaagcagttcccagcttgacttttccctttagcttaatgatttgagagctccaagacttgttttctcttcacattactttcagaatttttcttgatctctagttttcttgtttatggtattgttcttcttactgcttaaacaatggttagatggtagttcatgataagggaacaaac

SEQ ID NO: 690857 - DNA, 625 bp, Homo sapiens
tgaacagtttctttaaaaaaaataagcatgtgcttatatgtgttcctgcaattcctctcactttttactcaaaataagagaaaaaaaacatcttctacaacaagacaaaagtcttccagaaaaatattcgtagaatgctagtcataatatccccaaaaggaaacaacgtatgagtgaatggataaacaagtagtggtacaatcatccataggaaatagcacttagcagtgaataacaaataaactactttacacatacaacacagatgaattgcaattctattatgctgagcaaaagaagcgagacacaagattatataggctatgataccatgaatataaagctctagaaaaggtaaaactaatctataataaaaatagaatcagtgattgactggacatggggagtaagatggctgtttgcaaagaggtsgggggggactttattctgaggcaatggaattatgctttatctttatggagttgtacatattggtaaaaatttactgatctttatgtttattgtgtatatttttacagtatgtacattatatttcaatgaagattataaatagtagacatagatttactaattaagaagaatttattaaaacatttcatgaatc

SEQ ID NO: 690858 - DNA, 625 bp, Homo sapiens
tgaacagtttctttaaaaaaaataagcatgtgcttatatgtgttcctgcaattcctctcactttttactcaaaataagagaaaaaaaacatcttctacaacaagacaaaagtcttccagaaaaatattcgtagaatgctagtcataatatccccaaaaggaaacaacgtatgagtgaatggataaacaagtagtggtacaatcatccataggaaatagcacttagcagtgaataacaaataaactactttacacatacaacacagatgaattgcaattctattatgctgagcaaaagaagcgagacacaagattatataggctatgataccatgaatataaagctctagaaaaggtaaaactaatctataataaaaatagaatcagtgattgactggacatggggagtaagatggctgtttgcaaagaggtggggggggactttattctgaggcaatggaattatgctttatctttatggagttgtacatattggtaaaaatttactgatctttatgtttattgtgtatatttttacagtatgtacattatatttcaatgaagattataaatagtagacatagatttactaattaagaagaatttattaaaacatttcrtgaatc

SEQ ID NO: 690859 - DNA, 655 bp, Homo sapiens
caaaaaattagccgggcgcggtggcgggcgcctgtagtcccagctactcgggaggctgaggcaggagaatggcgtgaacccgggaggcggagcttgcagtgagccgagattgcgccactgcaatccgcagtccggcctgggctaaacagcgggactccgtctcaaaaaaaaaaaaaaaaaaaaaaattagttgagtgggatggctcatgcctgtaatcccagctactcgggaggctgaggtgggagaatcacttgaaccaggaggcggaggttgcagtgagccgagatcgtgccactgcactccagcctcagtgacagagcaagaccctgtctcaaaaataaataaaatgaaagatatattctcgttgtagaagaggaaattattacactaatatgaaactataggccacyccctaaaaataataatgtcatcttacataaatgctatgtattttacaaggcgttttcaaatatattacattatttgacacaacagccctggaagatttttttaaggacatattacgatctcagattcataaataagaaaatgagggcctgtggtaactaacaaattccagacaaggacccagggcttctgaacctatggagacctcaaagttaaagtaataacactgcagacagtgaaaatgac

SEQ ID NO: 690860 - DNA, 616 bp, Homo sapiens
ttattcaaatgaaaagttacaagcattgccatgggtgctaccctaccaagtagtcccagagcagagggacactgaggccagaggggtcttccaggrttcagcaattttgggggattcctggaactaaagttgaacacagatgaatcttcctcttctttttttaatcctttgtagctcgctcactctggtctctcatataactaaaacgtccccagtgaataacagagatgtcagtgacccagtagcaagaattttacaaaaatatcataagagaggatacattcaaatcatgatacaaaatatggcctggagctccaaacccagacatgtgtacctcactttccttcccaacagatgtgcacccaaaattatttactctttctactaggactgcttttttttttttttttttttttttttttaaaacagagtcttgctctgtcacccaggctgaagtgcaggggggtgatctcagctcactgcaacctccgtttccaggttcaactgattctcgtacctcagcctcccgagtagctgggactacagatgcataccaccatgcccagctaattttttttttttcagtagaaatgggtcttcaccatgttggccaggc

SEQ ID NO: 690861 - DNA, 668 bp, Homo sapiens
catatttaagttattgtttgctgctaaaatgatacattttctctgtccgtacagagattttgtaataaagctgacatttattgtacacctacttcctgacatgcctcatgcttatacttcacaagcactgtctcgtttaatcctcacaacagccctgtgagttaggaaccattactgacctgtcttacagagcaccaagaggttaagcatcttgaccaacatttcacagtaactggtagaactggaactggaagattatactcttaactgttacaagccaataatctgtctccttagccctggctgaacctccctcttatgtctatttactgcatgaaaacattaatatattattttaagcactgaccaggacagctagatgatctatgtaaccccagagctgtttgtgctggcctcatcagcagcacaagrttgataaacttatcagtcatccggtcgatgctccctggctcagctttggtccagccatcacctctcttgcctgagcccctgtgaccagctcttcactaatctctttgctttctctcttgccccgcttcctcctacagtgtattctctatccagcagccagtgagatcttcttaaatagaaatatgatggtgtcacccctcctgcattcttaaaaccctgccatagtttcccattca

SEQ ID NO: 690862 - DNA, 1720 bp, Homo sapiens
tggctcttaaccaactttagacaataaccaaatcattttgctgcttcccagtgaagtagttgaatgtttcatttgcatatgtattttgaacaagacatttctgagtgttcccagtggatttgcacttagagctgaagaacttttgggcttcccaagggaataaaaagaaaagcagctcattggaacctaaaaacagcactgaggacactgtatttcccacgtgtgtgtgcctgtcaacaagtggttaytgggatggacgactggtcagtcatgtgactgcttttgggtggtgtgctttacgtttgtttagaagagagtttccaactcatgttctatgagtattatgcaaaaaataaaaattctagcttcagtttaaaaatggttgtgttggggccaggcatggtggctcacgcctgtaatcctagtactttgggaggccaaggcaggcgtatcacgaggtcaggagttcgcagaccagtctggccaacctggtgaaaccccatctctactaaaaatacaaaaattagctgggcacaatggcatgcgcctgtaatcccagctactcaggaggctgaggcaggggaattgcttaaatccaggggcggaggttgcagtgagccgagatcacaccactgcactccggcctgggcaagacagcaagacctcatctcgggggaaaaaaaataaatagttgagttggtcaaaatctaacaaattttcttactgcagagcttctcgaagactttgtaacagaacaccctttggaaaatactgccttagaatacctagccaaatgttgcaatccagttttcatgatctaaggaaaagtccttctcccaaactgtggaaaggggaagataaagtgatgctggttcctgaattgaacagggtgattaaaatgtacagcataaagccagatggattttcaatgtgttttgtaaaataaaccaaagaaggttaattgtgatgcttcaaaagtatgaccatatattttccagtgttattgtttatatcataatccaaataacttatttgctatatcatttcacagcataggtgagaatcttttttttttttttttttttggaggcagggagctttaaactttcttctaaaattgattttagaagaaagggacttagaaaactcacatatttcttatgctactttttgttttgaattaatatatactaaaaagaggaataaaaaccattttatttaaatgccactgctccttagtaaacttttctgtgaataaaatataactttctgaataagcagactcaatacagcttgaaaggaaatgctggggttgcttggaaataatagtttcaactcataaaatggaaatgagcaactatggcctgccacctgttgtaaataaaattctattagaatatagtgggtctcattcacctacagcccttacattcacttatatattatctatacttacatattgtttagtgctgtcttcacctgcaagggaggagtggatttattgcaacagagatcttatggccctcaaagcctaaagttttgaatataggtccctttacagaaatgtctgctactcctttcaaagagtcacagaaatttgtaaaagggatgaagactacataactgacccctttttctttagatagaaaaaactgaaaacagagaagttagggaattgtccaggcttatttatgcctgggtgctctgatctttatatcca

SEQ ID NO: 690863 - DNA, 1720 bp, Homo sapiens
tggctcttaaccaactttagacaataaccaaatcattttgctgcttcccagtgaagtagttgaatgtttcatttgcatatgtattttgaacaagacatttctgagtgttcccagtggatttgcacttagagctgaagaacttttgggcttcccaagggaataaaaagaaaagcagctcattggaacctaaaaacagcactgaggacactgtatttcccacgtgtgtgtgcctgtcaacaagtggttattgggatggacgactggtcagtcatgtgactgcttttgggtggtgtgctttacgtttgtttagaagagagtttccaactcatgttctatgagtattatgcaaaaaataaaaattctascttcagtttaaaaatggttgtgttggggccaggcatggtggctcacgcctgtaatcctagtactttgggaggccaaggcaggcgtatcacgaggtcaggagttcgcagaccagtctggccaacctggtgaaaccccatctctactaaaaatacaaaaattagctgggcacaatggcatgcgcctgtaatcccagctactcaggaggctgaggcaggggaattgcttaaatccaggggcggaggttgcagtgagccgagatcacaccactgcactccggcctgggcaagacagcaagacctcatctcgggggaaaaaaaataaatagttgagttggtcaaaatctaacaaattttcttactgcagagcttctcgaagactttgtaacagaacaccctttggaaaatactgccttagaatacctagccaaatgttgcaatccagttttcatgatctaaggaaaagtccttctcccaaactgtggaaaggggaagataaagtgatgctggttcctgaattgaacagggtgattaaaatgtacagcataaagccagatggattttcaatgtgttttgtaaaataaaccaaagaaggttaattgtgatgcttcaaaagtatgaccatatattttccagtgttattgtttatatcataatccaaataacttatttgctatatcatttcacagcataggtgagaatcttttttttttttttttttttggaggcagggagctttaaactttcttctaaaattgattttagaagaaagggacttagaaaactcacatatttcttatgctactttttgttttgaattaatatatactaaaaagaggaataaaaaccattttatttaaatgccactgctccttagtaaacttttctgtgaataaaatataactttctgaataagcagactcaatacagcttgaaaggaaatgctggggttgcttggaaataatagtttcaactcataaaatggaaatgagcaactatggcctgccacctgttgtaaataaaattctattagaatatagtgggtctcattcacctacagcccttacattcacttatatattatctatacttacatattgtttagtgctgtcttcacctgcaagggaggagtggatttattgcaacagagatcttatggccctcaaagcctaaagttttgaatataggtccctttacagaaatgtctgctactcctttcaaagagtcacagaaatttgtaaaagggatgaagactacataactgacccctttttctttagatagaaaaaactgaaaacagagaagttagggaattgtccaggcttatttatgcctgggtgctctgatctttatatcca

SEQ ID NO: 690864 - DNA, 622 bp, Homo sapiens
gtgcgaggtacggcaccaggccctcgtcctggtgggctcagaatctggtggggaagagaaactgagtaattcaacatgatcggtgtcctgagagccgctccgaggcccgactccatgtgtgcgtgcacctgtgtggtggggagggaatatgaaggctggtttctgaggatctgatgtttaaggaaagacctgaaggaaaagagtggagatggggaagggctgggacagaggagacagaccttgggaaaactgtaaacagcaaaaccaaaccaaacctggtgtgttcagaaaacgaaaaaaacagcaaagaaagcaggggaggggcttccctgagggcctgggcctttatctggaaagcgctggaaggactgaagagaagagtgacctggctagacttgggctttttaaagctcgtgctrtgatgtggaggatggatgaggccactacttgagctgcttgggcaatgacgtgacttggatgggggtgatggcagcagggatggagagaagcggatgtgtatttagaagaaactgagaagagaaacttggcaggacttggtattgggaggggagaggaaggacatcagggataattctctggatttgggcttgggtgagtggtg

SEQ ID NO: 690865 - DNA, 827 bp, Homo sapiens
tgaaaacagaacagaaatagtcacagacgggtgacagrcaggagatgccacctcattgacagctgccaccattttccatagagaagttattccattgtagtatacaccagggctgggtttaaatatttttcctatgtacttggtagtatagtggaagctcctccatttctctaaatagttaactgcatacttagagctcttggtagcgtttagaacacggagttaattattctgagtgtacctagccccatcactgtctgtaatctgtacaaaatttgataagcccttttaaggtagttagatatttattgagactctgctgtatatttggcagtgccccagatataggtagtggtggtgacagcaagcaataggaccagtggagcctgctttttaatagagagtgatctctctggtattgttgtaagtacagcatataagcaacttgaggtgttgtcttaaagatgtgagctcacctaatttacacaagagcatcaaagccagaattcctccccttgctgatgttagcctgtaactctgtgcctctcaagtgtataacttcttctgtgggaatcatgcttctgaagcatgaggaaagaacacacccgtgtttccactttctctgctgctttgcatgtgatccctccaggtatgcaaaataatgcctcaatatcattttgacctgtgttgtcattttacatattttatcagaagacttcatatcggatggaagcaaatctttagaagggttgttataacaacttgaacagcccatcatgctctaggcatgctccctatcacggctatgttttcattcattagagatg

SEQ ID NO: 690866 - DNA, 649 bp, Homo sapiens
tctttttttctctggagtttagcttagatgcttttttatggagagttccctgatttcttccttgcccaaccagaagtaatgtctctccctacttgggatatacatagagcaccttccacgtrcagtgttttcactgtctgccttcggtcacagttgttttgttttgttttgtattttgagacaaagtctcgctctgtcgcccaggctggagtgtagtggcatgatatcggctaactgcaacttctgtctcctgggctcaagtgattctcctgtctcagcctcccgagtagctgggactacaggcacacaccaccatacccagctaatttttgtatttttagtagagacagggtttctctatgttggttaggctggtgttgaactcctgacctcaagtgatccacccgtctcagcctccctaagtgctgagattataggcatgagctaccacacccggcctgatcatagttatttatgtataccttatcccctcgttagactaattacctgaagagcttctgtcattcagctgatgtttagagaagttaatttacaaacaagttggtcatatattttgtttaaaaaaaatcatgtgtcttaccatataggaaacagtatcgatttctatgttgactttctggatatatca

SEQ ID NO: 690867 - DNA, 778 bp, Homo sapiens
ctgtcagggtcctgcagtagccagaagttccttatgttttccttgtacatgtgcctgtgtgtacatgtgtatgtgtgtgtgtaaatattaattttttagtgactactattgctagctattgagtgaagcagtttgcatagattgtttcaatccttcaaaacccttagcagtaagaacaattatgtgatcatttataggtggggacccaaaattcagagaagttatcacaccctagatcctataatacttatgaacattgtcatggytcaaaacccagattctcatggacaccactgtattctctccccctcccttcctctctttcttccttgttcattatggccaggttctctccctgaaaaactgtgttctggaccctatttttttctcctaagagaggttagttcccctcccccagtgctatcctaaattccaagcctgtggttttaacagatgagaaggaagcaggcaactcagcccagtgaggcctggaatagtaccagggatgtggctgcccaggagccctggagcatggccagggctgaagctgaatacaagctaagcaccacaggtggggtgggatctgagaagcccctgagctgcgtgaacagcttttattgttctcccatcctgggcctctccctctcccttctgcatcccaaaagagagatttaattttctcagcagatgctcctgcctccagcattagttctgtagttttgcatctggtcccctccagtgccttttgcagagctgtgatgtgtctttcatttgagca

SEQ ID NO: 690868 - DNA, 612 bp, Homo sapiens
gaccatttagacactggctgtgtttttctttcccccaaagcaagtgtgtttgtgatttgttcgaaggcacataaaaccacacggtctgcctgccctcggyggtggatttcctgaataaacttcaggcagatggcacttttatgttctcttataaacaaaccagaatgaccaaagtgttctgcaagcggttcttacctcggttatatacaaatggtttcacagctgaaaggagtaattgtaaaatgtcaaggggaatatatgcccactggtacaccctgcaaatgaccagaaataaccatctttgccggagcaggttaaacactgtgtactttctaaatgttcctttctgcagttgctcaggagtggaaagctacacttctaatgtccccagtggaattcaactacctacagcaaagtatttactacagtttatgagacctaatgatcatattcatggtgttaatctattatgccaatgttcacctaatagggtttagatgttctgtcatttcttagcacatattggaatataaaaacacagaaagatagtagctggagaatgaactggaggcagctaagtggacatgaagacaggcaaaaaccatgaagatg

SEQ ID NO: 690869 - DNA, 656 bp, Homo sapiens
attgctatttcttcagagtctgttgaggcaatcctcaacattgtatctgccccaaaggatgtgttgaagtcctaacccctggtacctgtgaatgtgaccttacttggaaatagtctttgcagatgtaattaagatttaagttagaatgaggttatacttgagtactatatttggtccattttgcattgtataaaggaatagctaaggctgggtaatttacaaagaaaagaagtttaattgcctcacagttctgcagactgtacaagaagtgtcagagatgataaattcctcttcaaaaagctttcgttccctgttctttgtttcttaaaaccaacttccttgtacttccttgtctcctagctacctgttctgtaaacaaccttcctgcctttgccatgcccagacaagtccagatatgccttcccgcctagtaacagacwcttttcccacctagtaacggactcttcacctaatagaccctattcaattttaaaccttagccaatcgagttagcttagattgtgaggtccaaccccagccaatggggaaaggacacagaagtgctaggaactgcattagagataaaaacccctttcctaccctgctcggtgtgctcttgcgataatgactggcgcaagctgcacccttctgcagaa

SEQ ID NO: 690870 - DNA, 656 bp, Homo sapiens
attgctatttcttcagagtctgttgaggcaatcctcaacattgtatctgccccaaaggatgtgttgaagtcctaacccctggtacctgtgaatgtgaccttacttggaaatagtctttgcagatgtaattaagatttaagttagaatgaggttatacttgagtactatatttggtccattttgcattgtataaaggaatagctaaggctgggtaatttacaaagaaaagaagtttaattgcctcacagttctgcagactgtacaagaagtgtcagagatgataaattcctcttcaaaaagctttcgttccctgttctttgtttcttaaaaccaacttccttgtacttccttgtctcctagctacctgttctgtaaacaaccttcctgcctttgccatgcccagacaagtccagatatgccttcccgcctagtaacagactcttttcccacctagtaacggactctycacctaatagaccctattcaattttaaaccttagccaatcgagttagcttagattgtgaggtccaaccccagccaatggggaaaggacacagaagtgctaggaactgcattagagataaaaacccctttcctaccctgctcggtgtgctcttgcgataatgactggcgcaagctgcacccttctgcagaa

SEQ ID NO: 690871 - DNA, 666 bp, Homo sapiens
agccaatgtgaagcactctggcataagatttttcagtgacaaaaytgaacacaaaaaacttcagtaaaagtgtgtaatgaatattccataaacagaactggtgttgctgaattaaatatttagtagtatctattttctgaaaaaaaaatacatttgaaggcaatcacattaagaaaatggatacaatttcaggtcagttaatcagaaagatgaactgagttgcccaaggtcacattctccaaatttgttactgtgggacaataggacaaaaccccacctgacattcagtttattagcagtagcaacagtagtgtttttggttttgcttttgtttttttcagacggagtttcgttcttattgcccaggctggagtgcaatggtgcgatcctggttcaccgcagtctccgcctcccaggttcaagggattctcctgcctcagcctcccgagtagtagggattacaggcatgtgccaacacacccagctaattttgtatttgtagtagagatggggtttctccatgttggtcaggctggtaacaaactcccgacctcaggtgatccgcctgcctaggcttcccaaagtgctgggattacaggcatgagccaccatgcctggcccaatgctagtatttttaaaagcccctgaacactgtattgtccaggg

SEQ ID NO: 690872 - DNA, 606 bp, Homo sapiens
tcctctttagactttaagttctccaagagatcaaggccaagagtatctctcctcattgtctaacatcgcctaatatataacgggagtttaatgtctacctgttgaattcataagtaaataagtaggcatgagactagggtgaggcacctagggcaattggtggtgttcactctcaggattttacgagtgcagggayggcacagggtcaacccctgagagtggaatcttctgacatgttgttctgtaggcactctgcttgttttgtctctgtttctgccctaaatcatcatcaaatcacccttagcactcacctgactttgaatctcatttccagtttcctgcttcataacaaaaagtgagcccttatcttatttcccttggccagagcccctagtccagtggacaagttcatttagaataggggccattctaattaagtgtcttttgattgcaaccaatataaatccccttgagcaagttctggtagtcatgtggtcattgtaagtacaaaacaatttgatgactatacagcaaaataactaaaatacagtggtctcaccatagaaatggaataatgaaagtttgtgctaacttctccattttcta

SEQ ID NO: 690873 - DNA, 1466 bp, Homo sapiens
ttgcatggagaaacatataaaaggagttgaaataaaaataaaatgaattcatgaactacatattattctcatgccactctctctcctgctccggcaccacctatttttgttttgttttgtattgttttgttctgtcagcatacaatattcctccctcaggatctctatgctagttgttctctatttctggaatactagtaaacaccatatgtttgcctagttgtttttttctaatcatttggcatgaatgttactttctccagtgaccaagatgcctttcctgaatactatttgtaatgtagtcccacctcaccatcttccatatcaccttgctttattacttccaaactacttttcatgctctaaaattattttgcaatccacttcgttgtttattggctctgatctgacaagaatgtaagttctaggagggcagaaaccctgtcttattttctactgaatctccagcacctagtatagaaccagctcaaagtactcagtaaatcagaatggagaggtcatggaaggattcccaaagtgggtgatatttaaaatgagtctgggagaatgaatggaatgtagccagatggagaaatgaggataaagcagtggcaaaatatttatgaagtcataaacctcacagtgtcatgaaccaacataatacaatggtgaatttatatagatacagatacagatatatgtatatagatagatagatatagtatctagcatatcactagaacatggaaaacagggaagtgctacatggtgaagcaaaaaaaaaaaattaagcaaatgcaagaaaattagggctgtatgttctacaatacatattaagagttttcttgaaaactgtaggctttaaaatgaaaaatcttccctgaaaaatgaaagactttaacctggaagtgacattatcagctttgtatttcagaagtcttgagcaattttgtagaaaaaatagactcttttcattacatgtttaagactttagtaaattttttaacattcattattttaaatcactgacacatactygaataactcacattcctaaatatatacataaaatgtcagtagatctgattcagccaaaattctttaaatcagcaaataattcactttgcatatagacactatacaaaaagaatttgttatttatcgacatttaaggacaatggcaaacttgtgtgtctttaatcacaacttaaacattcacactattgaattaaatgccctgatgttataataattatgcagattgtgacatacgaggctgccgtgtacaaaatttgaatttaaaatactcttttcatcgatatatagttaaattacttgcctgacttcaagaaatatttcctttttctcatttttgcttttgggaatgccagcctcaaaaattttctagttcctcaaatttttgttgaactgcattaaccattttaggattttgtaaaaatatataa

SEQ ID NO: 690874 - DNA, 653 bp, Homo sapiens
tacacatatgtacttgtacatgtacatacatgttggtattcagccagcttagtgaaytttattattagtcataatactgaattaattctcacggttttttttaatatagatgtttacacaataatatcaaaacattccttcctagaagcaatgaatcccagaccgacctagctgttttgtaaacggtagtaatattcaagactaatagggaggtagaaaaagaaatcagactttcaaacaatattttaaaaatattatccagccactataaagaaagggcttatatcagagccaattgttgattggattgctgattcattttaaacaaaataacttcacgagatggaaaagtggctttaaaaagatttttgtgtattcactatagattcaatatggtactaataatgccagcccaggtgaacctcaaaaaaataactaatattaggagaagggtcctaatactactattttttttttctttgagacggagtctcgctctgccgcccaggctggagtgcagttgcacgacctcagctcactgcaagctccgcctcccaggttcatgccattctcctgcctcagcctcccgagtagactacttctaatactagttcttcatcaaccacatgtcaagatagaagcaatgagaagtt

SEQ ID NO: 690875 - DNA, 1675 bp, Homo sapiens
ccttgagggaaggtcaaaataagctcacaatttttctcatctcacaaaatatccttctaaacttccaactcccaagaaaaaggtattcttttgacttccccatttctgtccacataactatttgcactctccatcacacactcttgaaaacttgaggctttctttgacaccactctttttctttccccttctattaggtcaatggctagtccttttgggatgtggtccagagtagtcaaaggggcttggcttttggagtcctccatagctgggtacaaagtccagctctaccattcacaaaacatgtgatctttaacagggtattgcattgatccgggtctcagtttcacaatcagtaaaataagactaatcttacctaccttataatatcactgtgggttaaataaataaaatactgtaaggaaagcccctagcacaaggctgcatatagtgaaatctcaggaaccataagcttttattttctacttctgacaggtatttcacatccattgtctcatttctctgacacagcctagagtgacaataaaaacctctgtcttccattgttttcctccccaatccattatatgcccagctgtcagaaggctcttcctaggaacagttccaatcccttcattgagtagattggaaatctttaatgactcttccaatgccaacccaataaagaaagtatggaccctttagcttggcatttcatttttcagattagctccccctcctccctttctgtgaaagtctctgaccttctctaactggatgtgtcaccaattcccccaaaactgtccatgtctgtgcttttctttacacggttctctccacctagaaggcactagccccctccttcctttctatccacattctacccatccttccgtgttcaattttattttggttcacccatgatgtttttccaaatcaccagctgaaatcaactttctttctgaatttccacaggacattttagcacctctcatagggtataggtcaccttctatattacagtggcattatcagtgtaacggcctcaattctttcatgatacaaagcagaacataaatatattcaagtcctagatgtggcctgaggccttaaaatggctgagagttacaagaaccctttccttcatagcttatagataaaataccatgtttgggatcataagaccccaccattgtggctacaaatgattgaatagggctttgtacctgaggcaaagacatccactttataggtaggttctctttctagaaaagtctgaatttgagccatatcaaaagagagtagttggaagaactagaatttgaaagaygctaagaagccacatgagacaccagtaaatggacaccttgaggcagaagctggaagtgagcaagaccaagaggtcgagcagaaagtagagagagtggaaagtcagcagtagtagtagacatagactccgtctctcaaaagcaacaacaaaagcaaaggcaccagaaaatcaataataaaacttgttgctgagacctggaatcatgtaatgccctgaacaaacttccagatctccgctgggcaggcttttcaactgatgttgactttctgtgctttttaaatagctaagtaccactacagtaaacacccatcaccttggacaagcaagtctttgttctgaacagtc

SEQ ID NO: 690876 - DNA, 1675 bp, Homo sapiens
ccttgagggaaggtcaaaataagctcacaatttttctcatctcacaaaatatccttctaaacttccaactcccaagaaaaaggtattcttttgacttccccatttctgtccacataactatttgcactctccatcacacactcttgaaaacttgaggctttctttgacaccactctttttctttccccttctattaggtcaatggctagtccttttgggatgtggtccagagtagtcaaaggggcttggcttttggagtcctccatagctgggtacaaagtccagctctaccattcacaaaacatgtgatctttaacagggtattgcattgatccgggtctcagtttcacaatcagtaaaataagactaatcttacctaccttataatatcactgtgggttaaataaataaaatactgtaaggaaagcccctagcacaaggctgcatatagtgaaatctcaggaaccataagcttttattttctacttctgacaggtatttcacatccattgtctcatttctctgacacagcctagagtgacaataaaaacctctgtcttccattgttttcctccccaatccattatatgcccagctgtcagaaggctcttcctaggaacagttccaatcccttcattgagtagattggaaatctttaatgactcttccaatgccaacccaataaagaaagtatggaccctttagcttggcatttcatttttcagattagctccccctcctccctttctgtgaaagtctctgaccttctctaactggatgtgtcaccaattcccccaaaactgtccatgtctgtgcttttctttacacggttctctccacctagaaggcactagccccctccttcctttctatccacattctacccatccttccgtgttcaattttattttggttcacccatgatgtttttccaaatcaccagctgaaatcaactttctttctgaatttccacaggacattttagcacctctcatagggtataggtcaccttctatattacagtggcattatcagtgtaacggcctcaattctttcatgatacaaagcagaacataaatatattcaagtcctagatgtggcctgaggccttaaaatggctgagagttacaagaaccctttccttcatagcttatagataaaataccatgtttgggatcataagaccccaccattgtggctacaaatgattgaatagggctttgtacctgaggcaaagacatccactttataggtaggttctctttctagaaaagtctgaatttgagccatatcaaaagagagtagttggaagaactagaatttgaaagatgctaagaagccacatgagacaccagtaaatggacaccttgaggcagaagctggaagtgagcaagaccaagaggtcgagcagaaagtagagagagtggaaagtcagcagtagtagtagacatagactccgtctctcaaaagcaacaacaaaagcaaaggcaccagaaaatcaataayaaaacttgttgctgagacctggaatcatgtaatgccctgaacaaacttccagatctccgctgggcaggcttttcaactgatgttgactttctgtgctttttaaatagctaagtaccactacagtaaacacccatcaccttggacaagcaagtctttgttctgaacagtc

SEQ ID NO: 690877 - DNA, 1934 bp, Homo sapiens
atccgaatacctttctatgcttttgaacattccttctctctgaccttaaacatgcgcttaaatatatcaactcctttcatctgaaggtgtgcccgcacatggcctttctaayattacctccaatttgggggggcagaggataaacggacaagctgaggaattatagagccacctaaaagggaggctacttcaaggttaaaacatggcatgcccaaacgcttgctgtacacaaaggctatttataatagttctgattttaaacttggatttataatgaagttcaaggcagaaagagcaaaattccatactgaagaaaaattacagctggaaaaatcatttgaaaaaaaaaaagaaaaaaaaaaaaaacaagaaagccttccaagtggttactcaatttgggaatttagagaagatggcagtttgtgtccaagaagaaactacttttggggaaatggaagagtggaaagtcttgccttcagtctatttttgtagccctgcctccagccatgcacataactgagtcaaggaagggcattcctccccacagcttccaaaaaggcgcatgtgaacagaggcacctggtcacactatggtgagccgagtgcaaaagcttcaggcagcgaagggcagtgggaggggagatattaacttgcctctggcctttggtgcccagcaaacctgtgccctgcctgcctgtccagcctgcctgtgcctctccaatctgtgttccagcatctagctccaggtcactcaggagttgcgtgtgtagagggggtgggacaaggtgatgtgatggatagaaactctcttcctcttcctctcttactttgtcttaagtgggaaggagttttgggcttgcggggaatcgttgctcagcatgcttgcttgtgctctgtaggttaaagcgtttaactatagggtggcaggtggtatctatctatgtacccacttcttacctctctctagcagatgagcctccagagcacagcactcatttactctgagcaaagactcaactccagaatccttcccaatccagcagtccaggctgtcattactaatcagaatgggcaagtggtttgcaactcatttgccaaggtagagaaaagaagagcaggaagaaagaggaaagtaacattttctgagcaccaatcatatgccaaatagtggcatgtcaagcgggtggggaagtcagcctcgatggggaggggacaggttatcactggcattgcatagtgaatataaaatgacttcgatcatctttacactgggctcaatactccatggacaatgcaccctcattgccactcccactgtcccctccgccttcctgactgcaccaccaggaccaagaacagctggtggccctttcacagggcttgcctttcccaacagcctggtggtgtggcaaggacttggaaccatccctcttatactgttaaatcccctgttgaggtcagactgtgcctcagtttcctcacttgtaaagtgaagataacaaagctgtacctttcctagagggctgtagtgagggctagtgcttctgcaattgtgagagggcacaaaacctggcatataggaagaactgttaaatgtcaattttcccttaagttaccagctgaactgggctgcccctacctgagttttaagatcattacaataataataataaccaattgtaatataccacataggattgtctggtttagaaaaacagacaggatactcagtcaaatttgaatttcagataagaaatgagtaatttttagtatgagtatttcccaaacattgcatggaacatagttatactaaaaatttatttatttttaatctgaaattcaagtttaactgagtgtcctatattttatctggcaacactaacatcaaatcttaaggtgtgtggaataaacaaaggcataactctttggaaataa

SEQ ID NO: 690878 - DNA, 1934 bp, Homo sapiens
atccgaatacctttctatgcttttgaacattccttctctctgaccttaaacatgcgcttaaatatatcaactcctttcatctgaaggtgtgcccgcacatggcctttctaatattacctccaatttgggggggcagaggataaacggacaagctgaggaattatagagccacctaaaagggaggctacttcaaggttaaaacatggcatgcccaaacgcttgctgtacacaaaggctatttataatagttctgattttaaacttggatttataatgaagttcaaggcagaaagagcaaaattccatactgaagaaaaattacagctggaaaaatcatttgaaaaaaaaaaagaaaaaaaaaaaaaacaagaaagccttccaagtggttactcaatttgggaatttagagaagatggcagtttgtgtccaagaagaaactacttttggggaaatggaagagtggaaagtcttgccttcagtctatttttgtagccctgcctccagccatgcacataactgagtcaaggaagggcattcctccccacagcttccaaaaaggcgcatgtgaacagaggcacctggtcacactatggtgagccgagtgcaaaagcttcaggcagcgaagggcagtgggaggggagatattaacttgcctctggcctttggtgcccagcaaacctgtgccctgcctgcctgtccagcctgcctgtgcctctccaatctgtgttccagcatctagctccaggtcactcaggagttgcgtgtgtagagggggtgggacaaggtgatgtgatggatagaaactctcttcctcttcctctcttactttgtcttaagtgggaaggagttttgggcttgcggggaatcgttgctcagcatgcttgcttgtgctctgtaggttaaagcgtttaactatagggtggcaggtggtatctatctaygtacccacttcttacctctctctagcagatgagcctccagagcacagcactcatttactctgagcaaagactcaactccagaatccttcccaatccagcagtccaggctgtcattactaatcagaatgggcaagtggtttgcaactcatttgccaaggtagagaaaagaagagcaggaagaaagaggaaagtaacattttctgagcaccaatcatatgccaaatagtggcatgtcaagcgggtggggaagtcagcctcgatggggaggggacaggttatcactggcattgcatagtgaatataaaatgacttcgatcatctttacactgggctcaatactccatggacaatgcaccctcattgccactcccactgtcccctccgccttcctgactgcaccaccaggaccaagaacagctggtggccctttcacagggcttgcctttcccaacagcctggtggtgtggcaaggacttggaaccatccctcttatactgttaaatcccctgttgaggtcagactgtgcctcagtttcctcacttgtaaagtgaagataacaaagctgtacctttcctagagggctgtagtgagggctagtgcttctgcaattgtgagagggcacaaaacctggcatataggaagaactgttaaatgtcaattttcccttaagttaccagctgaactgggctgcccctacctgagttttaagatcattacaataataataataaccaattgtaatataccacataggattgtctggtttagaaaaacagacaggatactcagtcaaatttgaatttcagataagaaatgagtaatttttagtatgagtatttcccaaacattgcatggaacatagttatactaaaaatttatttatttttaatctgaaattcaagtttaactgagtgtcctatattttatctggcaacactaacatcaaatcttaaggtgtgtggaataaacaaaggcataactctttggaaataa

SEQ ID NO: 690879 - DNA, 1812 bp, Homo sapiens
tttcagactttgtacagtcataaaaataattgaattgaaagatgatgccagagagttcacccaaaaatatggcacagacagccaaagtttaaagttatgtaagaacaattgagaaagatggagaataattggagaggctacaacttacagcacatggaagttgcagagaaggagagtaaataaaaaaataataaaagaatgatggttaagaactttccagaatggtagaaagaccaaactcttaggctgaaagtgtattctgagtgaagttgcagaatgtccaaataaagaaaatatttttttttaaattatactttaagttctagggtacgtgtgcacaacatgcaggtttgttacatatgtatacatgtgccatgttggtgtgctgcacccattaactggtcatttacattaggtatatctcctaatactrtccctccccccaagaaaatcttaaaggcaatcagagagaagaattagattatctaacaatgaagcacagttagactgatggtaattttctcatgagccacaatgaagtcagagatagtaataacaacagctaacacttaaatggtactatgtcccaagcataatgcaaagtacttcatgcatattaactaatttaatcttcacaacaattctgtgagatgggattcttattatcccctttttacagttgaggaaactgagccaaaaggaagtttaatggttcttgtccaaggtcttgcatctagtaagtagagaagctgggactcaaactgagctgatctggctccaaatgctcatacttactgctctgtaatgcttctcactgtagagaaatatgttcaaagtaatgagggaaaataaatgacaacctaagattttatttccagctaaattaagaaatgttttggtgcacgaaaattaaaagacatatattacccatagacattcattttaaaaattattaatgtatgtatttccacaagaagaaaaattaactaaaagggaaggcataggagtcaagaaacagtgaggacttgatcatctgtttggtaaacttaattatgaagtataaaaattattaatttttttcttttgtttctttctttttttcttttttctttttttttttttttttcttttttgagatggagtctgactctgtcacccaggctggagtgcagtggcactatctcagctcactgccactatctgagctcactgccacctctacctcctgggttcaagggattctcctgtctcagcctctcaagtagctgggattacaggcgtgtgccaccacacctggctaatttttgtatttttagtagagatggggtttcaccatgttggccagcctggtcttgaactcctggcctcaagtgatctgcccacctcggcctcccaaagtgctgggattacaggcatgagccaccaagcctggccaaaaattattaatttttaaagaagagataaaacttagctgacaataacaagataagtaagatgataattataatgtgtttatgtttcttttcatgatttaaatgagcacagaaatatggaatgacttcagatttattttgtgtgaattataaaggtaatagaaaactttatcaatgcagcagagtaaatggaaggaaaaaaggaaacaaagaaaatgaacggcaaatagaaagtgcaaaataaaatggtaggaattgcttcaagtagatcagtaattacaataaatgtaaatggaataaattcattgataaagatgtagggattatcagattaaagtttttaaaattctggggcatactgtcaaagccacatagcaaa

SEQ ID NO: 690880 - DNA, 1812 bp, Homo sapiens
tttcagactttgtacagtcataaaaataattgaattgaaagatgatgccagagagttcacccaaaaatatggcacagacagccaaagtttaaagttatgtaagaacaattgagaaagatggagaataattggagaggctacaacttacagcacatggaagttgcagagaaggagagtaaataaaaaaataataaaagaatgatggttaagaactttccagaatggtagaaagaccaaactcttaggctgaaagtgtattctgagtgaagttgcagaatgtccaaataaagaaaatatttttttttaaattatactttaagttctagggtacgtgtgcacaacatgcaggtttgttacatatgtatacatgtgccatgttggtgtgctgcacccattaactggtcatttacattaggtatatctcctaatactgtccctccccccaagaaaatcttaaaggcaatcagagagaagaattagattatctaacaatgaagcacagttagactgatggtaattttctcatgagccacaatgaagtcagagatagtaataacaacagctaacacttaaatggtactatgtcccaagcataatgcaaagtacttcatgcatattaactaatttaatcttcacaacaattctgtgagatgggattcttattatcccctttttacagttgaggaaactgagccaaaaggaagtttaatggttcttgtccaaggtcttgcatctagtaagtagagaagctgggactcaaactgagctgatctggctccaaatgctcatacttactgctctgtaatgcttctcactgtagagaaatatgttcaaagtaatgagggaaaataaatgacaacctaagattttatttccagctaaattaagaaatgttttggtgcacgaaaattaaaagacatatattacccatagacattcattttaaaaattattaatgtatgtatttccacaagaagaaaaattaactaaaagggaaggcataggagtcaagaaacagtgaggacttgatcatctgtttggtaaacttaattatgaagtataaaaattattaatttttttcttttgtttctttctttttttcttttttctttttttttttttttttcttttttgagatggagtctgactctgtcacccaggctggagtgcagtggcactatctcagctcactgccactatctgagctcactgccacctctacctcctgggttcaagggattctcctgtctcagcctctcaagtagctgggattacaggcgtgtgccaccacacctggctaatttttgtatttttagtagagatggggtttcaccatgttggccagcctggtcttgaactcctggcctcaagtgatctgcccacctcggcctcccaaagtgctgggattacaggcatgagccaccaagcctggccaaaaattattaatttttaaagaagagataaaacttagctgacaataacaagataagtaagatgataattataatgtgtttatgtttcttttcatgatttaaatgagcacagaaatatggaatgacttcagatttattttgtgtgaattataaaggtaatagaaaactttatcaatgcagcagagtaaatggaaggaaaaaaggaaacaaagaaaatgaayggcaaatagaaagtgcaaaataaaatggtaggaattgcttcaagtagatcagtaattacaataaatgtaaatggaataaattcattgataaagatgtagggattatcagattaaagtttttaaaattctggggcatactgtcaaagccacatagcaaa

SEQ ID NO: 690881 - DNA, 1812 bp, Homo sapiens
tttcagactttgtacagtcataaaaataattgaattgaaagatgatgccagagagttcacccaaaaatatggcacagacagccaaagtttaaagttatgtaagaacaattgagaaagatggagaataattggagaggctacaacttacagcacatggaagttgcagagaaggagagtaaataaaaaaataataaaagaatgatggttaagaactttccagaatggtagaaagaccaaactcttaggctgaaagtgtattctgagtgaagttgcagaatgtccaaataaagaaaatatttttttttaaattatactttaagttctagggtacgtgtgcacaacatgcaggtttgttacatatgtatacatgtgccatgttggtgtgctgcacccattaactggtcatttacattaggtatatctcctaatactgtccctccccccaagaaaatcttaaaggcaatcagagagaagaattagattatctaacaatgaagcacagttagactgatggtaattttctcatgagccacaatgaagtcagagatagtaataacaacagctaacacttaaatggtactatgtcccaagcataatgcaaagtacttcatgcatattaactaatttaatcttcacaacaattctgtgagatgggattcttattatcccctttttacagttgaggaaactgagccaaaaggaagtttaatggttcttgtccaaggtcttgcatctagtaagtagagaagctgggactcaaactgagctgatctggctccaaatgctcatacttactgctctgtaatgcttctcactgtagagaaatatgttcaaagtaatgagggaaaataaatgacaacctaagattttatttccagctaaattaagaaatgttttggtgcacgaaaattaaaagacatatattacccatagacattcattttaaaaattattaatgtatgtatttccacaagaagaaaaattaactaaaagggaaggcataggagtcaagaaacagtgaggacttgatcatctgtttggtaaacttaattatgaagtataaaaattattaatttttttcttttgtttctttctttttttcttttttctttttttttttttttttcttttttgagatggagtctgactctgtcacccaggctggagtgcagtggcactatctcagctcactgccactatctgagctcactgccacctctacctcctgggttcaagggattctcctgtctcagcctctcaagtagctgggattacaggcgtgtgccaccacacctggctaatttttgtatttttagtagagatggggtttcaccatgttggccagcctggtcttgaactcctggcctcaagtgatctgcccacctcggcctcccaaagtgctgggattacaggcatgagccaccaagcctggccaaaaattattaatttttaaagaagagataaaacttagctgacaataacaagataagtaagatgataattataatgtgtttatgtttcttttcatgatttaaatgagcacagaaatatggaatgacttcagatttattttgtgtgaattataaaggtaatagaaaactttatcaatgcagcagagtaaatggaaggaaaaaaggaaacaaagaaaatgaacggcaaatagaaagtgcaaaataaaatggtaggaattgcttcaagtagatcagtaattacaataaatgtaaatggaataaattcattgataaagakgtagggattatcagattaaagtttttaaaattctggggcatactgtcaaagccacatagcaaa

SEQ ID NO: 690882 - DNA, 3316 bp, Homo sapiens
aacttgggaggggatcacaggcttcggttcaaggccttgggtgggcaggggaagggtgtaggtgaaatgaattcgcataaagcttcaccgaacagcctggagatcgtgaggtttcacttgccatgttcacatacacacagtcatctacatatgtggtgtgatgaattgttgtaaaacagaaagaaaatagagaaataagagttaatccaggagtggagctaactcccaggtatagtgtataaaggaagagaaaaaactacacaattagccttctcaggtgagatctttcttggtactcctggatttcgaataatatgcaggggttaaaaaaaataatatgggctttttttttgggccattagggctgttacattatcatggaaattatatttctaaactactagaaaaaaatgtaatcataaaaatgaacattgtgtttaacaggtgctacttattgttctgagcactttatacaagaaccctgtgtcaggtatcattgctatttgcattctacagctgggaaaaccaagacatagtgaatctgagaaactgcctaaggacaagctcatcggcaagcggcagagcagtttttaatcaaggcccactttttaaccactggaaagaaaagagggaaggttctgatttcatgctcactgggacacttcctggacacattcagcttcttacccattattcagaaggagaagtagaaacctgtagaagtagccctggggagggtagtttctgataaaggatgtctccatttggaaattaattagtaatctggtctatatgctgaaagtgtgtgtataatatatatatatatatgtatatataaatatgtatatattcataaattcatgcatatatttatgagaaatcataccaggaaatccatcgcccctgggtgcacacttgaaatcatcttttgagagcttatcaaatcaaccccaagatggaaggccagcttgagggacccctcaagaatgaccagttgtaactctctatgacatcttttatggtcatttttctctgtaacttctgcggcctatcactttaaaatctgaaaatttaatccgagtggccataagaacatggaactgcatacatttggaaaatatgagacaatgaaaaattaagtttcattataaaccactaccaggaagaatggtttagactaggcttggcaaatcctggacatatagtgctccattcccccctcccataccattctcactgtcattgctaaagaccatgacacttttcaactcagaaggaactttggaatcttgaagatattactccaggcacactagcagttggttttaccccccaagatcaaacccttttcttttactttcttactttcttttctttctttcttttttaatttttttttttagagacaactctccctttgtcatccaagctatagtgcagtggtgccatcatggctcactgcagccccaacctcctgggctcaagtgatcctcccacctcagcctcccaagtagctgggaccacaggcacgtgccaccatgccctgctagtttttaaattttttctagagatgaggtctcactatggtgcccaggctgttctcaaactcctgacctcaagtgatcctcccacctcggcctcccaaagtgctgggattacaggtgcgagccacttggtccccttttctatctctagttggacagtaagtgagacagagaagagggctgatcaggaagcaaaaatattggtgttggctggtgccattggggaatatttcatgaagaaaggaacatgaattgggccttgaacgatttggagaggtggtgagagggcacagatcattccagacagggcagtggcatgggtggaacaggaatgatcatagcagatatctgttggggaggaacatgtgtgtggtgggggagaagaggaatacgagacaatgaaatacccaccttgctagggtgaagaggatccactgattgctaaatttagatgggctgagactgtaaagagcctcgggaacctcaagggctaactgcttcatgtcctcacatgcctgttgactacttttctcatgatgattaaacagcttaagaaaaagaaactcagtatcttgggcatggggtaatttcttatgcatgacaatggttttcagcattgagctaaacttccaggatatgccatttcggcaaccacatgatctttctctttaggagcaagcctcttttgcagtcaacatatcctggaaactttgttctttggataggcaggtggaaaacattagaaagctttctgaactcaaagttgggcctgtcctagttaaccagccggctcacttgggctttttgattagtttgaattcctttatatatcttgacagggaaatctaaggggggaaggaggtctgtcttcaaagctcttttcttgtagatccccccatgaagyttggcgttctcaaggactcctcctggcaatgaacctacagcgaagaccatgccttgtgattcagcagaattactttgcccattttgcttcctatttttttttcccatgacatatttctagagttgtctatgatgattgaatgccacaattaaaatggacatattccatttgactttaataaaagtcatctctacaaaaacctctttggctatcttctaaaggtatttaacattatgatttggacttgcttattacattacataccatcatattggccgtaattacttttttaaatgggctcagctccatatcttttattggctaattatatgtgcttagcataacgcagatgagcagatctcagaagggcaattatgggaaataagagtaataatcacaaacatcagctgatgtgatagaatgccatctggttctgtgtatatggaagatattccatttctctcacaaacttacaacctgtgtgttgcctggtttgcagatgagtttctagggtaacctgtggacctacagtttaggaggaaacacttctctggtttgtgtgcttttggggagagagagagtatctcagggaaattagcattaaatcaattattgaagttggcgcacattttgtgaaagtttaccacactgatttgtggtcagcatgttcttctttagtagggagaaaaaaagaacttcattgttactgtgtttataatggtcacgagacctatatcttatgacaattacacatatttttatgtttctatgatctccattcttgcataaacagggtggattattcccagggaattttttggtggtggctgttgctatttcgaaggttgccatgtctttgttctttctt

SEQ ID NO: 690883 - DNA, 1297 bp, Homo sapiens
gcaattctttgctcagtatcacaggaaccaagattaccggtccagagctccagctctgttgatcttctaggttaaagaatccattccaacacagaattcccagtaacaatactgtacccctcaaggacttaaactaatgaaaagtaaataaataagtggatttgttctcttgtaaaacaaaacaaaataaaaaatcctgcacagagatgtttataccagctttcttcataatcaccaaaaattggaagaaaccaagatgtcctttaataagtgaatggataaaataattttggcacatccatacagtgggatattattcagcaataaaaaraaatgagctgtcaagccataaaaagacatgaataaaacttaaatgcataaatgaatattgctaagtgaaagaaactagtctaaaaaggctacataatatgtgattctaattatctaacatttctaaaaaggcaaagctctagagacagtaaaaagattggataccttcaggtactggaaaacctgaggttttggcactggatcagaaccccagcatactgcaatagccctgtggaaaagtggccagagtctttgttacatgggtccctgatctcacatttcctcactggacaggttctcctggcctgggtctccagccaccccacactggactatcgagccagtagtagctcttcagcttcctgagacagagctcccaatggaaggggcaggttgccatctttgctgtcttccagccctcacccttgctgtgtccaggctctggagcatccatgaaaccaggtgttggtccagacccccagaggagcacctacctcatgtaaaagtgtcttgtctgttctccatgaaggtcctggtccttacttctcactgggcagggccgcctgacctgggactccagtacaaccaccatgcccccacttgactgcttcaatcagggatagcctagcagttaaaggaacacatacaagcagagatgagaatgaacaaatgcaagaactccaacaactcaaatgaccagggtgtcttatgttctccaaatgactacgctaattctccaacaaggattcttaactagactgagtcggctgaaatgacagaaatagaattcagaatacagatagaaacaaagatcataaaggctcaggggaaaagcaaaacccaatttaaggaaactaagaattacaagaaaacaatacaggagctgatagacaaaataacagctataaaaaggaacctaattgatccaatagagctgaaaaatacactacaagaatttcaccatgca

SEQ ID NO: 690884 - DNA, 634 bp, Homo sapiens
tttcttactattaaagtgtaaatttaaaggtaagcaaagggaggaggctaggatgatccctattgtagtagattagagttggacacaccaacataaactcccgtttggcttaatatagatgcaaagagttttacatgtagatatgtttacagatgttcctgaactttgatattcagataatcccatcataaattaaaaatattgtaagtcaaaagtgcattttcgactaaggtattttcagcttataatgggtttatccagatatagccccactgtaagttggggagcatactgaatgtgcatgattttttgcaccatgatatagttaaaaaatcatcataagtcagggactgtctgtaaatacacaggtcagtatacacacatgtattcctttgccctgtcagctgagagggctaagagtaaatgatactctacaggcaacaagcacacgtcgcatccagattttggtgtttttttgtttttttgttttttttttgagacagagtctcgctctgtctcccaggctggagtgcagtagcgtgatctctgctcactgcaagctycgcctcccgggttcacggcattctcctgcctcagcctcctaagtatctgggactacaggcgcccgccacca

SEQ ID NO: 690885 - DNA, 324 bp, Homo sapiens
gtaattatcgatactgttgtttcccttattctggaccactgtttgacactccccaggctagttctaactttttaaatggtttctttagctctcattttaaatatcattcacgtgtgcttgcgcttgcacgtgctctctctcgctttcttgtgagttctctcgctcgctcgctcgctcttgctctctctctcttggcttcccatgtagattgagtttctttttttttttttatgtgttacctctacttctcatattgtatggyaaggcacatttttacttagctgcctttcctaacaaattctaaacttgtaaacacagagattg

SEQ ID NO: 690886 - DNA, 630 bp, Homo sapiens
tattggttaagagacgaaaagtatttggctgcagaagcttgccacttttcagcgttaagcttgtcctcaaggctgagtataattattccmagttgtgttcattgttattttatccataatgagttccagaacctctttttaatatttttaacctcgtctttatctctaaatgtacatttaaaaatatcttaatagtatacaattaaaaagtaaacattcattgccagcatataatatttaattataaatattgcaaattcttatgtctttcatttgacatttcagtagtattttgctttctgagtaaagagttaatgatttagcaggatcttaaaactctttttttcttttcttttttttttttttttgctctttaaccacatgaaaagtaaaatgaataaataagctatgcctaaaatagttaactgcatgcctggttttaaaggctgatggccaagcagttaatatcagcagaaatcccaggaaaggtaacaagttgcatatcaaattgtgggcatagaaaatcaaacgatgcaaagctaggcccccgctcccctccggccagcagcagcacacaattttatagtggttttcattttgaaaaaaacaggggactctcaaaaatcagaa

SEQ ID NO: 690887 - DNA, 630 bp, Homo sapiens
tattggttaagagacgaaaagtatttggctgcagaagcttgccacttttcagcgttaagcttgtcctcaaggctgagtataattattccaagttgtgttcattgttattttatccataatgagttccagaacctctttttaatatttttaacctcgtctttatctctaaatgtacatttaaaaatatcttaatagtatacaattaaaaagtaaacattcattgccagcatataatatttaattataaatattgcaaattcttatgtctttcatttgacatttcagtagtattttgctttctgagtaaagagttaatgatttagcaggatcttaaaactctttttttcttttcttttttttttttttttgctctttaacyacatgaaaagtaaaatgaataaataagctatgcctaaaatagttaactgcatgcctggttttaaaggctgatggccaagcagttaatatcagcagaaatcccaggaaaggtaacaagttgcatatcaaattgtgggcatagaaaatcaaacgatgcaaagctaggcccccgctcccctccggccagcagcagcacacaattttatagtggttttcattttgaaaaaaacaggggactctcaaaaatcagaa

SEQ ID NO: 690888 - DNA, 630 bp, Homo sapiens
tattggttaagagacgaaaagtatttggctgcagaagcttgccacttttcagcgttaagcttgtcctcaaggctgagtataattattccaagttgtgttcattgttattttatccataatgagttccagaacctctttttaatatttttaacctcgtctttatctctaaatgtacatttaaaaatatcttaatagtatacaattaaaaagtaaacattcattgccagcatataatatttaattataaatattgcaaattcttatgtctttcatttgacatttcagtagtattttgctttctgagtaaagagttaatgatttagcaggatcttaaaactctttttttcttttcttttttttttttttttgctctttaaccacatgaaaagtaaaatgaataaataagctatgcctaaaatagttaactgcatgcctggttttaaaggctgatggccaagcagttaatatcagcagaaatcccaggaaaggtaacaagttgcatatcaaattgtgggcatagaaaatcaaacgatgsaaagctaggcccccgctcccctccggccagcagcagcacacaattttatagtggttttcattttgaaaaaaacaggggactctcaaaaatcagaa

SEQ ID NO: 690889 - DNA, 630 bp, Homo sapiens
tattggttaagagacgaaaagtatttggctgcagaagcttgccacttttcagcgttaagcttgtcctcaaggctgagtataattattccaagttgtgttcattgttattttatccataatgagttccagaacctctttttaatatttttaacctcgtctttatctctaaatgtacatttaaaaatatcttaatagtatacaattaaaaagtaaacattcattgccagcatataatatttaattataaatattgcaaattcttatgtctttcatttgacatttcagtagtattttgctttctgagtaaagagttaatgatttagcaggatcttaaaactctttttttcttttcttttttttttttttttgctctttaaccacatgaaaagtaaaatgaataaataagctatgcctaaaatagttaactgcatgcctggttttaaaggctgatggccaagcagttaatatcagcagaaatcccaggaaaggtaacaagttgcatatcaaattgtgggcatagaaaatcaaacgatgcaaagctaggcccccgctccccyccggccagcagcagcacacaattttatagtggttttcattttgaaaaaaacaggggactctcaaaaatcagaa

SEQ ID NO: 690890 - DNA, 1873 bp, Homo sapiens
aggaattattggtgtccatatttagatataatgtatataaatgcccatttgagattagaatcataattttaatgtcagcatagtctttgtaattttcccactttttttatttactaggatgtagatacaaagaagacaaatagttgaattcatccagcatttgagtttcatcaggcaaggtaaacaagtcctgataggcaaaggatttaaaaggtttatgcaaagaagttgttagacgcagagccaaggaaagaaaggagatagtgaataatgaaaaactgcatttgaggttgttttaaagaattaatggaatggaagtaatagagttagtgagctggaatgatatcaggggtgatgagaggtcagattatagaactgtgtagttattactgataataagtttagaagggagaacatggaagcagaaatacattttaaaaacaaggctcagtataataactgagtacttgtataataactcagtataataactgagtactcagtataataactgagtacattgtacagttctaaaaataagccttaaatttagaacaaagacagtgatcatcgtaagctgaaatggaatggaaatattccatgagagaggtgagaattgagtggaatattggagacaggtaaagcatcagctaaagaaggatgctggagaaggcctggcggacttggcagcaccatttgcatagagtgcttcagcttagcgcttaagcccatgttgagcttccacactgtccaataaggagtttagggtttgatttatgtaaagtgggaatcactgaaaacattttagtaagaaagggatgttattaaaataatagaggaagattaactgacatgaggaatagtatgaaagattagtgggactgaaagcgaccagttaagatgctggtggaataacccattgtgatgaagcatttttaaaaacatgcatgtattagatgtatagaaataaaagatatgccttttattgacatctttgattggtgtgtcaggcataaaaaaagcagagggctcttaggaattttttcagcgtatgatgaaaagcatgtgatctgctggtgaccctggaacagtgaaagtccttggccgggcgcggtggctcacgcctgtcatccctgcattttgggaggccgaggtgcatggatcacaaggtcaggagttcgagacaagcccggtcaagatggtgaaacctcgtctctactaagaatacaaaaaaagccgagcatggtgaggggtgcctgtaatcccatctacttgggaggctgaggcagagaactgcttgaacctgggaggcggaggttgcagtgagccgagatcgtgccactgcactccagcctgagcgacasagagagattctgtctcaaaaaaaaaaaaaaaaagccttaatgtggccattttctggggcgcctcctgctggtttcactatgtctcattgctcatgatgttttctccacaaagttcttgaaggctgtttagaacatggtttggaagctagttgagcaaaaatgaaaagataactgggagggtctatggaaactgaataaaggtggtagctatggcagtaactttgccctcttcaaccaagtgttgtttgtctccacaattgcttttctaatatgggtattatccccaaaatacttaatggtgggcattgtctccaaaatacttgtttttaaagatgcaaggtgctgtagttgtattgaacctgtgagaatcaaatcagcctgctggtgctaactctgatggagggcggtgaggggacagaggtcataataacacagtcgccaattaagtgcttacaaattctggtttattatgaggctttcacacaccaacaatcatgcaaatatgttta

SEQ ID NO: 690891 - DNA, 1873 bp, Homo sapiens
aggaattattggtgtccatatttagatataatgtatataaatgcccatttgagattagaatcataattttaatgtcagcatagtctttgtaattttcccactttttttatttactaggatgtagatacaaagaagacaaatagttgaattcatccagcatttgagtttcatcaggcaaggtaaacaagtcctgataggcaaaggatttaaaaggtttatgcaaagaagttgttagacgcagagccaaggaaagaaaggagatagtgaataatgaaaaactgcatttgaggttgttttaaagaattaatggaatggaagtaatagagttagtgagctggaatgatatcaggggtgatgagaggtcagattatagaactgtgtagttattactgataataagtttagaagggagaacatggaagcagaaatacattttaaaaacaaggctcagtataataactgagtacttgtataataactcagtataataactgagtactcagtataataactgagtacattgtacagttctaaaaataagccttaaatttagaacaaagacagtgatcatcgtaagctgaaatggaatggaaatattccatgagagaggtgagaattgagtggaatattggagacaggtaaagcatcagctaaagaaggatgctggagaaggcctggcggacttggcagcaccatttgcatagagtgcttcagcttagcgcttaagcccatgttgagcttccacactgtccaataaggagtttagggtttgatttatgtaaagtgggaatcactgaaaacattttagtaagaaagggatgttattaaaataatagaggaagattaactgacatgaggaatagtatgaaagattagtgggactgaaagcgaccagttaagatgctggtggaataacccattgtgatgaagcatttttaaaaacatgcatgtattagatgtatagaaataaaagatatgccttttattgacatctttgattggtgtgtcaggcataaaaaaagcagagggctcttaggaattttttcagcgtatgatgaaaagcatgtgatctgctggtgaccctggaacagtgaaagtccttggccgggcgcggtggctcacgcctgtcatccctgcattttgggaggccgaggtgcatggatcacaaggtcaggagttcgagacaagcccggtcaagatggtgaaacctcgtctctactaagaatacaaaaaaagccgagcatggtgaggggtgcctgtaatcccatctacttgggaggctgaggcagagaactgcttgaacctgggaggcggaggttgcagtgagccgagatcgtgccactgcactccagcctgagcgacagagagagattctgtctcaaaaaaaaaaaaaaaaagccttaatgtggccattttctggggcgcctcctgctggtttcastatgtctcattgctcatgatgttttctccacaaagttcttgaaggctgtttagaacatggtttggaagctagttgagcaaaaatgaaaagataactgggagggtctatggaaactgaataaaggtggtagctatggcagtaactttgccctcttcaaccaagtgttgtttgtctccacaattgcttttctaatatgggtattatccccaaaatacttaatggtgggcattgtctccaaaatacttgtttttaaagatgcaaggtgctgtagttgtattgaacctgtgagaatcaaatcagcctgctggtgctaactctgatggagggcggtgaggggacagaggtcataataacacagtcgccaattaagtgcttacaaattctggtttattatgaggctttcacacaccaacaatcatgcaaatatgttta

SEQ ID NO: 690892 - DNA, 1873 bp, Homo sapiens
aggaattattggtgtccatatttagatataatgtatataaatgcccatttgagattagaatcataattttaatgtcagcatagtctttgtaattttcccactttttttatttactaggatgtagatacaaagaagacaaatagttgaattcatccagcatttgagtttcatcaggcaaggtaaacaagtcctgataggcaaaggatttaaaaggtttatgcaaagaagttgttagacgcagagccaaggaaagaaaggagatagtgaataatgaaaaactgcatttgaggttgttttaaagaattaatggaatggaagtaatagagttagtgagctggaatgatatcaggggtgatgagaggtcagattatagaactgtgtagttattactgataataagtttagaagggagaacatggaagcagaaatacattttaaaaacaaggctcagtataataactgagtacttgtataataactcagtataataactgagtactcagtataataactgagtacattgtacagttctaaaaataagccttaaatttagaacaaagacagtgatcatcgtaagctgaaatggaatggaaatattccatgagagaggtgagaattgagtggaatattggagacaggtaaagcatcagctaaagaaggatgctggagaaggcctggcggacttggcagcaccatttgcatagagtgcttcagcttagcgcttaagcccatgttgagcttccacactgtccaataaggagtttagggtttgatttatgtaaagtgggaatcactgaaaacattttagtaagaaagggatgttattaaaataatagaggaagattaactgacatgaggaatagtatgaaagattagtgggactgaaagcgaccagttaagatgctggtggaataacccattgtgatgaagcatttttaaaaacatgcatgtattagatgtatagaaataaaagatatgccttttattgacatctttgattggtgtgtcaggcataaaaaaagcagagggctcttaggaattttttcagcgtatgatgaaaagcatgtgatctgctggtgaccctggaacagtgaaagtccttggccgggcgcggtggctcacgcctgtcatccctgcattttgggaggccgaggtgcatggatcacaaggtcaggagttcgagacaagcccggtcaagatggtgaaacctcgtctctactaagaatacaaaaaaagccgagcatggtgaggggtgcctgtaatcccatctacttgggaggctgaggcagagaactgcttgaacctgggaggcggaggttgcagtgagccgagatcgtgccactgcactccagcctgagcgacagagagagattctgtctcaaaaaaaaaaaaaaaaagccttaatgtggccattttctggggcgcctcctgctggtttcactatgtctcattgctcatgatrttttctccacaaagttcttgaaggctgtttagaacatggtttggaagctagttgagcaaaaatgaaaagataactgggagggtctatggaaactgaataaaggtggtagctatggcagtaactttgccctcttcaaccaagtgttgtttgtctccacaattgcttttctaatatgggtattatccccaaaatacttaatggtgggcattgtctccaaaatacttgtttttaaagatgcaaggtgctgtagttgtattgaacctgtgagaatcaaatcagcctgctggtgctaactctgatggagggcggtgaggggacagaggtcataataacacagtcgccaattaagtgcttacaaattctggtttattatgaggctttcacacaccaacaatcatgcaaatatgttta

SEQ ID NO: 690893 - DNA, 505 bp, Homo sapiens
tatttttagcaggccatgctctaccttggttaatgcctgtcaatgactgagtatggtggaagtactagygccaggccatttcttcacaagtggtaaatccctttaacaagcgtattttgtgttctaatcatcctgactgaagcttgctcaggcataccctacagtctgatctccctactactcaattttccttccttcactctttccttttataggtgtcagaactgtatttctatctgcaagctccttgtgttttctcttaaaccctgttccaatgatgttacccaggcatttctagcaaaaaatatttgcgggtttaattctttctgtgtctgattcttgaaaatcttaaacttagatgactctcaagttgactcacttggaaaactaaaatgttatccttcattcttctctctgccttttcttcagtgtctaactgatcccctaacaatgccaccttagaaacgctcactctcatcccttttctctactgcccagcagaatc

SEQ ID NO: 690894 - DNA, 505 bp, Homo sapiens
tatttttagcaggccatgctctaccttggttaatgcctgtcaatgactgagtatggtggaagtactagtgccaggccatttcttcacaagtggtaaatccctttaacaagcgtattttgtgttctaatcatcctgactgaarcttgctcaggcataccctacagtctgatctccctactactcaattttccttccttcactctttccttttataggtgtcagaactgtatttctatctgcaagctccttgtgttttctcttaaaccctgttccaatgatgttacccaggcatttctagcaaaaaatatttgcgggtttaattctttctgtgtctgattcttgaaaatcttaaacttagatgactctcaagttgactcacttggaaaactaaaatgttatccttcattcttctctctgccttttcttcagtgtctaactgatcccctaacaatgccaccttagaaacgctcactctcatcccttttctctactgcccagcagaatc

SEQ ID NO: 690895 - DNA, 505 bp, Homo sapiens
tatttttagcaggccatgctctaccttggttaatgcctgtcaatgactgagtatggtggaagtactagtgccaggccatttcttcacaagtggtaaatccctttaacaagcgtattttgtgttctaatcatcctgactgaagcttgctcaggcataccctacagtctgatctccctactactcaattttccttccttcactctttccttttataggtgtcagaactgtatttctatctgcaagctccttgtgttttctcttaaaccctgttccaatgatgttacccaggcatttctagcaaaaaatatttgcgggtttaattctttctgtgtctgattcttgaaaatcttaaacttagatgactctcaagttgactcacttggaaaactaaaatgttatccttcattcttcyctctgccttttcttcagtgtctaactgatcccctaacaatgccaccttagaaacgctcactctcatcccttttctctactgcccagcagaatc

SEQ ID NO: 690896 - DNA, 505 bp, Homo sapiens
tatttttagcaggccatgctctaccttggttaatgcctgtcaatgactgagtatggtggaagtactagtgccaggccatttcttcacaagtggtaaatccctttaacaagcgtattttgtgttctaatcatcctgactgaagcttgctcaggcataccctacagtctgatctccctactactcaattttccttccttcactctttccttttataggtgtcagaactgtatttctatctgcaagctccttgtgttttctcttaaaccctgttccaatgatgttacccaggcatttctagcaaaaaatatttgcgggtttaattctttctgtgtctgattcttgaaaatcttaaacttagatgactctcaagttgactcacttggaaaactaaaatgttatccttcattcttctctctrccttttcttcagtgtctaactgatcccctaacaatgccaccttagaaacgctcactctcatcccttttctctactgcccagcagaatc

SEQ ID NO: 690897 - DNA, 581 bp, Homo sapiens
ctgttttcacaacctctctgcattatgctgtgctaatttcaaaagtagcttttttgtttgtttttttcaaatcaaatatctgtattcttaactgagtttctctcagacctcagtactctatcctttaatggctgtgatcactatgttatgttaccatgactactatctgccatggttttaattttcacataatatttgctgttatgattatgaactagcagctggggagactaatttattacttggctattactgttaaaggtcatgtaactccaacgttctgctaaagcatttgatcacatcctgcgtgctctgccagaaagcctttcttctggcaactcctcaggcttctgtggaatttatcactttttcaaccagggaagttgaagccagtaggtacttatttctggtagctgccaataaagtatctgatttctcaaatgccctctgttcttatacccagcttttctttattcagtagttataagaaatgttgttcataaaaattcagctacctacatagtcaaccctcaactatctgtgrgagactaacttagttctaaatattacttgaaatctca

SEQ ID NO: 690898 - DNA, 594 bp, Homo sapiens
cctctcctggtctcagtttcctcatttccaatccctgccctttccacttcaactataaaaaactgacatggtttaagctgaacagagaccttagcaattcccaatgcagtccgagaaatggctgctttcactgacccaccagaggtgaaaaaagtgtacgaggtaattagtatgcaggggtgaccgcagactactgctaaacaaagtagactcaaaaataagactcctcattagatgatttaggtaagctaagattgggagagaccgcaggcagggactgggatggcctcttactcagaacgttaatatttttcccttattattcacctatctgagatccaaacaggtgagcaaawgactcttgtaaaaggctcttgtcagccttctctttccgggagtatggcagacaaaacaccctgaagggtccttgccatgaaaacatctaaaatactggggaaaaaatgaaatttatatttataaaagtattgtcaaactagcacaattatttaaaacacacacacacacacacacacacacacacacacacacaggcaaaagataaagtgaaagcaagaattctggggctgaatgact

SEQ ID NO: 690899 - DNA, 632 bp, Homo sapiens
ataataattgcacaatactgtaaacttaccaaaactcattgaattgtatgtttaaaatgggtaagttttatggcatgtgcagaatacctcaataacagtgttttttaagctggtcttgggttattgctggaaaagtaactagcagaaggaatgcaagtcctctccggaggaatataacttcactaagaattcccatagacaaayttacacataaaatgagcagctcacagtaaaaaatcacaaaacacacaagaaatcaagacattatgagtgagaactagcagaaatgtagacagcagatcagtccaggaaaggcttcaaataatggaattagttcacataaaataaataataactacattactaactatattaattataactatgaagtaaaaggtatacttggaaatatgtgcaagcaactaaagggtctaaatacaaccagcatatttagaagaatcagagagatattccagaaataaaatgtacatataataactgaaattgaaattttaattgattgctctaaatagtaaattaaatatagctgaggacagaattagaaaactggaaggtatagctaaagaaattaatgaaaagttggggcagaaaaaaaagtttacaagatatgt

SEQ ID NO: 690900 - DNA, 632 bp, Homo sapiens
ataataattgcacaatactgtaaacttaccaaaactcattgaattgtatgtttaaaatgggtaagttttatggcatgtgcagaatacctcaataacagtgttttttaagctggtcttgggttattgctggaaaagtaactagcagaaggaatgcaagtcctctccggaggaatataacttcactaagaattcccatagacaaacttacacataaaatgagcagctcacagtaaaaaatcacaaaacacacaagaaatcaagacattatgagtgagaactagcagaaatgtagacagcagatcagtccaggaaaggcttcaaataatggaattagttcacataaaataaataataactacattactaactatattaattataactatgaagtaaaaggtatacttggaaatatgtgcaagcaactaaagggtctaaatacaaccagcatatttagaagaatcagagagatattccagaaataaaatgtacatataataactgaaattgaaattttaattgattgytctaaatagtaaattaaatatagctgaggacagaattagaaaactggaaggtatagctaaagaaattaatgaaaagttggggcagaaaaaaaagtttacaagatatgt

SEQ ID NO: 690901 - DNA, 976 bp, Homo sapiens
aatgaatggcagggtgatatggttaggccttgtgtccctaccaaaatctcattttgaattataattcccataatccctgtattccccacatgtcaagggaaagaccaggtggaggtagttggatcatgggggtggtttcccccatgctattctcatgatagtgagtgaattatcatgagatctgatggttttataagtgtttgatagttcgtcctgtgttcattctccttcctgctgccttgtgaagaaggctcttcgcttcccctttgctttttgccatgattgtgtttcctggggcctccccagccatgctgaactgtaagtcagttaaatctctttcctttataaattacccagtctcaggcagttctttatagcagtgcaaaaacagaccctactaatatacaggacaaataagaaatataaatagaaaataataaaaaatcattttcaactgaatgtaaaaatggcctagcaaaactctgcaatttggctaaatctttacagtgaaatgtgtatcatcataagaaaaccctagaaaaggagggagacttaaaaaattaatcatgtaagtatgtacacaaaaaatcagaaaaaagtagcaaactcaaagcaaagaaactagacaaattatataacaaatctgccaaaattaatgaaagaaaaaaacaaatctacatagaaaattgtgcttcccacagaaaagcagcaatcccaaaatctaagaaaaatataattcatcaaaattgtaaaargacgtgaatactttgaacagtctgataagtaatatagaaactatgactgtgattttgaaaaaaaaatctaaagacgtatttagaacaaaatccctctctggtaaatatatatacaatattaaaatagttaagaaataacaccaattttcaaaaaactccttcagagaatatataaaaaaagggactttcctgccgggtgaggtggctcacagctgtaatct

SEQ ID NO: 690902 - DNA, 730 bp, Homo sapiens
gcatgaatttttgtggtaaatttgctgtctttctgagctctagtaacttcaaattatcatcactcttttatatttgaaagaagcttttgctcagttataatttttcaatgtcatatttaatgaatgaaacaaaacaattttattttttaaagttgtttatctagtcagtcaagcaaacattaaacctgtgtcctgaagtactagagtgttgaaaatacagaaatgttagatgttttaagtgagagatagttgcataaatgtcccaagatgaaattttattggggggagttgtttatatgcctcaaattgtccgaatgctataccatgcttaaattcatgcttaaatttatgactaaatatattacaaaaatgtgtttgaataatttatctagaaaaaatagctgcttggcacagtggctaatgtcwgtaatcccagcactttgggaagccaaggaggacaaatcacctggggttaggagtttgagaccagcctagccaacatggtgaaaccccgtctctactaaaaatacaaaaagttagccaggcatggtggtgcatgcctatagttccagccacttggaaggctgaggcaggagaattgcttgaacccaggaggtggaggttgcagtgagctgagactgcaacattgcaccccagcctgggcgacaaagccggacaccttctcaaaaaaaaaaaaaaaaaaatcactacttggttaataaattaatca

SEQ ID NO: 690903 - DNA, 730 bp, Homo sapiens
gcatgaatttttgtggtaaatttgctgtctttctgagctctagtaacttcaaattatcatcactcttttatatttgaaagaagcttttgctcagttataatttttcaatgtcatatttaatgaatgaaacaaaacaattttattttttaaagttgtttatctagtcagtcaagcaaacattaaacctgtgtcctgaagtactagagtgttgaaaatacagaaatgttagatgttttaagtgagagatagttgcataaatgtcccaagatgaaattttattggggggagttgtttatatgcctcaaattgtccgaatgctataccatgcttaaattcatgcttaaatttatgactaaatatattacaaaaatgtgtttgaataatttatctagaaaaaatagctgcttggcacagtggctaatgtctgtaatcccagcactttgggaagccaaggaggacaaatcacctggggttaggagtttgagaccagcctagccaacatggtgaaacccygtctctactaaaaatacaaaaagttagccaggcatggtggtgcatgcctatagttccagccacttggaaggctgaggcaggagaattgcttgaacccaggaggtggaggttgcagtgagctgagactgcaacattgcaccccagcctgggcgacaaagccggacaccttctcaaaaaaaaaaaaaaaaaaatcactacttggttaataaattaatca

SEQ ID NO: 690904 - DNA, 572 bp, Homo sapiens
  misc_feature 2, 3, 4, 5, 6, 7, 8, 9, 10, 11, 12, 13, 14, 15, 16, 17, 18,19, 20, 21, 22, 23, 24, 25, 26, 27, 28, 29, 30, 31, 32,33, 34, 35, 36, 37, 38, 39, 40, 41, 42, 43, 44, 45, 46,47, 48, 49, 50, 51, 52, 53, 54, 55, 56, 57, 58, 59, 60,61: n = A,T,C or G
  misc_feature 62, 63, 64, 65, 66, 67, 68, 69, 70, 71, 72, 73, 74, 75, 76,77, 78, 79, 80, 81, 82, 83, 84, 85, 86, 87, 88, 89, 90,91, 92, 93, 94, 95, 96, 97, 98, 99, 100, 101: n = A,T,C or G
tnnnnnnnnnnnnnnnnnnnnnnnnnnnnnnnnnnnnnnnnnnnnnnnnnnnnnnnnnnnnnnnnnnnnnnnnnnnnnnnnnnnnnnnnnnnnnnnnnnnntaagcagataaaacttcacatggcattgtcctygccccccaagcttggcacaaactccagctcctagaacaattttccctggctctcttcacctggatggttgctactcgtccttccagtccccatttagatgtcacctcctctgggaagacatgctgacctcacaggtttgcttctagttgctcaagccgaaaaccctggagtcattcttaagtccttgtctttcacacagaaaattccatcagtcaagaatcatgccagctctacctccaaagtgttcctttccaatatacagtatagctgtatatagtctttttaagtgtctaactggattatttatggttttatttattgtgcttatttgttggtgtttattaactgtttccccccaaaaaatgtgtctcaagagagacagaacttcagtctgtttacggatactttccagaatctacagaggtttgtaagacatgg

SEQ ID NO: 690905 - DNA, 654 bp, Homo sapiens
atgaaatgcacaatttcactgcgaaaagtgaggtttcagttctttatattttttcactcattcttttttataagaaagacaccaactactgttttgtaattactattctcaacagcaattcaaaacagaaataaaattcttttttttttcttttatkttaggtacaggggtacatgtgcaggtttgctatacaggcaaattacgtttcacaggggtttggtgcacagattattttgtcactcaggtaattagcataagtaactgataggtagtttttcaatcctcactctcctcccaccctctaccctcaagtaggccctgttgtcttttgctcccttctttgtgtccatgtatatgtactcaatgtttagttcccacttataaatgagaacgtgcagtttttggttttctgttcttgcattagttcacttaggataatgatctccagctccatccatattgctgcaaataacatgatttcattctttttatggctacgtagtagtccatggtgtatatatgtaccacattttctttatccagtctaccattgatggccatttaggttgattccatgtttttgctgttgaaagtagtgctgtgatgaacatacacatacatgtatctttatggtagaacaatttatattctttg

SEQ ID NO: 690906 - DNA, 617 bp, Homo sapiens
tccattttcatactgcttataaagaactgtctgaaaccaggtaatttataaaggaaagggctctaattgactcacagttcagcatggctggggaggcctcaggaaacttgcaatcatggtggaaggagaagggcaagcaaggcgccttctttacaaggcagcaggaaggagaagtaccgagcttaggggaaagagccccttataaaaccatcacatttcatgagaactcactcactgtcacgagaacagcatgggggaaaccacccccatgatccaattacctccacttggtctctcccttgacacgtggggattatggggattataattcaaggtgagatttgggtggggagacaaagcctaaacatatcactaaatctcttatcactttaacaacccctaatctgctggtcataataacacaataaacccaatttcaaatttcactattatctgaaaaagcaaaactaacaataaggctwttataaaaccatgtgtgtataaaagcaacaaaaaagtatttcttatttaacatactaatcagccctagaagtctaattgcaaacagttttcagtctatctctttaggactaaatacaccctccttatttacaaca

SEQ ID NO: 690907 - DNA, 617 bp, Homo sapiens
tccattttcatactgcttataaagaactgtctgaaaccaggtaatttataaaggaaagggctctaattgactcacagttcagcatggctggggaggcctcaggaaacttgcaatcatggtggaaggagaagggcaagcaaggcgccttctttacaaggcagcaggaaggagaagtaccgagcttaggggaaagagccccttataaaaccatcacatttcatgagaactcactcactgtcacgagaacagcatgggggaaaccacccccatgatccaattacctccacttggtctctcccttgacacgtggggattatggggattataattcaaggtgagatttgggtggggagacaaagcctaaacatatcactaaatctcttatcactttaacaacccctaatctgctggtcataataacacaataaacccaatttcaaatttcactattatctgaaaaagcaaaactaacaataaggcttytataaaaccatgtgtgtataaaagcaacaaaaaagtatttcttatttaacatactaatcagccctagaagtctaattgcaaacagttttcagtctatctctttaggactaaatacaccctccttatttacaaca

SEQ ID NO: 690908 - DNA, 617 bp, Homo sapiens
tccattttcatactgcttataaagaactgtctgaaaccaggtaatttataaaggaaagggctctaattgactcacagttcagcatggctggggaggcctcaggaaacttgcaatcatggtggaaggagaagggcaagcaaggcgccttctttacaaggcagcaggaaggagaagtaccgagcttaggggaaagagccccttataaaaccatcacatttcatgagaactcactcactgtcacgagaacagcatgggggaaaccacccccatgatccaattacctccacttggtctctcccttgacacgtggggattatggggattataattcaaggtgagatttgggtggggagacaaagcctaaacatatcactaaatctcttatcactttaacaacccctaatctgctggtcataataacacaataaacccaatttcaaatttcactattatctgaaaaagcaaaactaacaataaggctttwataaaaccatgtgtgtataaaagcaacaaaaaagtatttcttatttaacatactaatcagccctagaagtctaattgcaaacagttttcagtctatctctttaggactaaatacaccctccttatttacaaca

SEQ ID NO: 690909 - DNA, 617 bp, Homo sapiens
tccattttcatactgcttataaagaactgtctgaaaccaggtaatttataaaggaaagggctctaattgactcacagttcagcatggctggggaggcctcaggaaacttgcaatcatggtggaaggagaagggcaagcaaggcgccttctttacaaggcagcaggaaggagaagtaccgagcttaggggaaagagccccttataaaaccatcacatttcatgagaactcactcactgtcacgagaacagcatgggggaaaccacccccatgatccaattacctccacttggtctctcccttgacacgtggggattatggggattataattcaaggtgagatttgggtggggagacaaagcctaaacatatcactaaatctcttatcactttaacaacccctaatctgctggtcataataacacaataaacccaatttcaaatttcactattatctgaaaaagcaaaactaacaataaggcttttataaraccatgtgtgtataaaagcaacaaaaaagtatttcttatttaacatactaatcagccctagaagtctaattgcaaacagttttcagtctatctctttaggactaaatacaccctccttatttacaaca

SEQ ID NO: 690910 - DNA, 617 bp, Homo sapiens
tccattttcatactgcttataaagaactgtctgaaaccaggtaatttataaaggaaagggctctaattgactcacagttcagcatggctggggaggcctcaggaaacttgcaatcatggtggaaggagaagggcaagcaaggcgccttctttacaaggcagcaggaaggagaagtaccgagcttaggggaaagagccccttataaaaccatcacatttcatgagaactcactcactgtcacgagaacagcatgggggaaaccacccccatgatccaattacctccacttggtctctcccttgacacgtggggattatggggattataattcaaggtgagatttgggtggggagacaaagcctaaacatatcactaaatctcttatcactttaacaacccctaatctgctggtcataataacacaataaacccaatttcaaatttcactattatctgaaaaagcaaaactaacaataaggcttttataaarccatgtgtgtataaaagcaacaaaaaagtatttcttatttaacatactaatcagccctagaagtctaattgcaaacagttttcagtctatctctttaggactaaatacaccctccttatttacaaca

SEQ ID NO: 690911 - DNA, 3588 bp, Homo sapiens
  misc_feature 1410, 1411, 1412, 1413, 1414, 1415, 1416, 1417, 1418, 1419,1420, 1421, 1422, 1423, 1424, 1425, 1426, 1427, 1428, 1429,1430, 1431, 1432, 1433, 1434, 1435, 1436, 1437, 1438, 1439,1440, 1441, 1442, 1443, 1444, 1445, 1446, 1447, 1448: n = A,T,C or G
  misc_feature 1449, 1450, 1451, 1452, 1453, 1454, 1455, 1456, 1457, 1458,1459, 1460, 1461, 1462, 1463, 1464, 1465, 1466, 1467, 1468,1469, 1470, 1471, 1472, 1473, 1474, 1475, 1476, 1477, 1478,1479, 1480, 1481, 1482, 1483, 1484, 1485, 1486, 1487: n = A,T,C or G
  misc_feature 1488, 1489, 1490, 1491, 1492, 1493, 1494, 1495, 1496, 1497,1498, 1499, 1500, 1501, 1502, 1503, 1504, 1505, 1506, 1507,1508, 1509: n = A,T,C or G
tcaaaccatatattatgtgaaataatatatcagtttataaatttaaatgttattctctcatattttaagaaataacttaaaccctttatttgtatatttgatattaataattgttcttgattattagagccgctttttgagttgtctaacagttttccagagaatgtcattttgactgctaggtcatttggcatgtagcattatttgaagtctatctaatgctgtcactaaatgttttttctaaagtgataagtatatgtttccataataggagggaagttgtttcttcatttaccctgtaggtgatctcaaaaatgttgctattcactatattgattttaagtttttttaaaggcaaatatcaattgaatagtgaataatttttataaaatatgtgtgctgtacttaaaagttatggtacaaaaaatacctagcttcagaaatagaacattatcatcctcttttaacattgttctgatcttcctcctcagtcttttacccctttctttgccctcagagataactaccatactgaatttaatttttccccttgcttcttcttaaacttatttatttatttatatcatgagaacatttgttcctgagattcagcattgatattgtatatacctgtaattgttaactcattaatatacattgctgtttggtattccagtgtacatatagcgtgatctatttattcatttatgttggttatgaaagtaatgttaatttctgttacaatctaaacatcacatttgttaaatataatataattaatataatataatataatataatataatataatatctttcatttcaccgtccaaagtgaatcaatttttgtgtaggtggggtggggtggggggttcgtggaggggtatgaggaatgtttctgcttcatgtagtaattcagaaatctagattccttttataatgaagctcctctgtattcaatacatggctttgaggttacactggcatcatgcagtcagcagagagaaaaggatcatacagaaggcatgcttagttttaactgctgtgtgcactgtctttgatgagaaacagttgaaggcctcgttttgatgcaagtgaggatacctgacaatgtggtttatctgtgtgcttagaggataataaaattgtttgatgaatgcatagcattgttatttctacaatcttctagacactaaatatccatttaacttttattctcatactcaccttctttccaatagaggcaattgaaagtccaacctcagctaaaaattcacatccttattctgtcttcacaagcctatagcttaatggactttgttgcctcaagaattttatgtcttactgtgtggtttctagcagtgatcagatttcccattcttcaaggctctacatttcttgcccctctatnnnnnnnnnnnnnnnnnnnnnnnnnnnnnnnnnnnnnnnnnnnnnnnnnnnnnnnnnnnnnnnnnnnnnnnnnnnnnnnnnnnnnnnnnnnnnnnnnnnnaaataatgaaggaattattttttaaaaatccacaagcacaaagagaatgggagaggaccacataccagaaaaaatatgtcacccaaatttggtaagctggaaaatagagacatgaaaggcaactgttaatagcagagtggaaaaatggaacctaaatacctacagagggacagttagaaatttgtatttccacccacacatatttcacacagtcaggtgttctcctctccctaactacttacaggagacaaaaaggttgtagagagaagaagggtgtgtgtgcgtgtgtgtgtgtgtgtgtgtgtgtgtgtgtgtgtgtgcgcgcgcgcgcgcgcatgtgtaaaatataagataaagtgctgcttaagagcttttttttaagattatacaaagaaaaatcagaggctgtccactggagccattatgtttgaattacttttgtgtacccttggaattccgtggtctttctatcaactagacatcctccaagctgcagcagctgagtctgcctatgtttgcttgcctcattatttcaaaaagtatattttaaatgactgctgtcagctgggaaatttcctatgccctagatttacaatgaagcataagaggcactctctttcaaaagacactcaaaaacaaatatagaagatatgcaagcaagagagcaaccatcatattgtgagataattcttaatccagggataagaacagaggcagcacaaagaaactgaatctggaaagttaactaggtgttgagtagagtggtggatggtgttttatcagagaaatagattatatgaaaaccaagattaaagaagaatacctcaaattcaggaaatggcaagtatatcaatagatcagcatggttgcggagtaagtggcgagagaaaatgatacaaagaaatacaggggaccacattatgactgacattaaagatcatgttaggaattttggactttatcctaaaggtgattcaaggtttaacaggaagaagccatgattcacaatttgttctgtaccactgggatcccaacttgacactttccacctgctctagctgcagttaacagggctatgagtacttgtattccatcatgttccccctgtgaaatttcctcataattcacaaaaatttaaagcattaaattccgtcacagtgacttagtcacactaaattctatttaattttctactggctgactcccaaagttcattgtataacacttagttattcttaaagcattttgcagaatgctcatgtaaggaaattaaagacctatcaacaaagattattgaaccagcagtgtgtttggttggcagatagaattttggtgatttcatgatttttgaaaataatctcttgttgttattgtaatcttatttactgacaactatggaattcttattctcagggttcctatggagtggtggattgtagctgaccctctggcaatttgacttacaacactctaattttatgatatttcttgttatagatgatagtcctaaattatctatacaatttgatttatgaatatccagtatttggaaactttggggaagaaactgaatctaaaatcagagaaagcagatgtatatgcctatccagaaaagccagaatgagaattcaaatttgaggacaaagtcatttaccaaagtggaaactagattaatacggaaattggtcagcagtaaatgaggagattcaggacaattcaaatttaaatttgtatttaagatttatatttatggataaaagtggagcgtgtgtgtgtgtttatatttatggataaaagtggagcatgtgtgtatgtgtgtgtgtgtaaaacacacaaagacatagtggtaagaatgagaatacaaatsctgtattctcactattgtgctggtcatgcattcattttaaggcatctcctacaggtgaggccgtgctacattaagttttctctggagcttctttttgtcttggatgggcttgcaggtggttgtgtatcaaaccaaattacggtctacatatcatatcataatgcaacttcagtagatatttcttcagatatgttttcaggctcttcattagc

SEQ ID NO: 690912 - DNA, 593 bp, Homo sapiens
tgattcktagtccagcttttcttccattaccctgtgctgtggttcacaggatgggaaattgcagggtctgggaacacagtctttgatggagcagtggtagaactgccagtgatgcctttgtgcaacctgcaatgtgctcttgttaagccatttcattcctgttgattgcttttttcactgaagaaaaataaactgaaataaaggcaagtataattttccaaccttcaaaagctcagcttcagatggtgtatttgtttccttcagttgctacaacaaattaccacaaatttgatggtttcaaacatggaaatattttctcccacaaatctcaaggctagaaatctgaatcaaggtgttattaacatggtgctcccttgaaaggctctagaggagaatcttttcttgcttcttctaacttctggaggctcctggagttccttggcttgtggcagccttatttaatctctgcctgcatcgtcacatgcctttctcccctctgtgactatagctgtgcctgtttcccctgctcttctcttagaaggacttgtcattggatttagggcccaccctaaatcagtatgctcttgtgatcc

SEQ ID NO: 690913 - DNA, 593 bp, Homo sapiens
tgattcgtagtccagcttttcttccattaccctgtgctgtggttcacaggatgggaaatkgcagggtctgggaacacagtctttgatggagcagtggtagaactgccagtgatgcctttgtgcaacctgcaatgtgctcttgttaagccatttcattcctgttgattgcttttttcactgaagaaaaataaactgaaataaaggcaagtataattttccaaccttcaaaagctcagcttcagatggtgtatttgtttccttcagttgctacaacaaattaccacaaatttgatggtttcaaacatggaaatattttctcccacaaatctcaaggctagaaatctgaatcaaggtgttattaacatggtgctcccttgaaaggctctagaggagaatcttttcttgcttcttctaacttctggaggctcctggagttccttggcttgtggcagccttatttaatctctgcctgcatcgtcacatgcctttctcccctctgtgactatagctgtgcctgtttcccctgctcttctcttagaaggacttgtcattggatttagggcccaccctaaatcagtatgctcttgtgatcc

SEQ ID NO: 690914 - DNA, 1323 bp, Homo sapiens
acttggaagtccaggggcttattatgagattgcgtatatttttaaatgaaggtcaattttttttttactaaattgtttgcctgacaaaatgtttacaccccaaaccttgacaaatatctttattcagaataggtttatgttttcccatctcaaattgaacattagaaatactactgtaagtttgtccaatttatacacataagatatatttttgtaagaaagccttggcataaatacaacttaggaaaaagtaaacttggcttaaaacttaaatctgaacattgctcatgtgtaacatgaaatattttaaattataaaaatgcatgtgtgtttgtttctgttttatttctaagtaaactgtaagtcttaacaagtgcataaatattaatttgggaataggtatttggaaatgcctaatagataaagtcatattctttgatatcatgttacgtgtaatgatatataaaattgacttagtggacattctatttaattagaacatggtttaaatggatactttaatatgtgtaggcattactcttgctgatatttatttggtgttatttgttattcatgctattttaatataagttgcaacaaattcttcttcttcttctttcttttttttttttttaagatggaatctcactctattgcccagactggagtgcagtggcatgatctcagctcactgcaacctccgactcctgggttcaagccattctcctgcctcagcctcctgagtagctggrattacaggcgtgcgccatcacatctggctaatttttgtattttcttttttagtagagatggggtttcaccatgttggccgggttggtcttgaactcctgacctcaagtaatccacccaccttggcctcccaaagtgctgggattacaggcatgagccacgacgcctggccaacaaattcttcttaagtacagtgaaattcactatttcagcaaaatctgctcagcaggttataagaattgtttgcttttcactttggaaacattcaacatttagagttagtgaagatggtatgagtttggcactgatattgtgaaaatcagaaacatgaggtagatctcatatttcttaacttacatttcataagtggttggttgaggagttacataaaccataacgtgcagtgggatagctgttgggaacagtctttgcatagacatttggatgtgttctgggtgcttgttcacatttatttattgtttcttttattgaacaaaccccctttctcataacttaaactttttaagggtatgaaacattatttcattcttatttcattttgttacttatatt

SEQ ID NO: 690915 - DNA, 666 bp, Homo sapiens
tttattacagaaaaagttattaagaacgatagagctatttgttacagctactcaacataattggttcttgtctttataccgtacagtactataaataagtattattactactcaccatgatttgattatttctgggtttctaatgggttgtggacttagccagtcaccctgtctcagttcacaggccctaattgacactggtctctactatatgctgtcatacaccaggatacactcccttcctatagacaagacacaagaataagaatagtttatatctctgctacctgtrctacaggatgtcttatccttatctattcttggggcaatggcaataataatgaattaatataaattatgagtgacctcagagatggggtccctaagattatataaatgtgtccttctgcatctaagaagaaccattgccctatggttatttaggcctccatctgcgttaaagtgataaagtgatgctattgagtcataatacaagctcattaccggtgctgggtcctagcattatccatcattaattgttgagtctaccttacccagttcactaaaacttcatcattttttccaggttgaatcccatcccttcctctctcatagatgagaattccctctaatctatttattttagttaataaatcttctttcctt

SEQ ID NO: 690916 - DNA, 594 bp, Homo sapiens
ttgattagttgaagctaattccctgtaatgaaaatgggttccccatccttatcattgataaattaataaaccaccccctctctgatatatagctaacttggaaagttgttccccaatacagtggcggagggctatgttagtgcctgattttgcatagtgtacactctgatatagtaatatctggattccaggttttaccaatttactacccaactatagcaattctatgctgtttgctccagacctaaattaatctcagactccctttagatgtcacagctctccatcactggtgcagacataattctgaagaaaaggtcatgaagtcatcgtcatgctttccatgaaggtctagttcccggctcctcacctggtrtgcaacatggcacctgaagaaacgtcacggctcctttttgtttctggtctcatgatgagaccagagtccagagaacagaaaggaaagagattgaactttctatactatgagagatcaatctatcgtttgttaaagtgatcagcatatgtatcctacagttggaaatacatcctaggttataacttgtgtgtatttccacacaaaaaattatatgggct

SEQ ID NO: 690917 - DNA, 371 bp, Homo sapiens
tcatgccatgcacatggatacacagcaaggtacctgcccattctagtgttgatggacacttggattgtttctggttacggttacggggttatgaatcatggagcaataaacatccttctgcatgtcttttagtgtatttctgttggatataaacctaagaataaaattgtagattatgatatagatagatkatagatggataggcagacagatatgaacaatataagtccataatactaaacaacttttcaaagtggttgtactcccaccaggcaggactgtattagtgtttcatttattccatttttttcccaaaataagtattatcacagtccatttagtgttgctataaaggaatacctaaggctggg

SEQ ID NO: 690918 - DNA, 916 bp, Homo sapiens
  misc_feature 816, 817, 818, 819, 820, 821, 822, 823, 824, 825, 826, 827,828, 829, 830, 831, 832, 833, 834, 835, 836, 837, 838, 839,840, 841, 842, 843, 844, 845, 846, 847, 848, 849, 850, 851,852, 853, 854, 855, 856, 857, 858, 859, 860, 861, 862: n = A,T,C or G
  misc_feature 863, 864, 865, 866, 867, 868, 869, 870, 871, 872, 873, 874,875, 876, 877, 878, 879, 880, 881, 882, 883, 884, 885, 886,887, 888, 889, 890, 891, 892, 893, 894, 895, 896, 897, 898,899, 900, 901, 902, 903, 904, 905, 906, 907, 908, 909: n = A,T,C or G
  misc_feature 910, 911, 912, 913, 914, 915: n = A,T,C or G
taattgatgaatggatgaacaaatgagcagatgaacaaaaaatagatggatggacagaagaacatctgtatgtatatatggatgtttggatgaaagaacgaatggatgggtggatagataaatgcagatgtgatatttagaatatttaacaaagcatgtggtacaaatatgaatctactggaatgggtgctgattatatatattcctatattgaactgtgttgtacctgtgcatattggctgatcatcagcccaacagctaaatgagcaaatgtaccaaaacaaaagatgagtggatttatggatgaatggatgatggatgaatgggtgtataaatgggtaaatgaatgtattgatggaaggacacatgagatggaattatgtatgggtggatgattggatggctggaatatggacatataaatgattggaaagattaatagaaggatgtcaggagaagtagacatatggatggatatggataatagatgaatagatggatacgtgggtggatataacaagagatgagtagaaagatagatagataatgaaycaatagacaattgaatccgtgctgagtaaactattagaaagacggatgtgtgagtagacactactaaatcaggaattttgcactctcttccaggaacacttcctcccatttctctcatctcttttcaaataagaaaagaattacttctttccatgaggctttcatatataaagacccaaggaaagaattacttatttccatgaggctatcatacgtaaaatatcaatcccctccagaactccatatgcctttaccctgatttannnnnnnnnnnnnnnnnnnnnnnnnnnnnnnnnnnnnnnnnnnnnnnnnnnnnnnnnnnnnnnnnnnnnnnnnnnnnnnnnnnnnnnnnnnnnnnnnnnnc

SEQ ID NO: 690919 - DNA, 625 bp, Homo sapiens
ataagagctactaaatgagaccaatagtctatctagtccaatattctaatatattgctaacttacttgaatgtatggaatgcttttctatcaaaagctgacatttatgatacttttaatgcaccttttgaaaacggcagctgaggcttagtgattgctttagtctgctcaggaggatataagaaaatactgtagactgggtggcttaaaaaacagaaatttatttttgtgctcttctgggggctggaaggcaccattgggttctgatgagggccctcttcctggcttgcacagggctgccttcttgctgtgtgatcacctggcctttccttggtgcatgctcacggcaagacagaactctggtatctcttgctcttcttataaggactttgatcccagtatggaggcccaccttcataatctcayctaaatctaattacctcccaaagatcccactcctaaacaccatcacatggggggagtttaagcttcaacatatgaattttggggagacacaaaacatttagtccgtaatagagattaaatcacttttctataggtacttaaataatccacctgcggggcaaatgctgactccaaatactgttttcttttccctaatcatt

SEQ ID NO: 690920 - DNA, 466 bp, Homo sapiens
tgcaagtacatccaaggaaaatttttgtcacagcttccattatatgataatatgatttaattctaccattacaaataagtcagtagatattcaattattacagtaattttgagtaacttttttttcagaaacaaactctcatctctatacctagtgagctaagttaaaattgctcaccagggagacttttttctgccaatgcttacaycacaaaatcaaactctgtccttatattttagagccccccttctggagaatattttcagaatatcactggaagccattttttaaaagtattatctcccaagaacatctaaactaaaatctaaaaagttagaatgtatcctttctgatttaactattacagattgtatattaatttatacaacccattcaatacttttgaagaaaaatgtctatcagcatatacataaggttaaataatttcaaggaaaatgttttaact

SEQ ID NO: 690921 - DNA, 466 bp, Homo sapiens
tgcaagtacatccaaggaaaatttttgtcacagcttccattatatgataatatgatttaattctaccattacaaataagtcagtagatattcaattattacagtaattttgagtaacttttttttcagaaacaaactctcatctctatacctagtgagctaagttaaaattgctcaccagggagacttttttctgccaatgcttacaccacaaaatcaaactctgtccttatattttagagccccccttctggagaatattttcagaatatcactggragccattttttaaaagtattatctcccaagaacatctaaactaaaatctaaaaagttagaatgtatcctttctgatttaactattacagattgtatattaatttatacaacccattcaatacttttgaagaaaaatgtctatcagcatatacataaggttaaataatttcaaggaaaatgttttaact

SEQ ID NO: 690922 - DNA, 466 bp, Homo sapiens
tgcaagtacatccaaggaaaatttttgtcacagcttccattatatgataatatgatttaattctaccattacaaataagtcagtagatattcaattattacagtaattttgagtaacttttttttcagaaacaaactctcatctctatacctagtgagctaagttaaaattgctcaccagggagacttttttctgccaatgcttacaccacaaaatcaaactctgtccttatattttagagccccccttctggagaatattttcagaatatcactggaagccattttttaaaagtattatctcccaagaacatctaaactraaatctaaaaagttagaatgtatcctttctgatttaactattacagattgtatattaatttatacaacccattcaatacttttgaagaaaaatgtctatcagcatatacataaggttaaataatttcaaggaaaatgttttaact

SEQ ID NO: 690923 - DNA, 1304 bp, Homo sapiens
gaaattgaatktaatacttatatgataaggataattatattatgaatgtatagaatcagttaattttataacaataattaataattactggtccaaatctttgcctttcccgggtagctctggaactggtagagctgaagtggagaaatcaggcaagtgttgaacctacatgttaagacactgttcaggtgagtcttagaaaagccctaaaatgagtgaaaccaaatacgttaccccaggtaactaagaagtagttgacatagtttagcaggattaacacatagacaaaggaaccttattccaaattgtcaggcgaagatggagtgaaatgcagcatggacattgcaattttctcagggcttagttagtatttagaaaatgcacagatccataaactcacaggagatcctgagacatccaagactctaagtatcatcatttgaagattatgatgagcattttgagtgactccaaactttatataagaaacctaaagttaattacaaagtgacattagaaccaaaaacaaatgtgatgtgaataaattttctttataaatagtgatggcattcttcatttacttttgtattttttcaaaaagcattaaactcatgagagctgttttaagctgaaaaaaataattttagtttcaaattagaaaatttgaatttttgcagagaatattataacccagttttgttcaaccgtaaggcaatatacttttggacttttctgactaatataagataatgaaaactgtggatatttccagttaagttgaagtgtcgggaaaatctaattcttctttgggattctttgctgattttcttattgaagtgttatttgttttttgctactgacttaccacagcatggcaccttctagcctgaggaggttaagtaagacaatcgttctttaagattcatttttaagtttgagatacacatcagtggatttcaaattctgcaagagaaggtctcataaggtttaaagtagaggaagattattgtttcaggaaaaaattcgatcacctggaattttattttaaaaattagacttctagattcagaagctgttgggggtaagggaagaatacattattaacaacaaaggtatcagatattgctcctgctgaggacatagtcctatagtttctcatccaaagcttgttaattgactgaatcttgttacagaggggagaatttgtggtgtattgtcaccacaggacattgataaatcctaactattcacttaagcacacataaaagaatcaaaatgtggaatttcttctaaaaagacctcag

SEQ ID NO: 690924 - DNA, 375 bp, Homo sapiens
caaagacatcaggaattcataatggtctttggaaggtcatgtacatctctccattttatcttgaaaaacygtcttcttgcttcttccaacagaagcaggaagacagcatatattagcacacattcctttcacagtttatgcggtgttctactgagagaagaaaagtaacatgaacagtgaacattcaattttttttatctcagaaaattacttaggaatgacagcagaatacagttaagattattaatgagaatagaatctaagattctaccatggacccaagaagaataggtctgctactactggaatcagtgtgtgagatcaagtaacagacttagaaagaaatgtgaccagtgtccgtctattcattcattc

SEQ ID NO: 690925 - DNA, 1392 bp, Homo sapiens
tgccatattcaccattaagttaagtggcattaagcactttcacactgttgtacaaccatcaccaccatccatcttcagaactctttttggattaagtgcttttaatgtgcactgttgtttgttataggttmcagggagtttactgagtagaactggtatttcacatagcagtgtattcgtctctttaaaatgtccatgttttctgtcttaatatagtctttctttcttctcttaggcaaggcccagggaagggcactccccttttaaagacgagtaactgaaatatcaaaagtatcacaacattctaagaataagtatgatgagaaaacatttatcattcttcatggattcaacgcctggaaataactcagcttggttaatatcagtgacatttctggaggatactgacaatgtactgactctgacagtcatggacatctagccattttccccattaattttaacttgttttatgtctagtttcattaaaactctcagaatactagatgtatttattcccgctacagtaaaattggcaagaatttaactttttaaaaaagcatacttcagcattatgaaatcacagaggctaggccatgttcacagaattctattctttacctcttccattctcaggtactggcaacaaattcagtcttcaaaaaatgcacagttcatgaaatgcacagttcatgaaattatactctctcataaaaatcttttgcttgttaaatgaaaattagctcaaaaatagaggtatttgctaatagacatccagtggccacccatggatctgaatgtttcagaagtcatacaaatgtaggagctttaggttttcacaatgaaaggttgctatgcttataactcctccttcctctactctaggaatccattaattttttcagttccctaaaaaacagtacttaagagggggaaaaatgctatttttcaccttacacatagcaaccaagtccaaaatacagggtatatgtcaatgaaattatcatttctaccacatatagaaagcccagaatgcttttagaagtttcaggggaatagctcacatgtatacttaaccagattgggtatgaaaatgacagaggaattgaggaaaaaaaaaaacacctttgtatcatatgatcataaattctttagtcatacctcaaatttccaagaacaaaagcctctcaggatataatttccatttcaaaaaaaaatactgagaatccaaattggcataaactaaagaatatctactcccaattccatttctataccctgaaactttgcatctagaatttcaaacgtatcgaaaaaatattttttaagtaaatacaaacttcaccatgtgatggaagaaaataagcacatttctacttctggaaagagtac

SEQ ID NO: 690926 - DNA, 1392 bp, Homo sapiens
tgccatattcaccattaagttaagtggcattaagcactttcacactgttgtacaaccatcaccaccatccatcttcagaactctttttggattaagtgcttttaatgtgcactgttgtttgttataggttacagggagtttactgagtagaactggtatttcacatagcagtgtattcgtctctttaaaatgtccatgttttctgtcttaatatagtctttctttcttctcttaggcaaggcccagggaagggcactccccttttaaagacgagtaactgaaatatcaaaagtatcacaacattctaagaataagtatgatgagaaaacatttatcattcttcatggattcaacgcctggaaataactcagcttgsttaatatcagtgacatttctggaggatactgacaatgtactgactctgacagtcatggacatctagccattttccccattaattttaacttgttttatgtctagtttcattaaaactctcagaatactagatgtatttattcccgctacagtaaaattggcaagaatttaactttttaaaaaagcatacttcagcattatgaaatcacagaggctaggccatgttcacagaattctattctttacctcttccattctcaggtactggcaacaaattcagtcttcaaaaaatgcacagttcatgaaatgcacagttcatgaaattatactctctcataaaaatcttttgcttgttaaatgaaaattagctcaaaaatagaggtatttgctaatagacatccagtggccacccatggatctgaatgtttcagaagtcatacaaatgtaggagctttaggttttcacaatgaaaggttgctatgcttataactcctccttcctctactctaggaatccattaattttttcagttccctaaaaaacagtacttaagagggggaaaaatgctatttttcaccttacacatagcaaccaagtccaaaatacagggtatatgtcaatgaaattatcatttctaccacatatagaaagcccagaatgcttttagaagtttcaggggaatagctcacatgtatacttaaccagattgggtatgaaaatgacagaggaattgaggaaaaaaaaaaacacctttgtatcatatgatcataaattctttagtcatacctcaaatttccaagaacaaaagcctctcaggatataatttccatttcaaaaaaaaatactgagaatccaaattggcataaactaaagaatatctactcccaattccatttctataccctgaaactttgcatctagaatttcaaacgtatcgaaaaaatattttttaagtaaatacaaacttcaccatgtgatggaagaaaataagcacatttctacttctggaaagagtac

SEQ ID NO: 690927 - DNA, 1008 bp, Homo sapiens
ttgttttaatagtaggcaagttgtcaatctttaaaagtccaactcttcaagttttttttttctttagggcttgcaggattttgacaccaactgtttacataacatataaatttaaatgatacattagagacaaggacgacagagttaacctttgtgatggtgaagcttcaccactactaacaatgtcttcctttcatgaaggaagcttgtgccacagggcttaggtattccattgtctaattctcacagctaaatatttttattttttcccaaaaaattaatctgctgtgtaaattaatagaaaaggaaaattcaaagagctcagtaatacaaataccactaaaatatactttaaaaacataattttaaaagatctaaaataatacttaaaattcttctttatggatataccatccaagaaaagtccacggttgaataagaattatttttgattattcagttctagagtttcagatctacgtaagtacacrttacataatggggagaaattaaaattaaattggaaaaagatgtgagaggggttagggtattaatcttcaataattggtatagctcaacaggaatataaataaaaatatcttatttcctcaattctaagtcatgattagtggtacaatgcagcactgatttgtctggaaaaaaagaaacctatattatgttcttattgacagaaagaaatatttcaatttctgaaacatcaaaaactggaggggaggttttaaaagtacagtttaaaattaaggatatgtaactaccttggttgaggataagtgaatcctgaaatgcgagttcaaccttatacagtctcaatctaaaaacaaaaacaaaaagaaaccctaatcggatcctggggacaattactgtggcaactgtgtgttctggagcacctctaaaggtatggaatgcctgttcttccccatagtcagtaatcagttgataacatccaggcactggagctcccaaagtccctctgcaatgacctcctaa

SEQ ID NO: 690928 - DNA, 648 bp, Homo sapiens
ttgtacccttcacagggtagtcgtaactaccctcgaggcagtcctgaagtacatagcagaggctcttttgcaaaaatttgttttggcttttcaaatttatccttttgtaaggtcatctatttcagaatatcttttattgaaatatagttacagggagggatcactttcatatttattttgttctcacagttctttgaaagacagtggatgaaaatgctattcattgtatagatgggaacctggagctagagaaacacgtaaagtgatttggctgagtccggagtaactgccacagttttctgactgctgatgtattcctgctgattacctacacagtactaaccacagtcacatctagagaaaagggcgagttttttgaagtgcacagtagtctttgattcagcatttttttttgkgggggggaacttctccctgaagattcagcacttttgatgaactttttctagtagaacagcttcaaaggaattggcagtggtgggctatgtcttatctataatcttggatagagctgttcaatttacagttcatctggaggaaataatgaacaataaggtgaactgaaagtgctcaggttgtcaatcacagttctttggcaaaaagtgagtctcaaattatgctgaagactga

SEQ ID NO: 690929 - DNA, 648 bp, Homo sapiens
ttgtacccttcacagggtagtcgtaactaccctcgaggcagtcctgaagtacatagcagaggctcttttgcaaaaatttgttttggcttttcaaatttatccttttgtaaggtcatctatttcagaatatcttttattgaaatatagttacagggagggatcactttcatatttattttgttctcacagttctttgaaagacagtggatgaaaatgctattcattgtatagatgggaacctggagctagagaaacacgtaaagtgatttggctgagtccggagtaactgccacagttttctgactgctgatgtattcctgctgattacctacacagtactaaccacagtcacatctagagaaaagggcgagttttttgaagtgcacagtagtctttgattcagcatttttttttgtgggggggaacttctccctgaagaktcagcacttttgatgaactttttctagtagaacagcttcaaaggaattggcagtggtgggctatgtcttatctataatcttggatagagctgttcaatttacagttcatctggaggaaataatgaacaataaggtgaactgaaagtgctcaggttgtcaatcacagttctttggcaaaaagtgagtctcaaattatgctgaagactga

SEQ ID NO: 690930 - DNA, 650 bp, Homo sapiens
gatgtcatgaatgatataaactgaggtccatttagagcctttaactaattggttaatgactacccttaatattttattcaggataaaacttcttcctccaaacaaatgatgtagatatccaggatctcagagttttcagccaaatacttgggcaaattcaaaaatttttttagagaaaaaaattctacccacagacacccttgcagaccttcctccaaatgagaattgaatggccctctgytgagatcagagtatgagtcagatttctgaaatttcaaatgagaaatgttagtctttctgtctgcacaccacacatataaagcatatggatgtcaccttaactgacgacacagaatatctgcactacagctctcctgagaggatccagccaagaatctactacagcccagcatttgcaaagagctcatttgacctatctcattttagagagtcaacctaaagaacataatagctgctcactcctctaggttcttctaattccatcattgcattagatcagcttgtgagataataaacttcattggtcttattatcttgacttttttatcctacctctcctcaaaattcttagactttgtagggttaaattatagttttatgaacctagttttcatataagttccatagaa

SEQ ID NO: 690931 - DNA, 1516 bp, Homo sapiens
attgggagaccgaggcgggcagatcacgaggtcaggagttcaagaccggcctgaccaacatggtgaaaccctctctctactaaaatacaaaagttagccaggcgtggtggtgggcacctgtaatctcagctgctcaagaggctgaggcaggagaatcgcttgaacccaggaggcagaggttgcagtgagctgagatcattccacggcactccagcctaggagacagagcaagactgtgtctcaaaaaaaaaaaaaaaaaaaaaaaagctctgcaaggacagaaagaaagagaaactgatggatttttgaaatacgaaaacctttttgtaaactacttgccccttctgtcatagccactgctgctccaggggcgccctggctgcacaggtgagagctctgggcacagacactctgatgcaaatactgcaggacctgaacatccaggagggcttcactgctgcttcccagcaaagatatgagcagtacatgggggcactcagagatctcaggcaaaggagaggtggctccctttggggattcttctcccagcctttgagactcagaagtgggattcctggaccagcagcatcagcaggccctgagagcttattagaaatgcagactcccaggccctgttcagacctgctggctcagtacttgcatgttaacgagacccccaggtgattcctaggcaaggtggtttgagcagcacggcacgaggttgccctttaccagaacagcctttctacgctgctggacgaaggatatgctacccagcaacgtcccccacctaaaatgcagcccctctgcttccgctgaaagccttcaaagacaagtagtaaccagaaggttatgcaatgcagttctttgctttatacatcaaatactcaggcttctcaagaacggagatagaggccaggcacggtggctcacacctgtaatctcagcattttgggaggctgaggagggtggatcgcctgaggccaggagtttgagaccagcctggccaacatggtgaaaccctgtttctactaaaaataaaatgcaaaaaaaaaaaaaaaaatagccaggtgtggtggtgcacacctctagtcacagctacccgggaggctgaggcagtagaatcacttgaaccagggaggcggaggttgcagtgagccaagatctccagccttcccagatcgttaaaaggacagttgacattttagatattcttataaaaatgttgaggaaggccggacgcagtggctcacgcctgtgatcccagcactttgggaggctgaggtgggcggataatgaggtcaagaccaagaccatcctgacaaacatggtgaaaccccatctctactaaaaatacaaaaattagccaggcatggtggcgcgtgcctgtaataccagctacttgggaggctgaggcaggagaatctcttgaacccaggaggcggaggttgcagtgagccaggatcgcgcyactgcactccagcctggcgacggagcaagactcagtctcaaaaaa

SEQ ID NO: 690932 - DNA, 605 bp, Homo sapiens
ctccctcagaagggacattgatgttgaaaggaagggggcagaagggcaggccaactggaaggcaaagaaagactgtgcttcccacagtcaagcacattctagaactgtcccatgtgctcaagttctggaaagagtggaagacgggaggggattggctttaggaggacctgagaaaagttaggtgttggtgtctagtctgtgaggaatattttaagtgtcctccccagacagggcacgagtgctggggaggaatctggatatagcagtgaaggatgaagagggggtcctgccagcagggagttsggcttgtgccctgctgctagctgttctgggatatcatggctgatgtgctttctcattggtgcctaattcccttccctgctcggatactacagttgctgttccctggcaggaaaagcaggcctcattctgtttctagcccttgcatttgttgggattacaatggcctttactttgagtcacagtctcttttgacttatgccatgttcataggattctaagccctcccccactaccacccaagaaaatctaatttaacatgaaaattactttgagctacataatctgtctttggactcagagtg

SEQ ID NO: 690933 - DNA, 547 bp, Homo sapiens
tccaaacattacatggtgtttctctgtgtatgtatctgtttctgtgtcaaaattttcttttttttaaataaggacagcattcatattgaattatggcctactcaaatgacctcattttaacttgatgattgccccaaacacactatctacaaataagctcacattctgaggtactgggggaatgggctccaacatatctttgaaaggaaatacaatttgacccataatggtgagaatatttacactgtggatattggcaaatactacacataattgctttttcttctcccaaagctggttacacagagctaaacatgcttttattaagcattggttttcctcctggggcaaaaaacaacatgagaaaygagaacagattgagtattaagaatataaagccactggtctggccttcatgttatttagaagcgcattctgtgagagtaactgaagagtcaaatatctgtagattaaataagtgtcacacaattcttgtatacatagtcactttgtattccgattgtaaaataattatattggattttga

SEQ ID NO: 690934 - DNA, 1786 bp, Homo sapiens
aagaattaagttaggtcctttgcagcaatatggatgcactggaaggtcattatcctaagtaaactaacacagaatcagaaagctatatacctcctgttctctcatataaattgaaattaaaccttgggtacatggggacataaagatggaaacaatagacactaatcactataaaaaacaaaggggggggacgagaaacaggggacaaggttagaaaaactacctattttctactgtgcttattacctaggtgatgggttcaatcacaccccaagcctcagcatcatccaatgtacccttataacgaacttgcacacgactccctgaatttaaaataaaaattgaaattaaaaataaaattaattgctatggatgttctagtaattggggagcactctgatttgacactttgcctctccgattatagtaaaatactaaggttatgccatccaaatcaaatggttaatgcaacatgcttataataatttttgtgattttgccaattttctcatctgtataacaaattagattttgcaagtcagcaaagcccgctgatgttgttccctataggctgagattatttcacatcaatgtttaaaactactgaaaactaatctactaaattaggaggcaaaagggaaaaggtgtatttggctgtgctatcctagacggatttgcatttttaatgttactgtaaatagcatcatattttatttttttgttattggactatttgttgctggtatatagaagtaaattgttttttttagagagcttatatccagcaacattactaaacttacttattaaaagttataatctatttagattattttacattttttagaaacccaatcacactgattaaaaggtgctttagttgtgtttcagttcgtaagactttaataaccctttaaatttacttatttcactagttagaatgcccacacaatgggaaaaaagagacagaagatcattatttcactgtgaaactatatatcttccatctacaattaaagattatcttgtttcactatggtaccttcaaattatgtgtgtgtgtttgcacgtgtgtatatacatatacaacatatatatgtgtgtgtgtgcgtgtgtgcatgtgtatttgtaattaatacaattttttctatttcttgcaggaggagcactggcctgccgtgacctactttatctacccaaatgttgaagtatctctgataagtttttaaattgtaagatattgcaaatatcatctctggtatgcaggtaaatataggtaaaatacaaatctatatctaacataagtggcattcactgatggactagttgatcatctttatgatcggatactattaaacytacttttcatcttcagttgcagaaatttatagttcaactgtttctatatgattactcctttattaaggaatattttacagactaaaaattccacaatggggataagatgaaaatgagatccaatagttttgttattgtataggataatccatgctgctgtaagagataacctacaagatgtataataaataaaatataaaaatagtttcaactttcacagtcaaaataaaattgtactatttgacaggggtgactactttcctggacacagttattcaaggaccaagaatgacagtagctctgtcatcttaaatttataattatgatttttaccataattgtcccgatttcattcagccagaaggaaagaagattacagagaaatgctaaagaatttcttgcacaaagaaatgcaaaagaacacaag

SEQ ID NO: 690935 - DNA, 1786 bp, Homo sapiens
aagaattaagttaggtcctttgcagcaatatggatgcactggaaggtcattatcctaagtaaactaacacagaatcagaaagctatatacctcctgttctctcatataaattgaaattaaaccttgggtacatggggacataaagatggaaacaatagacactaatcactataaaaaacaaaggggggggacgagaaacaggggacaaggttagaaaaactacctattttctactgtgcttattacctaggtgatgggttcaatcacaccccaagcctcagcatcatccaatgtacccttataacgaacttgcacacgactccctgaatttaaaataaaaattgaaattaaaaataaaattaattgctatggatgttctagtaattggggagcactctgatttgacactttgcctctccgattatagtaaaatactaaggttatgccatccaaatcaaatggttaatgcaacatgcttataataatttttgtgattttgccaattttctcatctgtataacaaattagattttgcaagtcagcaaagcccgctgatgttgttccctataggctgagattatttcacatcaatgtttaaaactactgaaaactaatctactaaattaggaggcaaaagggaaaaggtgtatttggctgtgctatcctagacggatttgcatttttaatgttactgtaaatagcatcatattttatttttttgttattggactatttgttgctggtatatagaagtaaattgttttttttagagagcttatatccagcaacattactaaacttacttattaaaagttataatctatttagattattttacattttttagaaacccaatcacactgattaaaaggtgctttagttgtgtttcagttcgtaagactttaataaccctttaaatttacttatttcactagttagaatgcccacacaatgggaaaaaagagacagaagatcattatttcactgtgaaactatatatcttccatctacaattaaagattatcttgtttcactatggtaccttcaaattatgtgtgtgtgtttgcacgtgtgtatatacatatacaacatatatatgtgtgtgtgtgcgtgtgtgcatgtgtatttgtaattaatacaattttttctatttcttgcaggaggagcactggcctgccgtgacctactttatctacccaaatgttgaagtatctctgataagtttttaaattgtaagatattgcaaatatcatctctggtatgcaggtaaatataggtaaaatacaaatctatatctaacataagtggcattcactgatggactagttgatcatctttatgatcggatactattaaacctacttttcatcttcagttgcagaaatttatagttcaactgtttctatatgattactcctttattaaggaatattttacagactaaaaattccacaatggggataagatgaaaatgagatccaatagttttkttattgtataggataatccatgctgctgtaagagataacctacaagatgtataataaataaaatataaaaatagtttcaactttcacagtcaaaataaaattgtactatttgacaggggtgactactttcctggacacagttattcaaggaccaagaatgacagtagctctgtcatcttaaatttataattatgatttttaccataattgtcccgatttcattcagccagaaggaaagaagattacagagaaatgctaaagaatttcttgcacaaagaaatgcaaaagaacacaag

SEQ ID NO: 690936 - DNA, 604 bp, Homo sapiens
acatatggttaatttggatgagaatctggctacttccccattactagttttggttaataaagtcactttctttctaatgtatgccactcttgttcattagactctgcaagcggtgagggactgaacctgcactcattactatatacaaaagaatgtttatagtaattccaagcactagtttccccaaaacaacagtataagccacgatgcctataaatagttatcttccattgtttacaagtattgttttttaatgagtgacaatgtagtatattaatattcaggaaatgtgtaagggtttgttactgccatattttttctgtttttatctttctagcaaccggcaagtaaagtaagaaccccaggcatctgatttctaatccaattgcattttcrttttataattttttttctgcttgcatttagagtattttatttgttttttttcttaaatcatatataatggtcttcatcattattgcaaataaatatatacaggtcataatagtcagtggacatttacacccttaagtcacacatacacacacatattccactctattgatataatcacagtgctagtgatctcactagtgattactca

SEQ ID NO: 690937 - DNA, 1534 bp, Homo sapiens
atatatatgatatatatgaatatatgaatattcatatatatatgatatatatgaatatatgaatattcatatatatcaagatgactaggtgarcattatatatatatggagatattatagatatatagatattcaatatggaggttgatatatagatatagtgcatatctataccttatcttttacatagctgtttttactacaaggaatatgcagtgtggttctggtatcaagtccatattcatgctcctaagcagaagtcttccattcctaatatcacttggaggattttatttcaacttcattttcagtcataactatcctgtaagttatgccctactcctccatgtgatctactgctagagcaattgacaataaaatggccatttgcttcaatcactctctctatattcattaggaaaaatgataggtccctgtaattcctcggttgacatttcagaagctttttgttgctcatcacttttaaaaaaatttctactctagatatgatcaaacatgtcacagtgaatttactgtctatccattgtgaatggcctcactagctccttctaggttgtttctcactcaggtctcactcaccatcggagttaccaaggagctgtaagagtttacaaaggctgcaaagtcttttgacaatggaaaagcaaatttaaccaaagtacaacctgataaaaagccatctctgtgtattcctcacaaatcaccccttggttccagcaactagggatctactggttaaccacttgtacccatcacatgtagggaacagcagtttcatagtgagaaagaatctcaaattttgtattcattgactgtagctacctcaattatagtaaagcctatggacaactggagatagataattacaaagggtttgtatttacaaatagagttccaatacttaaagatcagtgtttaataggaactactttgaaagaaactgccacaagtggatatacgctaaattatccacaaaactaccagatggctaaagatgtttcaattttattttacagaatatgaagtataaaactccaaatggcacagccaaatttagaaggaaagagaatacatattcaagcctttaaagaaatgctcagtcagttttatagtaccttgaaattgatcttactcaaacggatgaactgaatgtgaaaaaattctaatcaaaattataaatagttcatattaataatattgaattccaaaccagtttctccaccaaaaaatattgaatctaactaaatttttcaatagacatgttttgaattccatacattcagactacagagtacatttgctccagaattacttctattctattgatccagtaagaaaataatcaagtcagacatggattataggagcctaatttaaaaccaagagatacagcatggtgttgtcattccaaaataacaaatcagttgggatttttagttagaaggtgacaggaatatttccaagtgaatcaaatggtaaatttctgacatatccattacctgaactctttcac

SEQ ID NO: 690938 - DNA, 1997 bp, Homo sapiens
tgtagagacggggtttcatcacgttagccaggctggtctcaaactcctgacctcaggtaatccacccacctcggcctcccaaagtgctgggattacaggcatgagccactgcacctggcctctctacggtaaatattgaaagttgctgggtcacagggtatgcacatttaaattttttttttctttttaaagggacagagtcttgctctgttgcccaggctggagtacagtgacgcaatcttggctcaatgcaacctccgcctcccggattctggctcaatgcaacctctgcctcccggattcaagcgattcttctgcctcagcctctgagtagctgggcctacaggcacgtgccaccatgcccagctaatttttgtatttttaatacagacggggtttcaccatattggtcaggctgtctcaaattcctgacctcgtgctctgccctcctcggcctcccaaagttctggaattacaggtgtgagccaccgtgcccagcatttaaaattttaatatgtactttttgcaacccagaactcattgttcagtatgagttttgatacatataagaagggatattatgatacctgagacagttaactgatgggagtattgatagccataaaggttggttccaggccaggtgcagtggctcaagtctgcaatccccacactgaggtgggtgtattgcttgaaaccaggagttcaagaccagcctgggcaagaaagtaacaaacacctcatctccacaaaaatttaaaaactagctgggtattggggcgtgtgcctgtagttgcagctactcaggaaggggaggctgaggcaaaaggattgagcccaggagttggaggctgcactgagctttgatggcaccactctactccagccttcgtaacaaagaccttgtctcctaaaaaaaagattgattctaggactgtagaatagatagttaaacagcatgggatatgagggaaatcctcagcagtattaattttgcattccaatttcatgttgatgagacatacgatggctttttgttttaaaagcttttatcttgagaacatgatgtctggagttaaaggtattggcatattccacacatctgtactattcttgagtgagatggcttaaggtgtcaaattgataacctggcagatccccacgaccgacagtataaaggaccctaaagtaaattggttgaagaaattagatcccaaagattcttggtgaattttgaagtcttcatcagtatatccacattaaaaggagacgacaggaagccaaagtaattatgggctgacaggacaactggatcagtttcattaaaaaggctaacttgaagataaatcttttgactccagctctttagaggatctaaagtgaccttgatggacagtggaagaaatcacaacatggaattccttgaataaaaatttattgactttaaataattttgtctattgttacatatccacaatttaaaaactatttacagccgggtgcagtggctcatatctgtaatcccagcactttgggaggccaaggcgggcagatcacaaggtcaagagattgaagccatcctggtcaacatggtgaaaccctgtctctactacaaatacaaaaattagctgggcgtggtggcaggcgcctgtagtcccagctgcttgggaggctgaggcaggagaatcgcttgaacccaggaggcggaggttgcagtgagccaaggtcatggcattgcactccagcctggcaacagagcaagaatctatctcaaaaacaaaacaaaacaaaacaaaaaaacaaacaaaaacctccttacactgttgaaaaaaattgtaatatgtacttacagattgccctaaatygatttatattcccaccaaccttgtaagactgctataggccatttgcccatacttttctaatacttgatattagatatgagtggtcatttaatttattattattattttattttattttatttattttatttt

SEQ ID NO: 690939 - DNA, 637 bp, Homo sapiens
tgaagtagggttccaaactcattcttttagatgtggttatataattgaaaaggctatatatctttttccactgaatggtgttagtacctttatcaaaaaatggtatttattgcttcgtgtattttggggctctgytgttaggttcataacctcactttacttttatttgaaagaaacaaaatgaaattcattaacagaaagcaaagtacttgccgtatttataaaataattttggtgaacagaaaaacaaattaggagagacatgaactttcacagaagaaaatttcatagtatatgatcactccagataatactatgcccagaaataatctaggcaaggagatgttcctcaaaattcttctgcagtgaaagagagaaattttttttccttgcttatgtgaactaaaagagatctaaagtttcagaataaaaagattagatatgttttattgaaggcttactctgtttcaggcactggactagtttcttctttataatgtttcatttgatgcttatatcaactctataatgtgatgtcttatgtcagcaggacttgagtcaagtatttttctacaaaagcaatttaaagaaagtgttgccaggagaaacaggaaagggagtaggggtagcaggacag

SEQ ID NO: 690940 - DNA, 651 bp, Homo sapiens
ttttcttaataggaggtatcttcacactgtgccaggaagccattaagtatttttaaggctatgaggtaatggactgtgtgttcattgttcttggtctagatatttcttactaagtgttggaaagcacttaggagtaacaaagctaaatcaattctttgtattgacttatgttgatatttttcatatagataaattttctcctttcattaatgaaaaacagaatccacgtaaataaaataatcttggtgtttgtgaatcatctacaggatgtgttagaaaaagtgttagtggccttcaaaagcctttacaaaaacgtcagggtggtyagttaccttagagttttgtttgtttcactttttccttgtttcttttttcataaatttataaaaggatccaaatatatttttaaaaagtaaaataaatattcatgagtactctctgttgaagcgttgtgtatagacgtgcttcactttttttcttcagggccacattccttattctttctatatttccccactataagactacctatgaaataagcaaaatcaatattttgccatctgggcaaatggttaacaagccaccaacttttttttggttaagtgtcttatcataatgtgcttgatgtcaagtccactgccattctactaa

SEQ ID NO: 690941 - DNA, 1943 bp, Homo sapiens
tcattcattacaaagcattttctaatttcccttgtaattttttcttagatcctaatttactgaaagacttaatatgcctttaaaaaagtagtagattctaactatgttttaaaaattctccatttagcctaacagttaagtaatccacgtgggtaccacaccttaattcttcatattgaattactgaaattgtaatacactgtggttaaaagtcaagaaagggcccttaagtgagtactaaaagtacaactatttatttggacaatatctgttttgtaaacaaacttcaaaagttatatttggtgttacttaaatatacaactaagagaattaattacattgcacatacaaacataagaacatttaacgtaattttttttcataaaaagtcaaaagggtatgtttctattatagcactaaaagtatttctccataaacattaaatatatgatatataaatacatttctgtaatatcaaagttttactggcaggaaatcctttcgttctttttttgagacagagttttgttcttgttgcccatgctggagtgcaagggcgccatcttggcccactgcaaactctgcctgccgggttcaagtgattctcctgcctcagcctcctgagtagctgggattacagacatgcgccaccacgccaggctaattttgtatttttagtagagatagggtttctccatgttggtcaggctggtcttgaactcccaacctcaggtgatccgcccacctcagcctcccaaagtgctgggatcacaggcgtgagccactgcgcctggctaggaatttcttttgtctgtattactcacaaatgacaaagctttggcaaatacaacagattatgcctagaaaatgccaataaaatgtttgcatccctttctcaaaaacttttgaagattagaagaatgacctctaaaatctttttacttcaaaaaacagataattaatttgcacttatttatacattttactgtgaaatgtaacactcttttctaatcagttgtcacttattcattatatattcttatatgtcagaagaataggaaaaaaataaatgcaaatttataaaagtgttcacacccaagaggcacaagaaagtattcaagggatcaaataaagcacattaaaaagtgtaagagaatataaggaaaactcatgactcatggcattaatacaattaatctatgagacctcaaagagtagcttaaaccattcttaattgtgtcaattaaaaactgaggggattggaccacctgagtttcacagtttctttgacctcttttcagcttacatcatctaggatctatttctcttagttgtaaccaagaattctgaatgattcaaccttccatttgcttgctttctactactgttaataattctaattttattaactttgttgtccttcattatagattgtttcaaaagtattgagtaaagaggatatgactaaaataaaataaatggtaatagctttaattaaccttattttattttactgaagatattctgtttcctacaaacttctcttgcttaaaatactgatatttgttcaattcaatttctacatagcattgtattttctggcccatagtcattataatctaaagttctgctctcatacaattaccgcacatcaatactcttcacagcacatgaggccaatcccaggcatttgttccagactcaccaagaataagtttgatttccacttacagagctcactcaaatggtaccaacacacttacatatattctgtttgctatcatttcattcagttccataattttgaaaattatgtttttttcagaatatgggttaatgcatctttggaagcaatcatgtctatgaaacttatttcayggcttctctcaaactctgctcatggaacacattaatagacacggtgttattgggtcctggtatta

SEQ ID NO: 690942 - DNA, 694 bp, Homo sapiens
agtcttagggcaaaacttggtctcaaatttggcattgtgcattggttaacttattcaatacacagataataaaggcttagaatataaatttgctatctccccatgtgtttccatttaaaagaagactttagcccttttcatgatataaattgactggagagctatagctcattcttattccataagtatttttaagctaccaaatgattttctatataaagaaattgatgaataaatatagatgacttctgatttgcttgcaaaatactttctgtagtctgtgttttagctgaatctgcttcatcctttcatgcttgctaataagacatctctttggccgagaatggtttctggctcatccaagtaaaactcacctgctgtgctgctgcagacatggagtgagccttgtcattctgttctcctcagcagaatatgacatgcgagaagtgaactcagcgtgcagactggtgaagccagcagagggagagttaaagggtttayagctatggcagcatgaggatttttacttcctgaggatccacatgacatgccaaattaaatattttcatttgcctgcttattaacattttagtgaatctttctaccactccaactatcttatgacatggtagatgtcaaaaaacctatgcatttatgttgatcacattttgaaacacagtatgtgtaacacaga

SEQ ID NO: 690943 - DNA, 694 bp, Homo sapiens
agtcttagggcaaaacttggtctcaaatttggcattgtgcattggttaacttattcaatacacagataataaaggcttagaatataaatttgctatctccccatgtgtttccatttaaaagaagactttagcccttttcatgatataaattgactggagagctatagctcattcttattccataagtatttttaagctaccaaatgattttctatataaagaaattgatgaataaatatagatgacttctgatttgcttgcaaaatactttctgtagtctgtgttttagctgaatctgcttcatcctttcatgcttgctaataagacatctctttggccgagaatggtttctggctcatccaagtaaaactcacctgctgtgctgctgcagacatggagtgagccttgtcattctgttctcctcagcagaatatgacatgcgagaagtgaactcagcgtgcagactggtgaagccagcagagggagagttaaagggtttatagctatggcagcatgaggatttttacttcctgaggatccacatgacatgccaaattaaatattttcatttgcctgcttattaacatyttagtgaatctttctaccactccaactatcttatgacatggtagatgtcaaaaaacctatgcatttatgttgatcacattttgaaacacagtatgtgtaacacaga

SEQ ID NO: 690944 - DNA, 630 bp, Homo sapiens
tcaatatttgaatcattctgtttcaccttatgaatcaatctccccatggaaaaatacctacaacatcaattgaacatacagctgtcaggataccttcccctggaatagkttctaaattacctctgccactgcttttctttgacacctctttttcagtttctaaatatgtctgttctttaaatcgcttccactctgtccttaggtgtatttaatgacattaattatcaaccatattttgctcaagcctgaaattcatcttgtctccttaatatatctttgcttactttttatatcatacgttaggtattgatttcatattttaactcacagaggacaattcattttacttatgtatatgttttgaggttacttcactgtgtatcctcaaagtactacctgaggtggatctgtggagaatatagtggataaagatacaaatttcagtgccagatgtacctaggtttgaatttgtggttgccaatcatagctatataatcttgtgcaaactcacaaaataactctgtgccccagtttttggaactaaaatctagacaaaataatagtacatggataggaagctattaaaggaatttaaataaatctgcctggtacctaataagtattcaagaa

SEQ ID NO: 690945 - DNA, 625 bp, Homo sapiens
gaaactaggagaactgggtcttggtcttggttctaacactaacttgttatagttaaagaatctgggaaaaactatagcttcagtttccctgtctgaaacattagtacacgtaactcagggtttcaatgggaacaaaataatatgagagctgtggctatactaatatcagacaaaacagactttaagtcaattctgtctgttaaatactgttayaagagacgaaggacataatgataaaagggtcaattcaccaagaagatataataactataaatatatatgcaccacacattagagctcctaaatataggaaacaacccctgacagaactgaaggtagaaaccaacagcaacacaataatagaaggagatttcaacactgctatttcaatgatggatggaacaaccagacagaagataaataaggaaaacagaggatctgaacaacactatggactaagtgggctgaacgaacatatacagaatactccacccaacaacagcaaaatatacattcctctcaagggcacatgaaacattctccaggatagatcacctgttaggccacaaaacaagtttcaacaaacttaaaaaccacttaagttattatatgaagtatcttttta

SEQ ID NO: 690946 - DNA, 640 bp, Homo sapiens
ggaagatataaatgcctcttaaatttatttaaagatgcccaaacttactcgtggtaacaaaaatgaagattttaattaaacatgtcatttttcacctatctaattagttaaaagattcaaaagtttgttatcacatcatgtgataacatggggaacaaggttcggggaagtgtaggtmctttctgctgatgggaaagaacattgattcagcgtcagtggagggcagtatgacaatatctattaaaattaggaatatatataatccagagtcctcaattacacttctagtaatttattcacacacctttaaaaccacctttacaggttatttgtagcaatattgtatgtaaaagattggaaacaacataaatgtccatctgcagtaggctgattaaattctggaatctctatacagtggaatatattgcaatcaaaaaatactaagtaatcctttgcttactgattaggaatggccttcaagttatagccacacaggatggtgtgtaaaaatatgttaccatttatggaagtagtggtgttgaagggaagaacatatatatttagttgcctataaatgcatacaagtatctttggaaagatatgcaaaaaaattgtaagatttcttgttatctttgggaaa

SEQ ID NO: 690947 - DNA, 619 bp, Homo sapiens
tttaaataacaattagtagagcattacaatgctctttttttttgagagttgggggtcttactctgttgcccaggctggagtgcaacagagtgctctctacagcctcgaactcctggtatcatgtgattcttcagcctcagcctcctgagttgctgggattayaggcatgagccaccatgcccagcttaaaatggtttactttaactactaattctcaaaaatgactttttaaaaaactgcattcaattacagtagcattctagttaccttgaaatatccccccagtaccattctgcatcctgaagagaaacagaactgtccttcattccatttggaactgctgaagtcattggcttaggtggctttggtggaagagctagaagagaaatgaatattactctgtagatgtaaattatttactgttttctaatttcctcaggagcagctcactaaccaaggtatgttaagattctaataattatcaatcaaattgagtattattttatgttaaatgttagcaacagaaggaatccttttgattgcctaaaaagtgaaaacgtcaagatatttgtttttttccttcttatgaaacattgacttctaagtctgtaaaacttca

SEQ ID NO: 690948 - DNA, 1845 bp, Homo sapiens
aaggcttaraaaagtcaatattgtttttctatccttttctcacataatttcctttattgaagcttcccccaaagtttcctctttcttcagcttaaaaatttgaagagcttcctatttctgaatggatcctaaaaggctgatggcaagtttttctggctgtggtctttgatttgtaactaaatattcatttatacaatactcattgagtcacttgttaagtatttattgaacacctgttatgtgccatgaactgacagaagtgaagggaatatagtgtttaaaaaatcagatttagtgcctgtactctcaaagcttatacgttagagaaacagacccaggttctataggtaacaaagcataacaagagacaatgagggagaagacacaagaactaagggaatataaaaagggagttgattcaggctgtgggtggtgatacatgcctacaatcccaggaccgtgggaggcagaggcaggaggatctcttgatgccagaaatttgagaccagccttgggaaacataatgagatcctgtccttaaaataattaaaataaataaagaaccaggcacggtagcacactctggtagccccagctacactgaaggctgaagtgggaagatcagtcaagccccggagtttgaggttactgtgagttatgattgtaccacaacacactagcctgagcaacagagcgtgacaaaaagagagagatttgattgtagggtaagggaagtcattcctgaagcagtaatatttatagcaagactattagaagaaacagcagtaggctagacagatattgtcccaaaccacatccatggctccacactccaaaaacattgccaactgttgttgcattacgaaaaataaattaaaattgggcattctggaaagtcacttttgtccaagagatgtcaatatgaagaccagagtgatacgtatattcatatgtaattcatttctcaaaacttcatccaggatcatgctacacttgaatagtatcttggggaagttatggtcctgatatcctttaaaaggtgtagttcatctctgaatattaagtaaatattggagtatctcagaaggcatataaaataggctttcaatgacctgtaaaagtactctcttaatggaattccaggtattatttagttttttattaagtgaattaattcagaaacattctccatttagaggaaaaaaatcctctgagagtcattctccaaagactacatcatcaagaatacctgagagcagatatagagtctctcattaaaaatggtagaagtttttgagtgtataatcatttcaaacttattaaacacttttcttgcttgcttgcttttttttttttttttttttttaaggctgagtcttgctgtgttgctcaggctggagcgcagtgactgctcacaggcacaattcatagtctactacatccttgaactcctggcctcaagcaatcctctcacttcggcctccagagtagctgggactacagatgcttgccactatgccagatttgaacacctactcgactctgggtgcttcgttataccaaatctttttatcagatgcttttattctcaaactaccctccaaaggagaatttcccacccacattgtaaatcgaagaaaacttagaagatgagtttgattgctccagcccacagaaaaaataaaatagtagtaaatgtatacatcagtctgaatttctgacccttgattaagcctagattgactaaaaaaacattgattaagttattaatggctggatggagaaagaaccacacgtggtctaggttgtgttggtatttagaatggaaccccagataccattcac

SEQ ID NO: 690949 - DNA, 1588 bp, Homo sapiens
tggcaggtgcctgtaatcccagctacttgggaggctgaggtaggagagtcacttgagtcagggagacagaggttgcagtgagctaagatcatgccactgcactccaacctgggctacagaacaagagtgcatttaaaaaaaaaaaattaattgtgcaacatttattccttcatttaatcccccaccactacaaccaccatcactcactgatttatcaaaaattggataattatttgtgttaatctttcttaaatgtatacatagctcacatttattataattttaatattagtagtattttggatctttatttagaagtttggtgatgttttcgtgaccagaaatatgccttaggaacttaagtcttgtttatatctattttacatagcctagggtaaagttggtttcctcatgtgtcatttcacttaaagcctcagttttcaagaacctttcctcagcattaagtgaggagcaactatacaaaatttgcaagaatgaaactcagtgactatctgtctgtgactaaatttatttcaacaaattgaggattcacttttcaactaatttgtattgaggtactatgttgactaataagatgcacccttgtcctcaatagataccgtattgaagagggaaagaaagtaatacaggcacaagtgactgtattacattaatgcatttaaaaggtaacattttaagaccttgaatttcaatgagtagaaataagaaagtatgtgtatttcaaatgagtaaaatataatgaacaacaaaagtagaaaaatgcagtgtattcataataaaatataaggtaaaaaattataggtcataaaataaataattacagctaataattttttggtcattgactttttttcatctctgactttttattgccattcccttttctaagagtcacttcatttaattttcacaattacacttcatagtattatgtcttctctgttttcatataaggaaagtgtacctaagtacaataacttgaacaaggccatacaactagcaggtgggcaggtagaattggaccatcactgtctgtttaacctgaaagtctatgtttacccatacccttactaaacaacaagcatagtatgcataccaggaagtaataggaagtaaggctagaaagattkatcttatttctggaatttcataatatctgtgagttacttatgagtgttattacaggacttatgccaaaacattactatctctactttttctgactatgtcttgtccctgcaactgtttctgttctctagtacacgtatcccaatgtagtatagttatgaaatatataattcactcaaaccagtctgtgaatataaacaatttctttctttctttctttctttttctttcctttcttttttttttttttttttttttttgacagagttttgctcttgtcacccaggctgggtgcaatggcgtgatctcagctcactacaaactctggcctcctgggttcaagtgattctcctgcctcagcctcctgagtagctgggattacagatatgccccaacatgcctggctaatttttgtattattagtagagactgggtttca

SEQ ID NO: 690950 - DNA, 595 bp, Homo sapiens
ccatttagcctaggtgtatagcaggttatacatctaggtttgtgttgagtacactctaggacgtctgcacaatgaaattgcctgataatgagtttctcagaacacatccccatcattaagcgatgctacatattcttaaaaccttcctacacacaaaacacaagaaaaataaacataaagcttgttacatactaagctggtcctgggtggccaaaatcatacaaccaatcatggtgacaagaacttaaaacgaaaagtatcagggtaccgtgaagatagaagattttttttaattaaaatattaacaggattaaaaagtgatccattaccattccttcactgctatgtgcaaggatcatcttctttgtctaattcaccttcacagggacacagtgtagtggttaagtgtataggctctggaatcagactgccagttcatagccaaggcattatcagttayggcgtgaccttgggccaataggtacacccccctgtgactcaagttcatctgtaacataagggctacctatgtctcaaagggttgctgtgaggattaaatgaataaagccctttaggacagtgctcagtacacagt

SEQ ID NO: 690951 - DNA, 614 bp, Homo sapiens
ttctattccaggaagtgaaaaactggcaaggtaaatggtttcttcatgtattaaatactgagaaaggaccctgaaaatgtcttacatttgtgacaagagaagaagctgggattctaaacctcgatgaagaaagaaacggagtattcctatgtatgccaatataaagtataacaacttgaaagaatatattaatactatattgtacactttgcagttgagagttttagacagaacattgtggctaaggaaaccactcctactctcactttcacataaataacttggcctctcaagtgatctacactggcatagaaagagacgtacaattaaaaaataataataataaccagaagtatagttatgggttacaagactatatgattaaaaargaaaaaaaaagatcttggaaaaagcattctcagcccagattaatttataattcttagtgttgaggtgatatttacatgttaactatctggttgtgaaagcaaacaagaaatatattcagtgataaaatgtgtaatattcatgtgtaaactaacccagaaaaaaattcttaatcattttataatgaatgataacttttctcagaagccacaaaatggtgcttttat

SEQ ID NO: 690952 - DNA, 614 bp, Homo sapiens
ttctattccaggaagtgaaaaactggcaaggtaaatggtttcttcatgtattaaatactgagaaaggaccctgaaaatgtcttacatttgtgacaagagaagaagctgggattctaaacctcgatgaagaaagaaacggagtattcctatgtatgccaatataaagtataacaacttgaaagaatatattaatactatattgtacactttgcagttgagagttttagacagaacattgtggctaaggaaaccactcctactctcactttcacataaataacttggcctctcaagtgatctacactggcatagaaagagacgtacaattaaaaaataataataataaccagaagtatagttatgggttacaagactatatgattaaaaaggaaaaaaaaagatcttggaaaaagcattctcagcccasattaatttataattcttagtgttgaggtgatatttacatgttaactatctggttgtgaaagcaaacaagaaatatattcagtgataaaatgtgtaatattcatgtgtaaactaacccagaaaaaaattcttaatcattttataatgaatgataacttttctcagaagccacaaaatggtgcttttat

SEQ ID NO: 690953 - DNA, 1063 bp, Homo sapiens
ccgccaaaatatgattgaatattttctttttacttactttttattcctttttaaatcagtaatacacaaaatataattaatattttgttgattaaacatttatcaatattatttgattcaagtacaggtaaatagcagtcttktctttggtcaagacaaatatttcaaagtttaatgaacattaaatatattcaaatgtattgaattccttttagtatttcagccaaaaatgtcatgataacgttttcacttatcatatatagtttcttctctaaaatcttttaatattgtgtcaataaatttcttcagaatacctacacttctaacagtttctggtaaagaccattttcatcaagtaaaggacatcagattgtttctgttgccatctatggcaagcagtgggctgaatctgataaaagttagtagtcctatttctgtgagctccttgcagcttgttctcagtatcagatacttatagtgctgacatttcaaaagcacagatggtgcagaggaagtcctaagacgtcaccagagggcggttttcaaatctttgtcacaggtttagagagatacaacttgaaagaccaaaactttttcactaagctctccatttgcaactgaaagttagttatcttcaaaaacactgaaattacaaagaccttacctgaatttgtaaaatagttacatcatatgttttctatgaattagaggcaatgttggcgctttcaacctttgcataaacattgtaaataatttctataggagtatttatatttccttccgtgtactgatattgttgtaactctccatcatgagctttgtaaaatataacaataataatcgtatagtgtggtattaaaatatctatattttattgtaattattggactataggttgtctcagagtccagaattttcagtccttcttttctcttgcagaccattgtgcctagtttagtatttggtatgctgatggtgcaagtaaatgttcactgaatgtttaaatgaatgaatattttttcagttatgagactaaaattattttatgtgaaggagaagggac

SEQ ID NO: 690954 - DNA, 652 bp, Homo sapiens
attgcttatacaggttgaatacctgttattcaaaatgcttgggacaagaagtgtttgggttttgttttktttttttttaagattttggaaaatttgtatatacataaggagatagtttgattacgagacccaactctaagcacaaaatttatttatgtttcatatacaccttaaacatataggctgaaggtaattctatacaatattttaaattatttgtttaatgaggtagagtttatgctaggtacttatgtgtagaattttatacttgtggtatgatagtagtgtttcacgtttcagtaaagtttcagattttggaacatttgggatttcaaatatttggatgagaaatgctcagctttttatagaaaatgaaatgtaaaaatttaaataaatctgatagaaaaatataggttttaaaaaatgttacatggaaaattcaatatcaatgaaaatttaatttaatttagaatgcctctgcactacaggatgggagaggtgacacatgcctgtaatcccagtactttgggaggccaaggtgggaggatcacctgagcccaggatttccaggcagcagtaagcaacgatcatgacattgcactctggcctgggtgacagagcgagaccaggtctctaaaaaattaataataat

SEQ ID NO: 690955 - DNA, 586 bp, Homo sapiens
aaaatacaaaaaaattagccaggcatggtggtgggtgcctgtagtcccagctactcggaaggctgaggtaggagaatggcgtgaacccaggaagcagaccttgcagtgaactgagattgtgccactgcacttcagcctgggcaacagagcaagactctgtctcaaaaataaaaaaaaataaaaaataaaaaaactcccctttatatatacgtctatcttattagttctgtcccactagagaaccctaatacagcctcctacaacaataattatccaacccaaaatgtcagtaatgccaaggatgaggaaccttggtctagagagtgacaaatgatgagaagaaataaccaaatgcatgacccatgccattctgctctctcattggaggggtagtgaaaggtkgggggtggctaggggaactcacttttccaagcctccctgtactagatccaagaccaggtggaagaggatggctcccaactcctgatggccgacacctcagtcatctctttcataaagattaaaggaaaaattcaaatatcatagcatcttgatttcactggaacttatataggcaaaactccta

SEQ ID NO: 690956 - DNA, 1493 bp, Homo sapiens
actcttctcccacgttcttgctaattggcagcagcagacagtgtgtgagttgggatatgtgaaagatggagaaaaacaaaaataaagccaaactctaaaactccaatcatctttaattagtcaagaaaaatcaacagcttgagaatgtacacctactaagacagcgagaagggatggctacaaagtgcttctgtctctaaggatcttgtgcccctcatttaatcttccctggcgtttgtttgttccacatgttaaaaaatgttatcctctgtttttaccagaggtagcagtgcttaatttagaaattttaaaaatgcagaaatatccgtaatagatctggtgctacaaggtcattctccctgtctctgtttctctccctgatggtagagaatatcctatattgtgagaataaaaatagccagagtcagatgtcagttaatcagagtctacctaacaggatggttaatcaaagcactttttttttttctgtttaacaacgtggaatagtgaaaacatcatcaactttgattctctggagcctgggcttaaaatcttccatggctttctagctgtgtgactttaacaaaatcaatgtacttctctgagactcagcttccacactagtaaaatggttttgttataaatacacacacacacacacacacacacacacacatatacacacatatttttttttgagatggagtcacactatgtttcccaggctggagtgcagtggcacgatctcggcttactggaacctccacctcccgggttcaagtgattctcctgccacagcctcccaagaagctaggattataggttcccaccaccacgcccagctaattttttattttttgtagagaccgggtttcaccatgttggccaggctggtctcaaactcctgatctcaagtgatccacccacctcggcctcccaaagcgctgggattacaggcatgagccaccaggcatggcctcgttttgttattactagtaggtagtgtgtgataaggataaaagtaaacaatacatgcaaagcaaattgttggaactcaatagatattagtcccattccctgcctctccaagacacaacataacacctcccattcacataatacacagttatttgttgttgttactgttgagtgttttgttgaatacttttagaaaaaagagtaaaaagtattagaaaccaaaccaatagtgaagatttaaatcaaacaaaggcaacstctgtagcaaggtctggggtgaatttatgacaggtatgactcattgtcttcagttttctatgcacaaaggaaatgagaactggcagttcttcaggatgaccctagcattctgcaagatcctcaatcatctctgaaaagggacactgtgttcctttttggttaggactgtttggttgcaagtaacataagctgcctcaagctggcttgcatatgcattttgaggtgtgtgtgtacacgtgcctgtgtgtggtgaaggg

SEQ ID NO: 690957 - DNA, 1493 bp, Homo sapiens
actcttctcccacgttcttgctaattggcagcagcagacagtgtgtgagttgggatatgtgaaagatggagaaaaacaaaaataaagccaaactctaaaactccaatcatctttaattagtcaagaaaaatcaacagcttgagaatgtacacctactaagacagcgagaagggatggctacaaagtgcttctgtctctaaggatcttgtgcccctcatttaatcttccctggcgtttgtttgttccacatgttaaaaaatgttatcctctgtttttaccagaggtagcagtgcttaatttagaaattttaaaaatgcagaaatatccgtaatagatctggtgctacaaggtcattctccctgtctctgtttctctccctgatggtagagaatatcctatattgtgagaataaaaatagccagagtcagatgtcagttaatcagagtctacctaacaggatggttaatcaaagcactttttttttttctgtttaacaacgtggaatagtgaaaacatcatcaactttgattctctggagcctgggcttaaaatcttccatggctttctagctgtgtgactttaacaaaatcaatgtacttctctgagactcagcttccacactagtaaaatggttttgttataaatacacacacacacacacacacacacacacacatatacacacatatttttttttgagatggagtcacactatgtttcccaggctggagtgcagtggcacgatctcggcttactggaacctccacctcccgggttcaagtgattctcctgccacagcctcccaagaagctaggattataggttcccaccaccacgcccagctaattttttattttttgtagagaccgggtttcaccatgttggccaggctggtctcaaactcctgatctcaagtgatccacccacctcggcctcccaaagcgctgggattacaggcatgagccaccaggcatggcctcgttttgttattactagtaggtagtgtgtgataaggataaaagtaaacaatacatgcaaagcaaattgttggaactcaatagatattagtcccattccctgcctctccaagacacaacataacacctcccattcacataatacacagttatttgttgttgttactgttgagtgttttgttgaatacttttagaaaaaagagtaaaaagtattagaaaccaaaccaatagtgaagatttaaatcaaacaaaggcaacgtctgtagcaaggtctggggtgaatttatgacaggtatgactcattgtcttcagttttctatgcacaaaggaaatgagaactggcagttcttcaggatgaccctagcattctgcaagatcctcaatcatctctgaaaagggacactgtgttcctttttggttaggactgtttggttgcaagtaacataagctgcctcaagctggcttgcatatgcatttkgaggtgtgtgtgtacacgtgcctgtgtgtggtgaaggg

SEQ ID NO: 690958 - DNA, 638 bp, Homo sapiens
cccagtaattattactctggtgttgcctatgatgattttctataattccctttgcacttattaattggaattctgcgtaaggaagtagtgtccttttgcccccatttatttattcaattataccgatatggactcaaggatattaattttattttatgggttacaattcatttctttcwtatttattttgtttttcaaatggtcccaggattaaccattgggagctctttcaggttgattcctatcaatatcacctcgttttctggttgtaaacttactttcgggtcccacgatatgctccaggctcatcttctgttttccctgtccgtgctctggagtcaaccatttttccaaggatttattgttccttttattgtaagatgatatttataaatcaagatcttggtgctagctttgcacattgttactgaggtttcagtgcttctagtccctctcaacagaaagagctaggaagtatatcatatatgtacagcacaaacatacatatagctatgtttatttttatatctatgcattctgtgggagtgcatattaaaagccatgaattcataccgatggtataggttataatctaacaccacagagtttctttgaccttcatttccctcatttttatc

SEQ ID NO: 690959 - DNA, 638 bp, Homo sapiens
cccagtaattattactctggtgttgcctatgatgattttctataattccctttgcacttattaattggaattctgcgtaaggaagtagtgtccttttgcccccatttatttattcaattataccgatatggactcaaggatattaattttattttatgggttacaattcatttctttcttatttattttgtttttcaaatggtcccaggattaaccattgggagctctttcaggttgattcctatcaatatcacctcgttttctggttgtaaacttactttcgggtcccacgatatgctccaggctcatcttctgttttccctgtccrtgctctggagtcaaccatttttccaaggatttattgttccttttattgtaagatgatatttataaatcaagatcttggtgctagctttgcacattgttactgaggtttcagtgcttctagtccctctcaacagaaagagctaggaagtatatcatatatgtacagcacaaacatacatatagctatgtttatttttatatctatgcattctgtgggagtgcatattaaaagccatgaattcataccgatggtataggttataatctaacaccacagagtttctttgaccttcatttccctcatttttatc

SEQ ID NO: 690960 - DNA, 597 bp, Homo sapiens
caagtgcttactgtggaccggggcactgaattacgtgttactcacccattcttcctattatgtaggggctrttattatcccccgttttccagatgaaaaaagtgaagctctaagagatgtaaaatcctagggtcacatagtaaggtctgtgtccttaaaactcaaggtttagtttcagttggataaagtctgaagtggtcaagctggtagaaaaggaaaaggcctgtagaacatcagctcccagctattacctagaaatttttcatctcacaagggattatctatgtctatataaaacctgtgctcttttgcatccatctgggaaagactttaagggaaaatatcctaggcagcaaatttctagaacttccactaagggcagaaacatttcaagaaacaggtcctgcaagttaagtgtatgctaggagccaaaagaaccaactcaataatcttcaccattccaaactctgccctgtttccactcccctttcctgctggttatacaatcatgggatgaagggtgcatgctggaaatgctggacagtgggctgtcattaagaagcagtatttaatggcatctgtcccaaagggaacaca

SEQ ID NO: 690961 - DNA, 659 bp, Homo sapiens
tgaaaactaataaaaatcaatcaaccctagccacggtgataaagagataaagcacaagttaatatttatgatttaacagtggattacaaaaaaaccctgccatttttgcagactttaaaaaataagaaaatatgccaaataattacaaatttaaagataaaatagacaaattcatagaaaaaacatacttttacaagcacaaaaagaaatagaaaaatcggaacatttctacacttattcaagatcttgaaactgtactaaaaacttcccacaaagaaatctgcaagaccagatggcttcactagtgagtccatccaaatgtttaagaaggaaataacattctttttcaaactcctttacaaaaattacaacgaaaaaagaaggggagatattttcaacttcttttatgaaacatcatatctgtgaacaccataayattataaggacatgaaaaggtaggaaaaccagaagctataaaccaattgtcctcatgaaaacagattttaaaataaacaataatagcaaattgaatttatcagtatataaagaggatgctgaatcataatcatgtagcttatttgtgaaagcatttatttttattcttttaaatacttggtaatcacttgatttatattttcttactaaataaaaaagcaaaa

SEQ ID NO: 690962 - DNA, 659 bp, Homo sapiens
tgaaaactaataaaaatcaatcaaccctagccacggtgataaagagataaagcacaagttaatatttatgatttaacagtggattacaaaaaaaccctgccatttttgcagactttaaaaaataagaaaatatgccaaataattacaaatttaaagataaaatagacaaattcatagaaaaaacatacttttacaagcacaaaaagaaatagaaaaatcggaacatttctacacttattcaagatcttgaaactgtactaaaaacttcccacaaagaaatctgcaagaccagatggcttcactagtgagtccatccaaatgtttaagaaggaaataacattctttttcaaactcctttacaaaaattacaacgaaaaaagaaggggagatattttcaacttcttttatgaaacatcatatctgtgaacaccataatattataaggacatgaaaaggtaggaaaaccagaagctataaaccaattgtcctcatgaaaacagattttaaaataaacaataatagcaaattgaatttatcartatataaagaggatgctgaatcataatcatgtagcttatttgtgaaagcatttatttttattcttttaaatacttggtaatcacttgatttatattttcttactaaataaaaaagcaaaa

SEQ ID NO: 690963 - DNA, 1021 bp, Homo sapiens
tcattacaaatacttaagtatacatatttttatgacaatatatggttttattccatctttctaaacacatagactttcacactttacttgtcccattaggtgtgcattcgtatttcattgttttcatgactctgatagaattatcataatgatcgtttttgatgtaacaattatttttatacgacctttgtgagctatttattgtatcacaaatttgtcctgggtcttctcccagttcctctagttggcattttcagtttcctgaccatgctgtcactatggatactctcaaagaaagaggaaaaaaccagaaaatccatttcatgtaggtcaattcctccaagtctgtactattgtccacccttttccaataactaaatcaatgagtaaaatttacctgcttctattcactctctagtgcccttcagaaatttctgttttgtggttgtttatagattttaaaatggtttactgtaacttactcttccataggagaagaggaactcgggctaccccttcattctgctttctttttgtctttttgagcaggatgctgagcctatcatacattttaaaattttgaatgctattataatggagctgtggaagctttctctatagatgaatgaatgagttaattaatgyccactccctcctctcatttctcagtcctgtcaagcaaaactctaaagtgttgcatatgtatgtgatgtgatgcaaatgaaacatatgatcttgtaaaacatgcattgtgtggtgttcacccattttcaattcctgtaaatggcatgataatatagttgtcaggctagtcccttttcttccatgatgcttcatggttttagcatctagttatatttcactatgtacacataaaatgtttattgtaactattgcctagacgttcatacttttcatctctcactttcaatttctagtcgcccactgatagaaaaagtaattaactgtccattagcatgaatgacgtgtggataaacatccctttaaaccttgacatctg

SEQ ID NO: 690964 - DNA, 997 bp, Homo sapiens
tctgtgagtcattttattcaactaccaaaaatgaagacgtttatgaagatgtcaacatttgcagccaactggcctgaagtgaaggtgggcctggagacccctgaaattgcagctggggtcagaatcttaggtatatttggcagttcggatgactgtgaattttaagttcaagattggctaaatcctgttagggtctttgatcaaatattaaggtattaactcctagtgcrttcctgatgactcaaatgatagagctgataaaagtaagcacagtaaaacttgcatttctgaaaataagtatgactgtaatttttaagcacattgagtgttacaggaaaagagaaatatctggttaatacaacccaaaatagaaagcttaagctgggacagcttttacaatcttttcttttataaaaaacaaaatcaaagcagaaaattttatactaatttcagtagtggtgaaaagctaatttaatgaaatttaatgatctttcagggttaaaacaaacattttccaaaaaatagaaaaaaaatttgttgataagctgcatcaattaaatacctaccagtaatatcaaatttctggttgaaatattgagcactctcttcccaaatcaaaaacattatattgatgtttactttccatataatgtgtggaacttctgctaaacattgaactggtcatcacagctgatgtagtaaggcaaggaaaaagtaaaaggcataaacctgagaaaaagaagaaagctgcagaagatatgatttggtagttgcaaaatccataggaacagtcaaattcccagtggaaattactatatgtaaatgtgatacaatcacaatatgaaaacattgtatgtctatactctagtgacaattagaaaatgaaattttaaaatacatcttacaatgaatcagaaataccaaataccaaatttgacaaaacttgtttacaatctatacattggaaatgaaataagtaattgctaagaatttttta

SEQ ID NO: 690965 - DNA, 997 bp, Homo sapiens
tctgtgagtcattttattcaactaccaaaaatgaagacgtttatgaagatgtcaacatttgcagccaactggcctgaagtgaaggtgggcctggagacccctgaaattgcagctggggtcagaatcttaggtatatttggcagttcggatgactgtgaattttaagttcaagattggctaaatcctgttagggtctttgatcaaatattaaggtattaactcctagtgcattcctgatgactcaaatgatagagctgataaaagtaagcacagtaaaacttgcatttctgaaaataagtatgactgtaatttttaagcacattgagtgttacaggaaaagagaaatatctggttaatacaacccaaaatagaaagcttaagctgggwcagcttttacaatcttttcttttataaaaaacaaaatcaaagcagaaaattttatactaatttcagtagtggtgaaaagctaatttaatgaaatttaatgatctttcagggttaaaacaaacattttccaaaaaatagaaaaaaaatttgttgataagctgcatcaattaaatacctaccagtaatatcaaatttctggttgaaatattgagcactctcttcccaaatcaaaaacattatattgatgtttactttccatataatgtgtggaacttctgctaaacattgaactggtcatcacagctgatgtagtaaggcaaggaaaaagtaaaaggcataaacctgagaaaaagaagaaagctgcagaagatatgatttggtagttgcaaaatccataggaacagtcaaattcccagtggaaattactatatgtaaatgtgatacaatcacaatatgaaaacattgtatgtctatactctagtgacaattagaaaatgaaattttaaaatacatcttacaatgaatcagaaataccaaataccaaatttgacaaaacttgtttacaatctatacattggaaatgaaataagtaattgctaagaatttttta

SEQ ID NO: 690966 - DNA, 621 bp, Homo sapiens
gttgcctgtgctttttgaggtcttgcccaagaaatctttgcccagaccaatgtcctgcagcatttccccaatattttcttctagtagtttcatagtttcacgtcttacattgaagtctttaattcattttgatttgatttttgtatatggtgagagatggaggtctagtctcattttcctgcatatggatatccagttttcccaacaccatttattgaagagactgttatttccccagtatctgttcttggcacctttgtggaaaatcagttggctatgcatacatagatttatttatgggttccctattctgtttttttagtcaatgagtctgtttttatggcagtaccatgctgttttggctactatagccttatagtatattttgaagtcagatagtgtgatcttccagctttgtttttttttcctcaggattgctttggctattcagggtcttatgtgtttccatrtgaattttaagattgtttaaggctaggacttcctgatattaaagaattattgttaattttttgaaatagtggatttgcaaaatatttgcatgaaataatttcttattagaaaaataaccaatatgcaataaccccaaaatgcttattggta

SEQ ID NO: 690967 - DNA, 653 bp, Homo sapiens
ggctaagtttccaagtttatttctcagggatctatagcaggtgttagagactctgtctgtccaaacagccacagaaggagggctttttgggagattttgtgaatttactgtcagctttcttgcatttgggtggacaccctctcctcctgactgtgccgaaatagaatgatgatgcactgtggataactgaagaggataccttggagaagtggggagtaaacccaagccagaagacagccagtggatatatgttttgcttcagacaacagagatggtgataagagctgaataataataattatgrtagcaatgataaaacaactacactagtatttatgaagtgatttctagtactttacttgtattatttcatttaccccgcttcagggactctataagtaggtacaggtttaatgtcccttatctgaaagtctagtaccaggagtattttggattatggatttttttcagattttggaatatttgcattgtacagtgagcctttgaataacacaggtttgaactgcatgagtccacttacatgtggatctttttcaaccaagggcaggtggaaaataaggtattgggagatttaaaaactgcccatacagagggctgaatttctatgtacatgagttccacacggccaactg

SEQ ID NO: 690968 - DNA, 1264 bp, Homo sapiens
ggaatgcaaaccctattgtgaactgcacatgtgaggaatctaggttgcacactccttatgataatctcatgcctgatgatgtgtcgctgtctcccatcaccctcagwtggggctgtctagttgtaggaaaacaagcccggggctcccattcattctacattatgatgagttgtagaattatttcattatatattataaggtaataataatacaaatgaagtgcataataaatgtaatgcacctgaatcatcccaaaaccatccaccatgtcccactatccatggaaaaattgtcttccacaaaaccaatccctggtgccaaaaagttttggactactggtttaggctatggatattaaagtataaagatcttaattaggagttgtgttcactctaaataaaaatagtgtatctggatctttaagttctcagtactgaacagcagcatttcttaaggaagaaaagaggcatcattctttactttggacggatgccaccatgttatagtagagagatttctgattggctaccaaagttcttgatgcctgatgtacacacacttccttccatttattccatcaaacattaatctaaagactaatatgaagggattttgcaaatgtaatgaaggtcctacagcaattgatcctaaaatagaaagataatctgggtggggatgacttaatcacacgatccctttaaaggacagagttttctctaactggccagagaagagaaagtcagactctggcagtaatagaaggatttgaggcatcattgcagctctgacaatggagaaggtcacagagcacggaatgtgggtggctcatagacactgggagtggccttcagctgacagccatcaagaaaacaaggatttcagccctatggttgcaaggagctgaattctgccaacaacaagaatgagtttgaaagcagattttctctttgttgtctccagctgagcacttagcctggtcaacaccttaatttcagctttgtggtaccttgcacagagaacacatcaagacgtgaaagacttctgttctacaaaattgtgagctaataaatggtgttatttgaagctcctaagtttatggtgatatgctatgcaccaatagaaaattaatacaccacgttcccaagatgttcacaggaactctagagaggacaaaattttcccattgtagcaactgtccaaagaagttgccttgcatatatacatgctaggtattgccttgcatatatacatgctaggtataatc

SEQ ID NO: 690969 - DNA, 1264 bp, Homo sapiens
ggaatgcaaaccctattgtgaactgcacatgtgaggaatctaggttgcacactccttatgataatctcatgcctgatgatgtgtcgctgtctcccatcaccctcagatggggctgtctagttgtaggaaaacaagcccggggytcccattcattctacattatgatgagttgtagaattatttcattatatattataaggtaataataatacaaatgaagtgcataataaatgtaatgcacctgaatcatcccaaaaccatccaccatgtcccactatccatggaaaaattgtcttccacaaaaccaatccctggtgccaaaaagttttggactactggtttaggctatggatattaaagtataaagatcttaattaggagttgtgttcactctaaataaaaatagtgtatctggatctttaagttctcagtactgaacagcagcatttcttaaggaagaaaagaggcatcattctttactttggacggatgccaccatgttatagtagagagatttctgattggctaccaaagttcttgatgcctgatgtacacacacttccttccatttattccatcaaacattaatctaaagactaatatgaagggattttgcaaatgtaatgaaggtcctacagcaattgatcctaaaatagaaagataatctgggtggggatgacttaatcacacgatccctttaaaggacagagttttctctaactggccagagaagagaaagtcagactctggcagtaatagaaggatttgaggcatcattgcagctctgacaatggagaaggtcacagagcacggaatgtgggtggctcatagacactgggagtggccttcagctgacagccatcaagaaaacaaggatttcagccctatggttgcaaggagctgaattctgccaacaacaagaatgagtttgaaagcagattttctctttgttgtctccagctgagcacttagcctggtcaacaccttaatttcagctttgtggtaccttgcacagagaacacatcaagacgtgaaagacttctgttctacaaaattgtgagctaataaatggtgttatttgaagctcctaagtttatggtgatatgctatgcaccaatagaaaattaatacaccacgttcccaagatgttcacaggaactctagagaggacaaaattttcccattgtagcaactgtccaaagaagttgccttgcatatatacatgctaggtattgccttgcatatatacatgctaggtataatc

SEQ ID NO: 690970 - DNA, 1264 bp, Homo sapiens
ggaatgcaaaccctattgtgaactgcacatgtgaggaatctaggttgcacactccttatgataatctcatgcctgatgatgtgtcgctgtctcccatcaccctcagatggggctgtctagttgtaggaaaacaagcccggggctcccattcattctacattatgatgagttgtagaattatttcattatatattataaggyaataataatacaaatgaagtgcataataaatgtaatgcacctgaatcatcccaaaaccatccaccatgtcccactatccatggaaaaattgtcttccacaaaaccaatccctggtgccaaaaagttttggactactggtttaggctatggatattaaagtataaagatcttaattaggagttgtgttcactctaaataaaaatagtgtatctggatctttaagttctcagtactgaacagcagcatttcttaaggaagaaaagaggcatcattctttactttggacggatgccaccatgttatagtagagagatttctgattggctaccaaagttcttgatgcctgatgtacacacacttccttccatttattccatcaaacattaatctaaagactaatatgaagggattttgcaaatgtaatgaaggtcctacagcaattgatcctaaaatagaaagataatctgggtggggatgacttaatcacacgatccctttaaaggacagagttttctctaactggccagagaagagaaagtcagactctggcagtaatagaaggatttgaggcatcattgcagctctgacaatggagaaggtcacagagcacggaatgtgggtggctcatagacactgggagtggccttcagctgacagccatcaagaaaacaaggatttcagccctatggttgcaaggagctgaattctgccaacaacaagaatgagtttgaaagcagattttctctttgttgtctccagctgagcacttagcctggtcaacaccttaatttcagctttgtggtaccttgcacagagaacacatcaagacgtgaaagacttctgttctacaaaattgtgagctaataaatggtgttatttgaagctcctaagtttatggtgatatgctatgcaccaatagaaaattaatacaccacgttcccaagatgttcacaggaactctagagaggacaaaattttcccattgtagcaactgtccaaagaagttgccttgcatatatacatgctaggtattgccttgcatatatacatgctaggtataatc

SEQ ID NO: 690971 - DNA, 1264 bp, Homo sapiens
ggaatgcaaaccctattgtgaactgcacatgtgaggaatctaggttgcacactccttatgataatctcatgcctgatgatgtgtcgctgtctcccatcaccctcagatggggctgtctagttgtaggaaaacaagcccggggctcccattcattctacattatgatgagttgtagaattatttcattatatattataaggtaataataatacaaatgaagtgcataataaatgtaatgcacctgaatcatcccaaaaccatccaccatgtcccactatccatggaaaaattgtcttccacaaaaccaatccctggtgccaaaaagttttggactactggtttaggctatggatattaaagtataaagatcttaattaggagttgtgttcactctaaataaaaatagtgtatctggatctttaagttctcagtactgaacagcagcatttcttaaggaagaaaagaggcatcattctttactttggacggatgccaccatgttatagtagagagatttctgattggctaccaaagttcttgatgcctgatgtacacacacttccttccatttattccatcaaacattaatctaaagactaatatgaagggattttgcaaatgtaatgaaggtcctacagcaattgatcctaaaatagaaagataatctgggtggggatgacttaatcacacgatccctttaaaggacagagttttctctaactggccagagaagagaaagtcagactctggcagtaatagaaggatttgaggcatcattgcagctctgacaatggagaaggtcacagagcacggaatgtgggtggctcatagacactgggagtggccttcagctgacagccatcaagaaaacaaggatttcagccytatggttgcaaggagctgaattctgccaacaacaagaatgagtttgaaagcagattttctctttgttgtctccagctgagcacttagcctggtcaacaccttaatttcagctttgtggtaccttgcacagagaacacatcaagacgtgaaagacttctgttctacaaaattgtgagctaataaatggtgttatttgaagctcctaagtttatggtgatatgctatgcaccaatagaaaattaatacaccacgttcccaagatgttcacaggaactctagagaggacaaaattttcccattgtagcaactgtccaaagaagttgccttgcatatatacatgctaggtattgccttgcatatatacatgctaggtataatc

SEQ ID NO: 690972 - DNA, 1264 bp, Homo sapiens
ggaatgcaaaccctattgtgaactgcacatgtgaggaatctaggttgcacactccttatgataatctcatgcctgatgatgtgtcgctgtctcccatcaccctcagatggggctgtctagttgtaggaaaacaagcccggggctcccattcattctacattatgatgagttgtagaattatttcattatatattataaggtaataataatacaaatgaagtgcataataaatgtaatgcacctgaatcatcccaaaaccatccaccatgtcccactatccatggaaaaattgtcttccacaaaaccaatccctggtgccaaaaagttttggactactggtttaggctatggatattaaagtataaagatcttaattaggagttgtgttcactctaaataaaaatagtgtatctggatctttaagttctcagtactgaacagcagcatttcttaaggaagaaaagaggcatcattctttactttggacggatgccaccatgttatagtagagagatttctgattggctaccaaagttcttgatgcctgatgtacacacacttccttccatttattccatcaaacattaatctaaagactaatatgaagggattttgcaaatgtaatgaaggtcctacagcaattgatcctaaaatagaaagataatctgggtggggatgacttaatcacacgatccctttaaaggacagagttttctctaactggccagagaagagaaagtcagactctggcagtaatagaaggatttgaggcatcattgcagctctgacaatggagaaggtcacagagcacggaatgtgggtggctcatagacactgggagtggccttcagctgacagccatcaagaaaacaaggatttcagccctatggttgcaaggagctgaattctgccaacaacaagaatgagtttgaaagcagattttctctttgttgtctccagctgagcacttagcctggtcaacaccttaatttcagctttgtggtaccttgcacagagaacacatcaagacgtgaaagacttctgttctacaaaattgtgagctaataaatggtgttatttgaagctcctaaktttatggtgatatgctatgcaccaatagaaaattaatacaccacgttcccaagatgttcacaggaactctagagaggacaaaattttcccattgtagcaactgtccaaagaagttgccttgcatatatacatgctaggtattgccttgcatatatacatgctaggtataatc

SEQ ID NO: 690973 - DNA, 1264 bp, Homo sapiens
ggaatgcaaaccctattgtgaactgcacatgtgaggaatctaggttgcacactccttatgataatctcatgcctgatgatgtgtcgctgtctcccatcaccctcagatggggctgtctagttgtaggaaaacaagcccggggctcccattcattctacattatgatgagttgtagaattatttcattatatattataaggtaataataatacaaatgaagtgcataataaatgtaatgcacctgaatcatcccaaaaccatccaccatgtcccactatccatggaaaaattgtcttccacaaaaccaatccctggtgccaaaaagttttggactactggtttaggctatggatattaaagtataaagatcttaattaggagttgtgttcactctaaataaaaatagtgtatctggatctttaagttctcagtactgaacagcagcatttcttaaggaagaaaagaggcatcattctttactttggacggatgccaccatgttatagtagagagatttctgattggctaccaaagttcttgatgcctgatgtacacacacttccttccatttattccatcaaacattaatctaaagactaatatgaagggattttgcaaatgtaatgaaggtcctacagcaattgatcctaaaatagaaagataatctgggtggggatgacttaatcacacgatccctttaaaggacagagttttctctaactggccagagaagagaaagtcagactctggcagtaatagaaggatttgaggcatcattgcagctctgacaatggagaaggtcacagagcacggaatgtgggtggctcatagacactgggagtggccttcagctgacagccatcaagaaaacaaggatttcagccctatggttgcaaggagctgaattctgccaacaacaagaatgagtttgaaagcagattttctctttgttgtctccagctgagcacttagcctggtcaacaccttaatttcagctttgtggtaccttgcacagagaacacatcaagacgtgaaagacttctgttctacaaaattgtgagctaataaatggtgttatttgaagctcctaagtttatggtgatatgctatgcaccaatagaaaattaatacaccacrttcccaagatgttcacaggaactctagagaggacaaaattttcccattgtagcaactgtccaaagaagttgccttgcatatatacatgctaggtattgccttgcatatatacatgctaggtataatc

SEQ ID NO: 690974 - DNA, 2019 bp, Homo sapiens
catcgattgctccatttgtttaaagaattgtgtctatgtttttaaactgcagcaaatgctgactcagccactttaacaatggagactggagtggctggtactataggccttttaataatcagcacactgaccatctttggcttattcctacttgaagttttgagtctctgatctgggacttctttctgaattcagctaaaaaaattcactttttttttttttttttttttttttttttttttttttttgagacggggtctcactctgtcgcccaggctggagtgcagtggtgcgtctcagctcactgcaagctccgcctcccgggttcatgccattctcctgtctcagcctccggagtagctggaactacaggtgctcaccaacacgcccagctaattatttgtatttttagtagagacggagtttcactgtgttagcgaggatggtcttgatctcctgacctcatgatccgcccacctcggcctcccaaagtgctgagataaaaattcactcttgaatggtactcattttcacttctgtgagtcacaggcactcctctaggaatccgagtccatctgctctgtgtctttcagaaattctttagcatatctggcctgctgatggtatcctttaaggggttgccacaaatagcttgttttattttactgcccaatagtatgcagtggctttgcccttcttggatttctaattccactgtagatttatccttatttttatatttcttccrtcatttcagtagaatcatggaaggagaaacagcaaatgagttttcttagttagatatcttaaatcagagttgttgaattatgttttacttgtttatttaactgcttgtctttccccactagattttaagccccttgatgccaaggtctttgtattatttcatttttatatacttgggcctgacagatagaagatacaaaatagagatttatataatgaataattgattaaattaggtagcatggctataaacagacattttattaaattaagtgtgcataagtaataaaaagtagtcctattttgaacttgacagaaaacaatgggaaaggaaatatctactgtgtaccactgcactctcattgtgcatcagagactcaaaacttcgagtaggaataagccaaagatggtcagtgtgctgattattaaaaggcctatggtaccagctattccagtctccatcctcaaagtggctgagtcagcatttgctgcagtttaaagacacagacacaattctttaaacaaatggagcaattgatgcatgtggaaatccagcatggacatggattccaggcaaagaagtgaaataaggcaatggacaagagctccctggctcagaattataaagaaagcagcattttatggggcactcaaggctgtggagagaggttgggaaggagagaaggtgagaagtaaaggaagaattaactcttgaatactctcctcaacctgtctttacaagagatggactccctttcttgtgccttctacactattgatcatttctcctgttctttgaatttcatgcctagcctcatttctctggctgccccagctccctgatttaggtgacctcattcaaatctgcctctggctgagttcaatcctcagaacccatttctggctgcccttttcaggctgtgtcatacccagccccataagtaagaactgaacaagtttgtacatacttttgcctaaacttccttggtgtcctatttaaccctaataaaattaatacaataattgactctttccttcaactcagggagaatggtaaattgaatgcatcataatgtattttcagagcttccaagaattataaatagcgcctaatattcaagagccatgatgacaattagcccaaaggacagagtaaataaaaggtcaaagcatctaagctcctgagctactaaccacttactcccgcaattaaaataagtgattagtaaagaattatgtgcattaacaagttaaaataattaagcctgattc

SEQ ID NO: 690975 - DNA, 2019 bp, Homo sapiens
catcgattgctccatttgtttaaagaattgtgtctatgtttttaaactgcagcaaatgctgactcagccactttaacaatggagactggagtggctggtactataggccttttaataatcagcacactgaccatctttggcttattcctacttgaagttttgagtctctgatctgggacttctttctgaattcagctaaaaaaattcactttttttttttttttttttttttttttttttttttttttgagacggggtctcactctgtcgcccaggctggagtgcagtggtgcgtctcagctcactgcaagctccgcctcccgggttcatgccattctcctgtctcagcctccggagtagctggaactacaggtgctcaccaacacgcccagctaattatttgtatttttagtagagacggagtttcactgtgttagcgaggatggtcttgatctcctgacctcatgatccgcccacctcggcctcccaaagtgctgagataaaaattcactcttgaatggtactcattttcacttctgtgagtcacaggcactcctctaggaatccgagtccatctgctctgtgtctttcagaaattctttagcatatctggcctgctgatggtatcctttaaggggttgccacaaatagcttgttttattttactgcccaatagtatgcagtggctttgcccttcttggatttctaattccactgtagatttatccttatttttatatttcttccatcatttcagtagaatcatggaaggagaaacagcaaatgrgttttcttagttagatatcttaaatcagagttgttgaattatgttttacttgtttatttaactgcttgtctttccccactagattttaagccccttgatgccaaggtctttgtattatttcatttttatatacttgggcctgacagatagaagatacaaaatagagatttatataatgaataattgattaaattaggtagcatggctataaacagacattttattaaattaagtgtgcataagtaataaaaagtagtcctattttgaacttgacagaaaacaatgggaaaggaaatatctactgtgtaccactgcactctcattgtgcatcagagactcaaaacttcgagtaggaataagccaaagatggtcagtgtgctgattattaaaaggcctatggtaccagctattccagtctccatcctcaaagtggctgagtcagcatttgctgcagtttaaagacacagacacaattctttaaacaaatggagcaattgatgcatgtggaaatccagcatggacatggattccaggcaaagaagtgaaataaggcaatggacaagagctccctggctcagaattataaagaaagcagcattttatggggcactcaaggctgtggagagaggttgggaaggagagaaggtgagaagtaaaggaagaattaactcttgaatactctcctcaacctgtctttacaagagatggactccctttcttgtgccttctacactattgatcatttctcctgttctttgaatttcatgcctagcctcatttctctggctgccccagctccctgatttaggtgacctcattcaaatctgcctctggctgagttcaatcctcagaacccatttctggctgcccttttcaggctgtgtcatacccagccccataagtaagaactgaacaagtttgtacatacttttgcctaaacttccttggtgtcctatttaaccctaataaaattaatacaataattgactctttccttcaactcagggagaatggtaaattgaatgcatcataatgtattttcagagcttccaagaattataaatagcgcctaatattcaagagccatgatgacaattagcccaaaggacagagtaaataaaaggtcaaagcatctaagctcctgagctactaaccacttactcccgcaattaaaataagtgattagtaaagaattatgtgcattaacaagttaaaataattaagcctgattc

SEQ ID NO: 690976 - DNA, 2019 bp, Homo sapiens
catcgattgctccatttgtttaaagaattgtgtctatgtttttaaactgcagcaaatgctgactcagccactttaacaatggagactggagtggctggtactataggccttttaataatcagcacactgaccatctttggcttattcctacttgaagttttgagtctctgatctgggacttctttctgaattcagctaaaaaaattcactttttttttttttttttttttttttttttttttttttttgagacggggtctcactctgtcgcccaggctggagtgcagtggtgcgtctcagctcactgcaagctccgcctcccgggttcatgccattctcctgtctcagcctccggagtagctggaactacaggtgctcaccaacacgcccagctaattatttgtatttttagtagagacggagtttcactgtgttagcgaggatggtcttgatctcctgacctcatgatccgcccacctcggcctcccaaagtgctgagataaaaattcactcttgaatggtactcattttcacttctgtgagtcacaggcactcctctaggaatccgagtccatctgctctgtgtctttcagaaattctttagcatatctggcctgctgatggtatcctttaaggggttgccacaaatagcttgttttattttactgcccaatagtatgcagtggctttgcccttcttggatttctaattccactgtagatttatccttatttttatatttcttccatcatttcagtagaatcatggaaggagaaacagcaaatgarttttcttagttagatatcttaaatcagagttgttgaattatgttttacttgtttatttaactgcttgtctttccccactagattttaagccccttgatgccaaggtctttgtattatttcatttttatatacttgggcctgacagatagaagatacaaaatagagatttatataatgaataattgattaaattaggtagcatggctataaacagacattttattaaattaagtgtgcataagtaataaaaagtagtcctattttgaacttgacagaaaacaatgggaaaggaaatatctactgtgtaccactgcactctcattgtgcatcagagactcaaaacttcgagtaggaataagccaaagatggtcagtgtgctgattattaaaaggcctatggtaccagctattccagtctccatcctcaaagtggctgagtcagcatttgctgcagtttaaagacacagacacaattctttaaacaaatggagcaattgatgcatgtggaaatccagcatggacatggattccaggcaaagaagtgaaataaggcaatggacaagagctccctggctcagaattataaagaaagcagcattttatggggcactcaaggctgtggagagaggttgggaaggagagaaggtgagaagtaaaggaagaattaactcttgaatactctcctcaacctgtctttacaagagatggactccctttcttgtgccttctacactattgatcatttctcctgttctttgaatttcatgcctagcctcatttctctggctgccccagctccctgatttaggtgacctcattcaaatctgcctctggctgagttcaatcctcagaacccatttctggctgcccttttcaggctgtgtcatacccagccccataagtaagaactgaacaagtttgtacatacttttgcctaaacttccttggtgtcctatttaaccctaataaaattaatacaataattgactctttccttcaactcagggagaatggtaaattgaatgcatcataatgtattttcagagcttccaagaattataaatagcgcctaatattcaagagccatgatgacaattagcccaaaggacagagtaaataaaaggtcaaagcatctaagctcctgagctactaaccacttactcccgcaattaaaataagtgattagtaaagaattatgtgcattaacaagttaaaataattaagcctgattc

SEQ ID NO: 690977 - DNA, 685 bp, Homo sapiens
ttagacattacagattagaactgatcccactctatagtctaggtcatcttcctggacttggctgtgacccagacttactgtctaaataaatggtgtgacagctcacctagggactccattccagactctagaaagagtttcttcagcctgtaacccccccacgtcataaacaatccattactgagtcctgttcattcttccaatacatctctccaaaggcttcccttcatttccacaatgaccccaactgttttgccactcgctccttgaagaacatctggatttgtttctggcttttggctatgaggaataagcctgctgagaacattcagctctaggattttgtgtgaatgtaagtgctttaggggtrgggtgggaccctgcaggccatccctgggttggatgattccctagagggacccagagaactccaccaagctgacctaagcccttgaaagtcaaacagataccacatggcccaatgcctgcactatagctcacttgttggaataaactgcccaagaaaaatgggggtacgtggttacattatcagaggcatcccaggtggatcctggagacatggacagtacccatagtcacaaaactgacagctggaagaagcccgtcttgttcaacccctgtttggcatattccttccttctccatcctcactttctacccctca

SEQ ID NO: 690978 - DNA, 893 bp, Homo sapiens
cctctcgatcctagaaaagaggccgctcaggatggggatgagacttccaytgctccgggcccgatgcatcccctcacgttatcgaggcctgcacagacccaaagtggaaccgccgcgaagacgatggacagctggccgcaggacccagggagagacgcagaaagaggctcaccaaagaccggtcgacataaaagacatccctttttgacgcacagggcacattcgtcaaaagacacacacacacacacacaaacacacacacacacacacacagagggaaagaagcacacagagggtgagagacagagagagaagggagaatgggagacacagccccacacacagtcctaccgcggtggccgagcaatgcacgcccccaggcaacccctgtggctgccgggttctgctctggaggggaacaaccctcggctgagagaacagccctcgggcacgcaggcggacctgtcctcgagatcacgggggcacgacttctcgggagactcacccgaacaccgtcctggcaggcctgaggctgggatgccacgctgcttcccccggactccgcctgtggtttcctcatcctgctcggccccttgtgactcctggcagccggagacgttcctgtggaccccgtggagaggtcaggccggagcctcggaggcccgacacccaagcgctgccacggagggctcccgcgttgccaagcctcggggactggttcctaagacaaccgtgggaagcactgtgaagcaaaaagcggcgcgcgcctcgcatgcgctttggctgggccgactcgcgcttggctcctggcagtcaggcaggctgcgtcccctttaaatacgggcggctgcgcggcggcagggggcgcgcctgctgcagccgcggctgcggct

SEQ ID NO: 690979 - DNA, 893 bp, Homo sapiens
cctctcgatcctagaaaagaggccgctcaggatggggatgagacttccactgctccgggcccgatgcatcccctcacgttatcgaggcctgcacagacccaaagtggaaccgccgcgaagacgatggacagctggccgcaggacccagggagagacgcagaaagaggctcaccaaagaccggtcsacataaaagacatccctttttgacgcacagggcacattcgtcaaaagacacacacacacacacacaaacacacacacacacacacacagagggaaagaagcacacagagggtgagagacagagagagaagggagaatgggagacacagccccacacacagtcctaccgcggtggccgagcaatgcacgcccccaggcaacccctgtggctgccgggttctgctctggaggggaacaaccctcggctgagagaacagccctcgggcacgcaggcggacctgtcctcgagatcacgggggcacgacttctcgggagactcacccgaacaccgtcctggcaggcctgaggctgggatgccacgctgcttcccccggactccgcctgtggtttcctcatcctgctcggccccttgtgactcctggcagccggagacgttcctgtggaccccgtggagaggtcaggccggagcctcggaggcccgacacccaagcgctgccacggagggctcccgcgttgccaagcctcggggactggttcctaagacaaccgtgggaagcactgtgaagcaaaaagcggcgcgcgcctcgcatgcgctttggctgggccgactcgcgcttggctcctggcagtcaggcaggctgcgtcccctttaaatacgggcggctgcgcggcggcagggggcgcgcctgctgcagccgcggctgcggct

SEQ ID NO: 690980 - DNA, 893 bp, Homo sapiens
cctctcgatcctagaaaagaggccgctcaggatggggatgagacttccactgctccgggcccgatgcatcccctcacgttatcgaggcctgcacagacccaaagtggaaccgccgcgaagacgatggacagctggccgcaggacccagggagagacgcagaaagaggctcaccaaagaccggtcgacataaaagacatccctttttgacgcacagggcacattcgtcmaaagacacacacacacacacacaaacacacacacacacacacacagagggaaagaagcacacagagggtgagagacagagagagaagggagaatgggagacacagccccacacacagtcctaccgcggtggccgagcaatgcacgcccccaggcaacccctgtggctgccgggttctgctctggaggggaacaaccctcggctgagagaacagccctcgggcacgcaggcggacctgtcctcgagatcacgggggcacgacttctcgggagactcacccgaacaccgtcctggcaggcctgaggctgggatgccacgctgcttcccccggactccgcctgtggtttcctcatcctgctcggccccttgtgactcctggcagccggagacgttcctgtggaccccgtggagaggtcaggccggagcctcggaggcccgacacccaagcgctgccacggagggctcccgcgttgccaagcctcggggactggttcctaagacaaccgtgggaagcactgtgaagcaaaaagcggcgcgcgcctcgcatgcgctttggctgggccgactcgcgcttggctcctggcagtcaggcaggctgcgtcccctttaaatacgggcggctgcgcggcggcagggggcgcgcctgctgcagccgcggctgcggct

SEQ ID NO: 690981 - DNA, 893 bp, Homo sapiens
cctctcgatcctagaaaagaggccgctcaggatggggatgagacttccactgctccgggcccgatgcatcccctcacgttatcgaggcctgcacagacccaaagtggaaccgccgcgaagacgatggacagctggccgcaggacccagggagagacgcagaaagaggctcaccaaagaccggtcgacataaaagacatccctttttgacgcacagggcacattcgtcaaaagacacacacacacacacacaaacacacacacacacacacacagagggaaagaagcacacagagggtgagagacagagagagaagggagaatgggagacacagccccacacacagtcctaccgcggtggccgagcaatrcacgcccccaggcaacccctgtggctgccgggttctgctctggaggggaacaaccctcggctgagagaacagccctcgggcacgcaggcggacctgtcctcgagatcacgggggcacgacttctcgggagactcacccgaacaccgtcctggcaggcctgaggctgggatgccacgctgcttcccccggactccgcctgtggtttcctcatcctgctcggccccttgtgactcctggcagccggagacgttcctgtggaccccgtggagaggtcaggccggagcctcggaggcccgacacccaagcgctgccacggagggctcccgcgttgccaagcctcggggactggttcctaagacaaccgtgggaagcactgtgaagcaaaaagcggcgcgcgcctcgcatgcgctttggctgggccgactcgcgcttggctcctggcagtcaggcaggctgcgtcccctttaaatacgggcggctgcgcggcggcagggggcgcgcctgctgcagccgcggctgcggct

SEQ ID NO: 690982 - DNA, 893 bp, Homo sapiens
cctctcgatcctagaaaagaggccgctcaggatggggatgagacttccactgctccgggcccgatgcatcccctcacgttatcgaggcctgcacagacccaaagtggaaccgccgcgaagacgatggacagctggccgcaggacccagggagagacgcagaaagaggctcaccaaagaccggtcgacataaaagacatccctttttgacgcacagggcacattcgtcaaaagacacacacacacacacacaaacacacacacacacacacacagagggaaagaagcacacagagggtgagagacagagagagaagggagaatgggagacacagccccacacacagtcctaccgcggtggccgagcaatgcacgcccccaggcaacccctgyggctgccgggttctgctctggaggggaacaaccctcggctgagagaacagccctcgggcacgcaggcggacctgtcctcgagatcacgggggcacgacttctcgggagactcacccgaacaccgtcctggcaggcctgaggctgggatgccacgctgcttcccccggactccgcctgtggtttcctcatcctgctcggccccttgtgactcctggcagccggagacgttcctgtggaccccgtggagaggtcaggccggagcctcggaggcccgacacccaagcgctgccacggagggctcccgcgttgccaagcctcggggactggttcctaagacaaccgtgggaagcactgtgaagcaaaaagcggcgcgcgcctcgcatgcgctttggctgggccgactcgcgcttggctcctggcagtcaggcaggctgcgtcccctttaaatacgggcggctgcgcggcggcagggggcgcgcctgctgcagccgcggctgcggct

SEQ ID NO: 690983 - DNA, 660 bp, Homo sapiens
tgctagaattccaataaaataaatattaatttatggaaccaacttgctgcatttaaatttagaagagatagcattcaaactaggagaaacaaacaataaaacagaataacatagtgataataaaaatataatgatttacaattgtacatgcttaaaattggaaatatgcatagwacaggatgtggcttgattttagaaaaccaaggagattttagacaacagaattaaactgagatgatgaatttgtattattctccttactctttaagtttgatgggtggtgaagaatatcattattgtctgttatctgttagagcctcagcttaacagattttttcatttttccattgtaacagtttagatcaggggtccacaacccccagccatggaccagtactgatttgtggcctgttaggaactcagttgcagtaggaggtgaatgccaggtgagtgagggaagcttcaactttatttaaagtcactccgcattgctcttgttaccacctgagctccaccttctgtcacatcagctgcattagattctcataggaatgtaaaccctatagtgaactgcacttgcaagggttgcatgcaccttttgagaatctaatgcctaatgatctgtcacagtctcccatcatctccagatggaactgtgca

SEQ ID NO: 690984 - DNA, 1743 bp, Homo sapiens
gagatattctatgtaggacttcagaaagcaggtttttgtcagttttttttgtacaaccctttctgattatgtatttttgcttctcttcataaaatgtaattaaaagaatttttttaattttaaagaaattaccttcagtatatctgtatgtttttctacatgtttttattaaactatctattacatgctgaataatacccttgaataaatcagtattaaaggagtcaggaatatgaacctaattttttctaaacatgcaaaagcaaagactgtttgtttctctaggtttataagtcaaagattaggcagtttcactgtttaatttggcaagttgaacatctggctttaggaaacttcaatatatctactgaagaaaattagtcaaggatgctaggattactatttcatctagttactataatagcatcttgctgccttcaaaaaatgcattactgtgtcctcaggaatacatatctggacagatgtgggcagaatgtctcattgcggaagctatagacctaattgagctgaaggatttccaactttcatttacccttgttcacatatgaaaagaagttatgttcccccaaataactgatatttgaggattttattatcttcatttgggaagaacataacattattttccctccacaatgtagtttaaagtaaacagcaaaagccatttgaatgaaaacatcacagagctcttctatatttttggttttagtggacagattcaattttatattatgatcttccttgcctttcagaaccacattattcccaagtattagtggttgaaaagaatccagctttcttgcttcatttttgatagtttcccaaatgtaatctcagaaatgttttcactttatagatgacaaaatagaaatctaaactgattcattgattcattcaacaaatacttatttagtgcttaatgtttgccaagtactgccactaggtctatagcagtgagaataaaacatccatctgtttacctggaattttcattctaaggtttggtgaaggcatctctagtaaacagttaaataaatatatatgaggtataattttagatagatatcaatgccttgaaaaaaatacgatggcaatggtggaagaataagtggaattaagaaggaataggcagccgggcgcggtggctcatgcctataatcccagcactttgggaggccgaggcggacagatcacaaggtcaagagattgagaccatcctggccaacatggtgaaaccctatctctactaaaaatacaaaaattatccagacatggtggcatgcgcctgtagtcccagctactctggaggctgaggcaggagaatcgcttgaacctgggagacagaggtttcagtgagccgagattgcaccattgcactccagcctggcgacagagcaagactccgtctcaacaacaacaacaacaacaaaagaagaagaagaagaaatagacaagaaagaccaccttgaagaggggatgtttgagctcyaatcagaaagaccaatggaaatcagtaaatagaggaaaagcttgagaatttacgaacagactggatttgccattaaagagatagaggatacagcaaaatataaaacaaaataaaacaagcaataacataaaataaaaaagcaaagatgtaaacaggcataagtagtggtttttgcctacatttttctactatccatctcaatacatccttgttgcaagagcttaaaaagatga

SEQ ID NO: 690985 - DNA, 662 bp, Homo sapiens
acaaacaacttctgtactgcacatgtttttcaatagtgaaaaagagttgacagttttaacatgtggagaaaaatatttctacatatattttacttgtaaatctctctggtctgagtaatcacttttatatgtaaattatcacatgttcaaatgagtaaaaattagttatttggatgccctggattagaatcttcataatatgtgtccatgcatgagtatatatgtgtttttctattgaaggggcatgtaatgagatgagaagaaaaatacactagggtcggtggcaacttcctcaccctgtctacaaatggacacaatatagaaatgcacacacagacccattcagtgaaatgtcataccatatattttgcctattctgtatgcatatcatatttttgagaccactttagctcagccaaacagctctttttccttttaagaaagattaaaygaagctgctcaaataaattaatgttcttcattagtgataaggttttggcagtaaatagctgaccattggacttacagtggctcactcgttcaagatattccattatctcacatggcaaaatagctagagaaaggaagtttgtcttacattcaaaacaggtttgtggcagttccaagcatcatatcacacacttctgtcccaaagcacagtg

SEQ ID NO: 690986 - DNA, 589 bp, Homo sapiens
ccacactgcatagtaataatttgtattgtgctatacaatgtgtttctctttaatggcattataacttttgacatacaaccacatacaaccttccaagaaataggattctttacattatgtactcttttataagtcctgtgttacatgtttgtatgtgagctggttttcgcacacaaaatgcagaaaccaagtgaagagcgaggcaggaagaatttcaccctctacttgattactttttttttttttggtctcaaggaccgtctttcttgtataaaaccatacagatcctttaggactctaaagatagcacatattaatcaaattcatttttaagtaacaatatagttartttaaactttctattctacttgaaatgttcaaatgagagatttgtgaaataatgcattggcagtataaatgaatcctccctatcaatatagctcacaaaagaaaccaaggattatatcttattcttcttatgaattcattttgtgtgaaattctcaaggcaaaagaagagctttaataattctgaaggaagaactatactttaaaaatgtatgacacttgtgctttgattaatttttttc

SEQ ID NO: 690987 - DNA, 637 bp, Homo sapiens
cccagtaccaccgtggtagaaactaatcattattaaatttaaggtactgagaacagtgcctggaatgtagtaagcaatcagaaagcactggcaatgataaggacagtaatgatgatgatgatgaygacaatgacgatgagacgtttatagccacatctgggaaggcttacctattgactccatttatgatcattgcacataatatgtagtccttttcttttctgtttacttctcctactctaggaaatagaactttccataaaaattacttcggtatgatatttaagctggtgtttcatcgataacatgttagaaaaataaggaaaacattcaaggaagttgattaacacaaaattttattctctgtattataaaatagggccaagtagtctggttgaacgcacatagtcgggagactggagtcaaacatgggaaagcgataatgtgaaagtggaagcagccaaggggttaatggggtcaacactaaaattggtggcacacactagttcagaaaacatattataggttttttccccttacaatcaagaaacccaaatatagaatgactgaattttagaggtaaaggagatattaaagaataccttttggaggtatgacatattcatattacataata

SEQ ID NO: 690988 - DNA, 780 bp, Homo sapiens
gtcaaagagatttgttggatgattctggtgtcgagactctgagactcaacaattctgggatataaaacttcaggttcaggatccagagaaacctgggaaaaattatttagagataatactttgatctttctttcattatagttcagtcttacataatattttgcataaaatcaaagataattgatcatgaaccttaagttaaactcaataaaaatatagatacttcaaacaagtgttatgtagraggttggcttgcaaaaactaagtgggttatgcctctgaataatatggatgctttgaagcaaagaagaagaggaggaagaaaaggaagaagcaacctcagaagaatcatcattagatgtgaacgtagccatggaaatctccactagggataatgacataaaatagatgtcgaaattaaacaaaagcaacaattaaaaaaggagcaggccgggctaggtggctcacgcctgtaatcccagcactttgagagaccaaggcaggcagatcacgagttcaggagattaagactatcctggctaacatggaggaaacccgtctctactaaaaatacaaaaaattagccgggcgtggtggtgggtacctgtagtcccagctacttgggaggctgaggcaggagaatgaagtgaatacaggaggcggagcttggagtgagccgagatcgtgccactgcactccaacctgggcgacagagcaagactccgtttcaaacaaacaaataaataaaaataaataaaggaacaatgtgaagtcagtata

SEQ ID NO: 690989 - DNA, 780 bp, Homo sapiens
gtcaaagagatttgttggatgattctggtgtcgagactctgagactcaacaattctgggatataaaacttcaggttcaggatccagagaaacctgggaaaaattatttagagataatactttgatctttctttcattatagttcagtcttacataatattttgcataaaatcaaagataattgatcatgaaccttaagttaaactcaataaaaatatagatacttcaaacaagtgttatgtagaaggttggcttgcaaaaactaagtgggttatgcmtctgaataatatggatgctttgaagcaaagaagaagaggaggaagaaaaggaagaagcaacctcagaagaatcatcattagatgtgaacgtagccatggaaatctccactagggataatgacataaaatagatgtcgaaattaaacaaaagcaacaattaaaaaaggagcaggccgggctaggtggctcacgcctgtaatcccagcactttgagagaccaaggcaggcagatcacgagttcaggagattaagactatcctggctaacatggaggaaacccgtctctactaaaaatacaaaaaattagccgggcgtggtggtgggtacctgtagtcccagctacttgggaggctgaggcaggagaatgaagtgaatacaggaggcggagcttggagtgagccgagatcgtgccactgcactccaacctgggcgacagagcaagactccgtttcaaacaaacaaataaataaaaataaataaaggaacaatgtgaagtcagtata

SEQ ID NO: 690990 - DNA, 780 bp, Homo sapiens
gtcaaagagatttgttggatgattctggtgtcgagactctgagactcaacaattctgggatataaaacttcaggttcaggatccagagaaacctgggaaaaattatttagagataatactttgatctttctttcattatagttcagtcttacataatattttgcataaaatcaaagataattgatcatgaaccttaagttaaactcaataaaaatatagatacttcaaacaagtgttatgtagaaggttggcttgcaaaaactaagtgggttatgcctctgaataatatggatgctttgaagcaaagaagaagaggaggaagaaaaggaagaagcaacctcagaagaatcatcattagatgtgaacgtagccatggaaatctccactagggataatgacataaaatagatgtcraaattaaacaaaagcaacaattaaaaaaggagcaggccgggctaggtggctcacgcctgtaatcccagcactttgagagaccaaggcaggcagatcacgagttcaggagattaagactatcctggctaacatggaggaaacccgtctctactaaaaatacaaaaaattagccgggcgtggtggtgggtacctgtagtcccagctacttgggaggctgaggcaggagaatgaagtgaatacaggaggcggagcttggagtgagccgagatcgtgccactgcactccaacctgggcgacagagcaagactccgtttcaaacaaacaaataaataaaaataaataaaggaacaatgtgaagtcagtata

SEQ ID NO: 690991 - DNA, 780 bp, Homo sapiens
gtcaaagagatttgttggatgattctggtgtcgagactctgagactcaacaattctgggatataaaacttcaggttcaggatccagagaaacctgggaaaaattatttagagataatactttgatctttctttcattatagttcagtcttacataatattttgcataaaatcaaagataattgatcatgaaccttaagttaaactcaataaaaatatagatacttcaaacaagtgttatgtagaaggttggcttgcaaaaactaagtgggttatgcctctgaataatatggatgctttgaagcaaagaagaagaggaggaagaaaaggaagaagcaacctcagaagaatcatcattagatgtgaacgtagccatggaaatctccactagggataatgacataaaatagatgtcgaaattaaacaaaagcaacaattaaaaaaggagcaggccgggctaggtggctcacgcctgtaatcccagcactttgagagaccaaggcaggcagatcacgagttcaggagattaagactatcctggctaacatggaggaaacccgtctctactaaaaatacaaaaaattagccgggcgtggtggtgggtaccwgtagtcccagctacttgggaggctgaggcaggagaatgaagtgaatacaggaggcggagcttggagtgagccgagatcgtgccactgcactccaacctgggcgacagagcaagactccgtttcaaacaaacaaataaataaaaataaataaaggaacaatgtgaagtcagtata

SEQ ID NO: 690992 - DNA, 930 bp, Homo sapiens
  misc_feature 387, 388, 389, 390, 391, 392, 393, 394, 395, 396, 397, 398,399, 400, 401, 402, 403, 404, 405, 406, 407, 408, 409, 410,411, 412, 413, 414, 415, 416, 417, 418, 419, 420, 421, 422,423, 424, 425, 426, 427, 428, 429, 430, 431, 432, 433: n = A,T,C or G
  misc_feature 434, 435, 436, 437, 438, 439, 440, 441, 442, 443, 444, 445,446, 447, 448, 449, 450, 451, 452, 453, 454, 455, 456, 457,458, 459, 460, 461, 462, 463, 464, 465, 466, 467, 468, 469,470, 471, 472, 473, 474, 475, 476, 477, 478, 479, 480: n = A,T,C or G
  misc_feature 481, 482, 483, 484, 485, 486: n = A,T,C or G
gctaaaatacttgttttggttctttataatgcatagcataatgtttgtgttcaatactttttttatttgaagaaccacaattgatgggaaataatactaaattatcttaaattataatgtctaccgcagtgtatttcaaaatatagtgaacccatatcaggaaaatcatgcgagctaggtaaacctacacacgcacatccacctccattcttagcccccaaccaaaccaccccacacgcgccgaacccacaataccaacaccaccacaacccacagaccacccccccaccacccatccacagcaacaaaagtcactcaacacgcgcccgctctcctccccgccgcccccaccacggcccctggcccgtagccccacggccccccccnnnnnnnnnnnnnnnnnnnnnnnnnnnnnnnnnnnnnnnnnnnnnnnnnnnnnnnnnnnnnnnnnnnnnnnnnnnnnnnnnnnnnnnnnnnnnnnnnnnnacctccttcyctattttctctgcccttccttctttctcagtggttgcttcctcagcccactgccttcacataactgattcttcattctaccagtctccaatcaaatgtcatagttcctgagaaagaactgtcttgactatggcagacagaccccaaggtgacacccaatgatccttgcctcctggttacttactttgctcgagttaaatagtacctgtgaattgcttctaattcatagaaaacagcaaaggtgatgggatatcactcctatgattacattatatgagaccagattttagcagactggagaaagagattctcctggtagttttcaagtagtaagctgacacactatgagaaggtcacatggctaggccatgagagtggcatttaggagctgagagctagccttttgccagcaagaaaaaaggtcctcagtccaga

SEQ ID NO: 690993 - DNA, 606 bp, Homo sapiens
tctgttccaaggaggggagcctgctgattccaaagaccatattggtctcctcactctagaaactgtgcaagccaagatgacaagtgagagatatgatgtgagctttatattagtatgagaaatagtactaactgggccttgcctgtagcttacaggtgataaaggaagaatccagtgtgcatcacaattgraaggctgttcagggttctgaatttctttagctccctttatttttgttaaagtaattatatttaattattttaagaatatactatatatattttcttaattcatgaatttatgtaatgtttattgactacctgttgtctgtgctgtgattctctttgtaactacctgaataggagtaatatgagtgcccagtggaaaaagtagtattgattagtttatatagaacacagactgataattagatggttaatttgggaattatttaattacatgatttttattatatctttagtgttgtaaataagagccaagcaatcacataggatcctatgtgattttccacttacaatagaaaatttaacaaatacttatttggcagccatgagtacattttatgattacctattatgaatgccc

SEQ ID NO: 690994 - DNA, 2993 bp, Homo sapiens
tcttccaactgtcagtgagtcaaaaccacaaagagtaactgattcaacagcccagaaagagatgaggagctgaaaaacttccaatacctgtcaaagaaacttgtagyctttcttacattttgaaattaagttttacttatgtcaaccccatcagcacaaaggaataaactaacactctgtttatatgacaccacaccaaccaggcaattcagtgggcagtgaactcaaatcctttgattgactcaattttttactttcagtttgctatttcattatatttaattggccacaatcttaaaatggacatattctttcaatacattcatgtggtatttgatcaataacaactttctgccccagttagtcccagagattgcaataacatgctttcagttcttaatctgtgttaatcatctaaataaaaatcaatgcctgcaattctatatttagaagtagcacacaaactttgttgaaaattgtacttataatcttctattcaacatggaacaacctatgttgtttactgtcgtgagagtttgagttagtaatcaaaatatccaacccacttcattgagccaactttattaatgtctctgtgctgagagagattgagaaaaaatcaatttaagtctggtgaattttttactgataaaaaattttcccacttttgagaattaatcttttctaaaagacactacagaaatgtactcccatgaatgatcattacatgtataaaaatagttaaatatgtactaaatgagagaaagtgatttgaaatagtccccagatatttgaagtacatttttccccaatggtaataatccacttaggttataattgcttagctgaactgaattagttaaaaacagaagctatttttcagggaaaacaaactgcaatggctcttaattgctactaacatttgttaatagtttcagtttatttcatatggatttttattttctttttaaaattaatttttttttgtatttttattggcatatcatagttgcacatatttgggggtacatgtgatactttgatacgtatatccaatgtgtgatgatcaagtcagcgtcattgggatatctaccacctcaagcatttatcttttctttgtgctgggaacgttacaattctcttttagctattttgcagatttttattttcaagggtattatttggaaagatgtcattttgtctggcctaagccaaaatagcacttctagctgaaagcagctctcaaaatcagtcatgattacccataggaaataattattttattggggttggactttgtagattcaactactttagagagagcaaatatcccaccactgcataggatgatacagacaacacccaaaaagagaaggacagagaattcttacacgttaatggtctagtcacattttatttcctttccttctatacatgccccaaatcatacaacagggacaatactcactacaagaaaactatatccatgaacctcattctcatagacacaactatcaaatgaccttatgtcagagaataacatgtcaccagtaatgaaggaggcaaggattgtcagcaatagcttgtacctactgaaatatccatagacattattgtgttattgtaatattttgagcatattctttttaattaaaggtgaaatattagttctgcacttaaaatacatatcacaacgtatttggaaacattgttacagtaaatgattccagatgttctctgacaagtcatgagagcccatttgagaaaaattgatatacagtaatgtatgtgtgtgtataagttaaactgtgtttacatatacatttatgtatatcatatacaggcagacagacacacacccatatacattcatacacaatgacaagaaaataaaccagagtaaatgtggaaatttggggaaagaaattgataactctccataaacaatttgctaaagtaaatcactgaacttaatggttgaaatgaaacacacaagggagcaattaggtagagtaatgcaaaggcaaataaataagaccaaacttcaagcaaatataatggttcttcaatgctgctgataagtttcaagacaagttagcttgactagttaaatctcaggaaggagcagtatcatgaacatcttcagaatctagatggagctataagtcgatagtattcaaaatcaaaagtaaatatggggaaaataaaactttacaaagtaacttcaaatagactcagaacaaatattaaggtttaatatttttacaaagaattaataaaagaactaaaatatgacaatgatcatttaaattagtagaaaacactgacttatattttctaagttcaatatttaattatcttctccaagacacattttttaaaagtttgggatacttaagaaagatgaaaagacattaaaaagcattttaatattttaaagaaggtattattcttttaaaatgacaccgatttttttttctgactgtaagaggaataatggcttattgtagaaaatttagatgactagaaatgaataaaactaaaattcgacactctgtaggtggaaatatccaaagcaataaataaattgtatatggattggaataaaaataactatatatatatatagattgaaaaagaacagataaagacatttacttggaagtatgtgaactaatacaagagtcagcaaggtgggccaggcagaatattagcatacaaaaattaatagctttctattacacaaacaaaaacagattagatatgtattatacttttaaaatatctcattttcaaaaagcagtaaatctttttcaagttataaataagtaacaagttatggcataatctataaagctttttgaaggccttaaaagagaaacaagtggaacataaaatgtatttaatcaataggaatgctcaatgttgtatcttaataactcaaatttcataaaataaatgaaatcccaatcaaggtcccccaaggtatttca

SEQ ID NO: 690995 - DNA, 1138 bp, Homo sapiens
catgttagagttctctttttgtttatcttaacagttaaataaactttagcaggtaatagtcaaaatttattgggactggatttttaaaactattttgagggttaagtttttaatctgaaaaaaacagacttttttcagcaaaaagcaactgaaaaaaattagaggtagcttctgctgacatcatgtttagcagcaattttctgttatatagcagtttggggtcagcaaaaatataaatatagtccttcttttagttgcttgggccatagttcatgttggctagcacaaagcaggatttttttttcaattcatctgtattcagagctcccacatggttatttacaaatccctacatatctattacagtgtgtacagtcccaatgctcatgcttacccatacatacttccaatcatatctctgtgggtgaaattcattgctagaaaaggggaaatgttatataaaatatttatagtatgctttttaaagtaggcatctagaaagttttaattayacaaagttttcagaattacttcataggttcacaaggcaaacaccctcacaaagtgtactgtatgtgtaagaaaagtagctatacttaaagtagacaattatgttttatgaaatttatgtaagatgatactcatgagttagttatttctggcataaggaataaattcataataatattttcctaagaagcagtgttttaaaaatgaatgaaaacaatcattgaaatccaaaataaattcatgtatattacttttgttacttcttcatttttataaatgtatgaaatacttgtataattttgttacagggatatattgcacagtgtgacatcagggctttaagggtattcagcacttgagtaatgtacgttgtgtaagtaatttctcatcattggcttctagcaccacgtcacccacctgagtctccagtgtctattattccacactttatgttcatgtggacacattatttggctcccatttataactgagaacacgtggtatttgtctctgtttctgacttctttcacttaagataatggcctccaattcaatccatgttgctataaaagacatgattccatgttttatcattgagtaatgacatggtttggctgtgtcctaaccc

SEQ ID NO: 690996 - DNA, 589 bp, Homo sapiens
taatgagaagattcgttttagctgaattgtcttcactacctgagcttcaaaaaacaacacaaaagatttgtgggtcagcttggctctaaactatttgacaatacaattccctttgcctttaggtgctcaaattctggacttccctggttgtcactttctctccgaaaccatcctttaactctccaacacaaaccttcctccttgctgtgcttttgatacaacccctcattccagtttcgtggatgtccccatctttctcactgcctcaaagaattcttttaggcagatgactttcttatctgtatttctaatcctgacacttctctcaagttcaagtcaccagctttccttscttgctactatctcaatatgacttgacttcagaagctgaaacctcattcgtccaaaaaaattcaccatttccacttactcttggtacaacttcctgctagtactgctactaccctccagtctccaaggtttgaaacctgagagtcaaccttgacttcttccttgacctccatatacattccattgacagatgatattgatcctatctctcccttctttccttgttcccctttggggg

SEQ ID NO: 690997 - DNA, 2408 bp, Homo sapiens
tagaaatcctgaaatttattttttaggataactttaatgtgcagtgaataaatccaggtagatagttctagactttagattaggctggaaaaatgtatagtgtaatatcaatcccattatcaaattgaaaaggaaattagataaatggggtaaatgggatgagcctgagattctgcatttctgatacacttccaggtcatattgatgctgctggtccgagaaccactatttgactagcaagggactgtgagtgtgagggcgggggttggtagttgaagagagtgcaaatggaaggacagcatgctggtactttgagaaggaaccagcagagagagaaaagtagaagatacagaaggaagaggataacaaaagaatcattgctggctcaggttctttaatgtagaagaaatacagagcgcaagtggaaagacttgtcctagatctcaagaatatgtcagcttctctttttctgagactcttttgaaggtaggagaaggtgcccctttatctttgtttttgctgagttcatttctgacaggttttctacaagctattctttaaagtttattttcttctcccacttctcccccagtgccctttattcagaaatctgtgtcctggccccattgtttcttttttcaactgcctttgggttttcattcttgaatttctttccttgctgcttcaactcttgtctaagaagtcgtcctcccctcttgccttgattatagataaggaaatgaggaaaataagttatctaaaaggttaaatatatagtaaatggaatggggttcctatagaattctagaacaatgacttttagtactttaaggtggttccttagatcagtgaattccccacaagctgcatgagcatcaggtgggaagttgttagaaatgcaaattctcagatcccaccattcctgattctgttaagaatcagaaattctaagtggggctcagcagtttgtggcttaacaggccccccaggtgattctcatgaatactggagtttgagaatcactggtttaaacaaaagtgaaacatatgttcagggagcataataaaaaaattttaccagagaagcgtcaaaggaaacgtaatcattcaaaacacctgagtgttttgaatgattcaaacacccaagtgtagtaaattcaaaacatccaagtgcagtaaattaagagggatttgtaggccggcttctgaaagatttctcagtaccaagtgacatttggcacctggtcaccaaagaataagtgtttattaagagcctgattgagctgagtggcagaaatgagagaaaatgaaccaacaacagcaacaaaatagtagtgctacaatgaccctaacagcaacaacaacaataaaaataatagtgctccaatgaccctagcaactatgtttgatactgtttcatactgtttagtgcaatatgtagataaacataatagggatctaacaattgggtgttgttgattcttgttctaggagaactctctcccttctcccctccatcttactgccttcgtttgttcttaataagtacccatatgtgaggagacattttgggtaggaaattcagtgtatcatacactggaaaccagtagaaaaccttaaattctaattaaactatactattatatcaatccatagaaaagtacataaagtgacatagctaaaaagaaatgtattgcataaatgaatgctaacatgttgtaggcaataagacaaaacaaatttactcgtaaataaagtttacaagtaatatcacacatgtggaactataaacacacatacttgcattatattctgagtcacactgaaagctaaaatagtaatcttgatataacatgaatttgagtgaattcctaaatagaatatgcagacaaagcacatgtatcaataaaagtggtacaaaaccagcagagaagtatagtgattggaaatgagtatctgtagagggaggcccaatgtgtatgtgggatccacattggctttactgtgatttgggtggtagcgcccacccatcacaggaaggggaattattacatttttcttatattacaagtcagtggtggttttttcacatgaatttcctgttacaaaaacactgtttatgtgaattttaaatttaagtgtgtgtgggcatttgttagcattggtatagtaattaaatacatgagagaataccactgttgagagatgtgtgtgctgtgaaggagacattgaggtgttgtgagctgctttaagtcattgagcagatccattgtttcacagttttgtggactcagaaaatgacaccataaagtgtggtgctttggtrtgctgagtacttcgaactgaggaacacgaagggtctcagaagcaaagtccctttctgaccttctccccttctttctcccactc

SEQ ID NO: 690998 - DNA, 1355 bp, Homo sapiens
gatcatagcacggaggcaaatatttaacaatgatgtatccaaagaaacaaggtccaataacctttttcctacaatgaaatatagtaaataagttagatagaccttttagtttcttctattatatttttggtagtcaawtaaagaggattaaaatgtgaagccatttggaatttcccagaaaaaggatcagatattaaagaaggcagaaataatatgaaaaagaaattctctatcatgtctcaagagccaaacaacaaaacaacttcaggttatctcaatgtcacttgttaagaaagaatccctgagtaaatctttctaagccatgttaaataaataaataagtaaggaaataaaacataataaagctttatattatgtgctccttagccaatttattcaattcacctacatctgcagagggtccatggggcatttatcacttacaagggaaaggccaaaagaagagaaaaatattcttcaaccccaaggcatttgctagtcaatgccagaaaaagagcaaattcaatacagtacagataatccatcatgaggaatttaacactcacagacgttaagtttggaaaaccttatttgttagcagttttctcaaaagttttgagactttttgaataagaaatagaaacagaaaagggaaaacataagaataaaagaatccaagggtgctgataataaaacagagaaagtaattcaaagcagagcagaacaagtttgaagcaaaggcatctatgcagaaaactatgctgtagcaatcagaggctagaagtggagacatcatgacagataagagctgcagacagctgcagaaaaagacccaataagggattccttgagccacaaggctaagggacaacaacagacattacccaaagagatgttcactaaaattactagcattttaggaataaaagagggatttattactcacctgatttatatgattgtttcctaaaatagcatgtagtagggttttctcaaattcttccaacttcttggaacactttttaagaatatgactagataagttatagtcactgatcagactagctaaagtaccaacagcttctgtccaaaatcttgaaaaaggaagtttgggattacggtaaaaagtgatcaggccatccagcaattgaaaaacagaatcagagactgtggaagagtctttttcaaagtgggttaagtctcttttaagattacctgattctgtcaagttctttaattcaagtagatattgcaagaattgcatgtgagaagacaaaggattttgcaggatagcacaaggtcttttcacaagaggcagtggtggaaagtgagtgggggtacagctttccacaaag

SEQ ID NO: 690999 - DNA, 565 bp, Homo sapiens
ccgagatcgtgccactgcactccagcctgggtgacacagtgagactctgtcttagaaaaaaaaaaagtatgaataaacaaaacctacagagttcatctacaatattctaagtccctcttacacactggatcccatagactttatatttcattttgctgaayccttaacccttacattttttttctgtttataaggtccaccttgaactaatttaccattttagagtggatctcaagtatacttaacaatacttaagttaagtgtacttaattatactctatttattcacaatcacaccatctctttttcttttttttcaggacactgtgtaccacttgttgcccaggttggtctcaaatcttgattcctgctctcaagggatccttccacttcagcttcccaaatcacgggaattacaggtgccaccaactgtgcccagtcacatgaattcttgatacctttcttacttatttctacattccctaacttacccataaaattaaacccattgatatggcttggttctgtgtccccatttaaatctcatctcaaactgtaataccca

SEQ ID NO: 691000 - DNA, 636 bp, Homo sapiens
aagtaatggcactaataacacagcatatttctttttctttttttgtgcctttttctgaaataatttttttaagtcagacatcttttcatttgcaatatgtaaatttgttgtgtctgacttataactttgaaaaaatcttttaaattttatattttttatatgttaaagttatatttaacaaaatcaaagtgttcaatgagttttcatgattgaatatcgctgtgaaaacactgtccaaagcaaattgagaacatgtgtattacctagaacgttgccttgggcccctgrgtcaggctcccactgcccacaccattctgatttctatcaccccagattggttttgtttgttctggaacatcataaaaatagattcacagactgtatgtataaatgtataaatgcaaaatatgcatatgtgtatatgtatatatatgtgaatatacatgtgtatatacatacacatatatgtgtatatgtgtatacatatatacatatacacatatatttttgtatccagcttttttgctcaacataatgattatgaaaatcattcacatttttaatgtattcacagttattttttaattgcttagtgatatttcattatgtaaatataagatattcaattactcattc

SEQ ID NO: 691001 - DNA, 635 bp, Homo sapiens
gaaaatttaaaagtgtaataaagcatttgacattttggtatctgttttwaagtattaagagagcaaggccataatgtaaacatgaaaacaaagaagtagaaaaagaactcacctaaaacgtttttgcttggctataaaatttataattgcataagaatgtgtctattggcaatcagagggaactgagagaaatgtctccgtagaatacaccttatataggagcaagaatttttttccacaaaaaaaagttgtggttgttttgtttttataattgtaaaggttaattcaatttttcaagctggagctcataccaggtagtacatgggtagactaaatttctttcttcactcaatttgtcttcatgaattgagcttgtgaattggacctgcattcacattggagtaaactctggctatgtgaacagaaataaaatctttacagttttatcaaggaaaaaataaagcacaactctgtatgtttgttttttttactttgttaccttttccaaaaaataatactaataacctgtattcattcattttatgctgctgataaaaacgtgcccaaaactgggtactaaaagaggtttaattggacttatggttccacgttgctggggaggcctcagaatcatg

SEQ ID NO: 691002 - DNA, 635 bp, Homo sapiens
gaaaatttaaaagtgtaataaagcatttgacattttggtatctgtttttaagtattaagagagcaaggccataatgtaaacatgaaaacaaagaagtagaaaaagaactcacctaaaacrtttttgcttggctataaaatttataattgcataagaatgtgtctattggcaatcagagggaactgagagaaatgtctccgtagaatacaccttatataggagcaagaatttttttccacaaaaaaaagttgtggttgttttgtttttataattgtaaaggttaattcaatttttcaagctggagctcataccaggtagtacatgggtagactaaatttctttcttcactcaatttgtcttcatgaattgagcttgtgaattggacctgcattcacattggagtaaactctggctatgtgaacagaaataaaatctttacagttttatcaaggaaaaaataaagcacaactctgtatgtttgttttttttactttgttaccttttccaaaaaataatactaataacctgtattcattcattttatgctgctgataaaaacgtgcccaaaactgggtactaaaagaggtttaattggacttatggttccacgttgctggggaggcctcagaatcatg

SEQ ID NO: 691003 - DNA, 635 bp, Homo sapiens
gaaaatttaaaagtgtaataaagcatttgacattttggtatctgtttttaagtattaagagagcaaggccataatgtaaacatgaaaacaaagaagtagaaaaagaactcacctaaaacgtttttgcttggctataaaatttataattgcataagaatgtgtctattggcaatcagagggaactgagagaaatgtctccgtagaatacaccttatataggagcaagaatttttttccacaaaaaaaagttgtggttgttttgtttttataattgtaaaggttaattcaatttttcaagctggagctcataccaggtagtacatgggtagactaaatttctttcttcactcaatttgtcttcatgaattgagcttgtgaattggacctgcattcacattggagtaaactctggctatgtgaacagaaataaaatctttacagttttatcaaggaaaaaataaagcacaactctgtatgtttgttttttttactttgttaccttttccaraaaataatactaataacctgtattcattcattttatgctgctgataaaaacgtgcccaaaactgggtactaaaagaggtttaattggacttatggttccacgttgctggggaggcctcagaatcatg

SEQ ID NO: 691004 - DNA, 636 bp, Homo sapiens
gaaaaataatatttatattgagtctttaaagattaggagttttctggctgtttgcagcatatatgaaaaggggaatggtattttcaaagatattactaaaagagtgagagagtgaactatttaggtattgccaaagaccagggtaagtggagagaatggggagatggctttaagaaagacaaagcatggtcacattccaagactccctccctcctatttcaaatattaatcaattaagcatagcaaataagactctttggccagagataaaaatttctcaatcctagaatcctgtgttgccactgtcaactcattggatgtctccgaagaaaattaccatataacaggcacactaagcaaattcccaccttaattaccattagacctttacctcagccaccgacttaaccctctttgacyggtttagacttctggaagaactttttttgctctatgttagttgtcagtccaagagagccataataataagcgctgatttgatgggctccttggcagccctcaacttaagtattaactggaattccacaattagtatctttccacactagtgataaagatagtgagtttaaaagagagagagagagagagagagagagagaacaccaccaaggaaca

SEQ ID NO: 691005 - DNA, 636 bp, Homo sapiens
gaaaaataatatttatattgagtctttaaagattaggagttttctggctgtttgcagcatatatgaaaaggggaatggtattttcaaagatattactaaaagagtgagagagtgaactatttaggtattgccaaagaccagggtaagtggagagaatggggagatggctttaagaaagacaaagcatggtcacattccaagactccctccctcctatttcaaatattaatcaattaagcatagcaaataagactctttggccagagataaaaatttctcaatcctagaatcctgtgttgccactgtcaactcattggatgtctccgaagaaaattaccatataacaggcacactaagcaaattcccaccttaattaccattagacctttacctcagccaccgacttaaccctctttgactggtttagacttctggaagaactttttttgctctatgttagttgtcagtccaagagagccataataataagcgctgatttgatggsctccttggcagccctcaacttaagtattaactggaattccacaattagtatctttccacactagtgataaagatagtgagtttaaaagagagagagagagagagagagagagagaacaccaccaaggaaca

SEQ ID NO: 691006 - DNA, 637 bp, Homo sapiens
ttgcaaaactgaaaaagcaacagtcctgatcaaacctaggtcttctgacttttaaccattaactcattctcacatgtaacactgccttctccatgcaaattggatctgtcctgctttgtctcatgcttaaatatgaatttgtatgaagtgactatattaaaaatttgcttgtaataccaagctagcaggaatagtcatagaaagaagaaggaaatttagcctctttagttaagccttggcctttctgtttagactgcaaattagcactgattgtgttagaggtttccatggtgtaggcactagtctctcatgaactgaacttacatcgtcaacatttaaagctgaaagccattagacaacagcaactgaggtcacttgttactgttaagaatttatgcagcactttayatttggaaagaggtcaatgaaatctagacagatttgagtgctgcctaaatggacaaatctgtgctggcatcccaacagcacagtcgcttcatagtacagtttttatcccttttgatttatgacagaatgtggtatttataacacagtgcacagtttaatatgtacggacattcactcatactaaaccaaaaaataccatatttgttttaagttaacagctttatcatta

SEQ ID NO: 691007 - DNA, 637 bp, Homo sapiens
ttgcaaaactgaaaaagcaacagtcctgatcaaacctaggtcttctgacttttaaccattaactcattctcacatgtaacactgccttctccatgcaaattggatctgtcctgctttgtctcatgcttaaatatgaatttgtatgaagtgactatattaaaaatttgcttgtaataccaagctagcaggaatagtcatagaaagaagaaggaaatttagcctctttagttaagccttggcctttctgtttagactgcaaattagcactgattgtgttagaggtttccatggtgtaggcactagtctctcatgaactgaacttacatcgtcaacatttaaagctgaaagccattagacaacagcaactgaggtcacttgttactgttaagaatttatgcagcactttacatttggaaagaggtcaatgaaatstagacagatttgagtgctgcctaaatggacaaatctgtgctggcatcccaacagcacagtcgcttcatagtacagtttttatcccttttgatttatgacagaatgtggtatttataacacagtgcacagtttaatatgtacggacattcactcatactaaaccaaaaaataccatatttgttttaagttaacagctttatcatta

SEQ ID NO: 691008 - DNA, 959 bp, Homo sapiens
tttttttkttgttgttgttgttgttggttttttttttcacctgactgagtactctgtcatgagcaggaggtcaatttatggtcctttaaggtggataaatccgatagtttttctttcttttctgttgtattttttaaacctaccttagaatactgagaattcacttaatatacggacttcaagaatgattttctctaaagaggaagctttatgcctaagaagtggatctctcactgatactcattttctggggactggtttgtgactccatataacactagctcttttaatagccacaggaagaattagttaaaaattgactttgaatgtaattcatttgctacaaagtgggttttcaccccctgctcttctctttcactcacatccacattttcgtttctagtcctttgttaaaaaatgaactgcacagcaaaagcatgtgaggataaggatgtctgaataccatcacgcaccatggtgttcccagcatttagccattaatgcctggctgctgtcctgtgctagaggagggatgagagggagttaagaggagcagctgtcgaaggaaagcccagggatgagctcccagagacacttacttggaaagaagaaaacagtaactttcatggtgtctagtctcctcttggctctctgcacccaactcccagggatatggctagttaccagccatgccactaacttttgtgtcactgcatgcaaactcagcacagaaaaaactgacagaaaaatgctgctttattgatctacctgaacttaaattagtaagagtttggtatagataccttacagagctaattatgggcaaacatttgaattgagtatagtttgcttcagcccagtttttttcctcactcccttttgtaaacagtcaatgttcacttattgactttgttctctaaaattccaccgtaaataccaatcaaggggattgtggtatg

SEQ ID NO: 691009 - DNA, 2052 bp, Homo sapiens
aagaggcaaattaggatggcaagagttttctgaaaggctgtgatgactaatatttcaggactggaacatgatagttattaaaagaaacatgagaggtgttctcctaattcctaataggcccatgtccccaccacaagaactactacaaacaacattcagggctgaattcacacagtttagtctctaaggcctaaatgagttttctcaattttctcccatgtggcccattatgtgaatcaaagaaatcagtaattcatttgttgaaggtcaaatataaggacataatgaggcccatgcactaaaatgaataaaaagaatgaacaaaaagaaaccaagataaactcttgttgaaaacaatgccccagaatctagcaaatagtctaaatgtacctaaaagaccagaacgagatgacatattagttcagtgatctcatgacatataccaaacactttcttccatgttaaaaaaaaaaaaaaaaagttcatctagcatctgatgcatacatttrgaaacaaccccaatattgaccaaggtttttcaaatgccttacctcacaactggaacttctaagcaaaagctaatgaggccatctgggaaagatcaccaggaggccttactactgccagtatttcacatggaacaatcgatagcatgtcttaacaagtgcaaagatttcagtctccgaattcattctgtagcatatttcaactagttagcagggataaggattgagccaacaacttcctatttgtgcaagtagaatttaaagattatttcttaagaatttagtcctagttatttttgttgtcctcaaaacacagtgtccctgttagaaggaatataaataaacacacattttcagatggcaatttggcattgctatcaaaaaattaatatatgcatgtactctttgatccaccaattccattttgaggaatccagcttataaaatttggggatgcaaatataaaaatgttcactcattgcactgtttttataaaggtgaaaaatcatacatatatatatatagctgattaacatgagttagacccatatacactaatgtgtgaagacccctaagacactgttcagttcaaaaagcaagtttcagaacaagtatagtatttcttatgtaaaaaaattgtgtgtacgtttgtgtgaataaatgcatggaaaacagtctgaagggattcacagtatataacagaagctgccctctagagaagaagaagtgaatcaatgtatgtggactggggtaggttcgaagagaaggtccgttttctaaagagggattttcaccttttactccacacccatctgtattatttaaacatttatgtaacacacataaaacatttgttctttatagaaaataagatgcaatatcaacttttacctaaactccagaatcacttaaagaggatgctcaaatagtaaaacaaagaataggctgggcatatggtggttcacacctataatcccagcactttgggaggctgaagagggcggatcacttgagcccaagagtttgagatcagcctggggaacacagtgagacctctctacaaaaaaataagaaaattagctgggcatagtggcacacgcctgtagtcccagccaagtagctgggaggctgcagcgggaggactccttgagcctaggaggtcgaggctgcatgatccatgatcacaccaccacacaccaccctgagagacagaccaagatcgggtatcaaaaaaaaaaaaaaaaagacagaaataaaaaatattggcagtcaaaaacatactttgtagactatatccttccaaggaataaagaaaaattgtgggcagcatcaatcaacagttataaatgaatatgacagtgttttcatgaaagaacaagcatcattcagagaactaaaggatttgtatctcagatcttaaggaatataaaagatactgaactcagaaacattactaaaaaggtgtaatcattccaaatattttttagaaatacaattttcacaatgaatcctattattttggtgcaaattgtatactgtgtgggtg

SEQ ID NO: 691010 - DNA, 2052 bp, Homo sapiens
aagaggcaaattaggatggcaagagttttctgaaaggctgtgatgactaatatttcaggactggaacatgatagttattaaaagaaacatgagaggtgttctcctaattcctaataggcccatgtccccaccacaagaactactacaaacaacattcagggctgaattcacacagtttagtctctaaggcctaaatgagttttctcaattttctcccatgtggcccattatgtgaatcaaagaaatcagtaattcatttgttgaaggtcaaatataaggacataatgaggcccatgcactaaaatgaataaaaagaatgaacaaaaagaaaccaagataaactcttgttgaaaacaatgccccagaatctagcaaatagtctaaatgtacctaaaagaccagaacgagatgacatattagttcagtgatctcatgacatataccaaacactttcttccatgttaaaaaaaaaaaaaaaaagttcatctagcatctgatgcatacatttagaaacaaccccaatattgaccaaggtttttcaaatgccttacctcacaactggaacttctaagcaaaagctaatgaggccatctgggaaagatcaccaggaggccttactactgccagtatttcacatggaacaatcgatagcatgtcttaacaagtgcaaagatttcagtctccgaattcattctgtagcatatttcaactagttagcagggataaggattgagccaacaacttcctatttgtgcaagtagaatttaaagattatttcttaagaatttagtcctagttatttttgttgtcctcaaaacacagtgtccctgttagaaggaatataaataaacacacattttcagatggcaatttggcattgctatcaaaaaattaatatatgcatgtactctttgatccaccaattccattttgaggaatccagcttataaaatttggggatgcaaatataaaaatgttcactcattgcactgtttttataaaggtgaaaaatcatacatatatatatayagctgattaacatgagttagacccatatacactaatgtgtgaagacccctaagacactgttcagttcaaaaagcaagtttcagaacaagtatagtatttcttatgtaaaaaaattgtgtgtacgtttgtgtgaataaatgcatggaaaacagtctgaagggattcacagtatataacagaagctgccctctagagaagaagaagtgaatcaatgtatgtggactggggtaggttcgaagagaaggtccgttttctaaagagggattttcaccttttactccacacccatctgtattatttaaacatttatgtaacacacataaaacatttgttctttatagaaaataagatgcaatatcaacttttacctaaactccagaatcacttaaagaggatgctcaaatagtaaaacaaagaataggctgggcatatggtggttcacacctataatcccagcactttgggaggctgaagagggcggatcacttgagcccaagagtttgagatcagcctggggaacacagtgagacctctctacaaaaaaataagaaaattagctgggcatagtggcacacgcctgtagtcccagccaagtagctgggaggctgcagcgggaggactccttgagcctaggaggtcgaggctgcatgatccatgatcacaccaccacacaccaccctgagagacagaccaagatcgggtatcaaaaaaaaaaaaaaaaagacagaaataaaaaatattggcagtcaaaaacatactttgtagactatatccttccaaggaataaagaaaaattgtgggcagcatcaatcaacagttataaatgaatatgacagtgttttcatgaaagaacaagcatcattcagagaactaaaggatttgtatctcagatcttaaggaatataaaagatactgaactcagaaacattactaaaaaggtgtaatcattccaaatattttttagaaatacaattttcacaatgaatcctattattttggtgcaaattgtatactgtgtgggtg

SEQ ID NO: 691011 - DNA, 2108 bp, Homo sapiens
tgtgaatagttggggtataaactgatagtctgtataaactgaagcctcttttgtgccaaaagttaagacattctggtgattcccacttggacttgagacaaaggccataactgattcacctacagagccccaataatatgcaaagcccttcagggcctggggccacatgagcacaaagccaaacagccagtactcagttaagcgtgacttaccttaggcaaaaccaagtgggactttaatttacatgtatgactgaaaaataattagttctctgccaaacagtttttaatattatagtttttaaggtattgctataagatgcattttgctagttcaaatatttgtcatttttaagattatttttctccccagagaactgtatctgcttccaataaattcaatttcaattatatacagttttgaatatttttatattaatttacaaaaacagtaagaaaaataaaaaatgtcccatgactgtattaatggtttaaaaattctaattactatgaatcaaagcccatactaaagagtattgtaaaagttatttatatctaattccagttgttacattattaccttagtttttgccctatgctgtgttttcagaggaaatctttaaacagtatggctttgtgagatttctgattgctaatgcattttaaaaactatgaatgagagtcaggtgctgtggctcactcctgtaatcccagctactagggagactgaagcaggagaatcacttgagcccaggagttcaagactagcctgggcaacacagcaagactctgtcctatttaaaacaaacagaaaaaaaactaggctacccaatgatactgtacatagtttatccttaccatttgtaacctcccatagtctctatagagattatagtttattgtttatgttttgatcacataactctgaggttatatcagaactctgaagctacattatgctatccatacaaacacctatactaaaaacctcagtgagagtcatccttgattctctcctcttccttacccaccagtcccacagttcactaaaacttgcagaactaaccttggatagatctcaaataaatcttctcaccttctcaccattggggatcctataatctcttgctaacaccaatgtagccacctcctaattattttcctgcctccagtactgactccacaaatttgggcacggagttcaaaaatcctttggtttctcccagtccaagcacacatgtccagcccctgattcattacctagccttctctctctcctcccgctatttctaaacttgaaatacattattgagaagctgtttgttgttttctacagacaccaagcaatgtcttacccctgatgctcttgttgaacattgtcctctctgtctccccacccactcatttcccaggctaatctccactggaacctctctaggtagccttatctgttrgtggcccatggctggattaggtacagttgggtacctcatgcaaatccactctgtcataatcaactctttacctagttctcctcctctgaattcttaagctcactgagaacagggatgaagcctttcttatctctgtataacatgtctgacatctagtagatacccaataaatactggttagataagtaaatgactagatgaataaaaagtaaagcaagtgccaatttaaaatgtagcattttggctgggcacaggggctcatgcctgtaatcccagtgctttgggaggccaaggcaggcggatcatgtgaggtcaggagtccaacaccagcctggccaacatggcgaaaccctatctctactaaaaatacaaaaattagccaggcatgctggtacatgcctgtaatcccagctacgtgagaggctgaggcaggagaattgcatgaacccgggaggtggaggttacagtgagctaagaccgcaccactgcactctagcctgggtgacagagaaagactctatcttaccaaataaataaataagtaaataaataaattaactgaataaatacataaaatatagcatttttacttaacgtaactaatggcactttaaaattagtcttaaacacggatattctagctatgtaggatttc

SEQ ID NO: 691012 - DNA, 2108 bp, Homo sapiens
tgtgaatagttggggtataaactgatagtctgtataaactgaagcctcttttgtgccaaaagttaagacattctggtgattcccacttggacttgagacaaaggccataactgattcacctacagagccccaataatatgcaaagcccttcagggcctggggccacatgagcacaaagccaaacagccagtactcagttaagcgtgacttaccttaggcaaaaccaagtgggactttaatttacatgtatgactgaaaaataattagttctctgccaaacagtttttaatattatagtttttaaggtattgctataagatgcattttgctagttcaaatatttgtcatttttaagattatttttctccccagagaactgtatctgcttccaataaattcaatttcaattatatacagttttgaatatttttatattaatttacaaaaacagtaagaaaaataaaaaatgtcccatgactgtattaatggtttaaaaattctaattactatgaatcaaagcccatactaaagagtattgtaaaagttatttatatctaattccagttgttacattattaccttagtttttgccctatgctgtgttttcagaggaaatctttaaacagtatggctttgtgagatttctgattgctaatgcattttaaaaactatgaatgagagtcaggtgctgtggctcactcctgtaatcccagctactagggagactgaagcaggagaatcacttgagcccaggagttcaagactagcctgggcaacacagcaagactctgtcctatttaaaacaaacagaaaaaaaactaggctacccaatgatactgtacatagtttatccttaccatttgtaacctcccatagtctctatagagattatagtttattgtttatgttttgatcacataactctgaggttatatcagaactctgaagctacattatgctatccatacaaacacctatactaaaaacctcagtgagagtcatccttgattctctcctcttccttacccaccagtcccacagttcactaaaacttgcagaactaaccttggatagatctcaaataaatcttctcaccttctcaccattggggatcctataatctcttgctaacaccaatgtagccacctcctaattattttcctgcctccagtactgactccacaaatttgggcacggagttcaaaaatcctttggtttctcccagtccaagcacacatgtccagcccctgattcattacctagccttctctctctcctcccgctatttctaaacttgaaatacattattgagaagctgtttgttgttttctacagacaccaagcaatgtcttacccctgatgctcttgttgaacattgtcctctctgtctccccacccactcatttcccaggctaatctccactggaacctctctaggtagccttatctgttagtggcccawggctggattaggtacagttgggtacctcatgcaaatccactctgtcataatcaactctttacctagttctcctcctctgaattcttaagctcactgagaacagggatgaagcctttcttatctctgtataacatgtctgacatctagtagatacccaataaatactggttagataagtaaatgactagatgaataaaaagtaaagcaagtgccaatttaaaatgtagcattttggctgggcacaggggctcatgcctgtaatcccagtgctttgggaggccaaggcaggcggatcatgtgaggtcaggagtccaacaccagcctggccaacatggcgaaaccctatctctactaaaaatacaaaaattagccaggcatgctggtacatgcctgtaatcccagctacgtgagaggctgaggcaggagaattgcatgaacccgggaggtggaggttacagtgagctaagaccgcaccactgcactctagcctgggtgacagagaaagactctatcttaccaaataaataaataagtaaataaataaattaactgaataaatacataaaatatagcatttttacttaacgtaactaatggcactttaaaattagtcttaaacacggatattctagctatgtaggatttc

SEQ ID NO: 691013 - DNA, 990 bp, Homo sapiens
cacgctttggcaattcatattttagaaaagttaaatgtgtcagtttttggcaacttatgtatattttatagatcttgaccttttttttttttggagacagagtctcgctctgtgtcccccaggctggagtgcagtggcgtgatctcggctcattgcaacctctgcctcctgggttcaaggattcttctgcctcagcctcctgagtagctgggactactactcagctgggcgtgccaccacgcccgtctaatgttttgtttttttttgagatggggtcttgctctgttgcccaggctggagtgcagtggcaagatctcagctcactgcaagctctgtctcctgggtccacgccattctcctgactcagcctcccgagtagctgggactacaggtgcccgccaccatgcctggcaaattttttgtatttttagcagagatggggtttcactgtgttagccaggatggtctcgatctcctgacctcgtgatccacccacctcrgcctcccaaagtgctgggattataggcgtgagccactgcacccagtcaatgtttgtatctttagtagagatggagtttcaccattttggtcaggctggtctcgaactcctgacctcgtgatctgcccacctcggcctcccaaagtgctgggattataggcatgagccactgtgcccagccaatgtttgtatctttagtagagacagagtttcaccattgtggtcaggctggtctcgaactcctgacctcgtgatccacccactttggcctcccaaattgttgagattacaggctgagctactgtgaccagccagatcttgatctcttaaatgaatacactattgagtcattttatgaaaaatatgtttacctcctagtaaatctgtttgttaaatgtgggtttttattaattggttcagtgaccttacttattagtcactttttgttcatttttttaaaagtctccatttaaaactgctattgtgtggaa

SEQ ID NO: 691014 - DNA, 990 bp, Homo sapiens
cacgctttggcaattcatattttagaaaagttaaatgtgtcagtttttggcaacttatgtatattttatagatcttgaccttttttttttttggagacagagtctcgctctgtgtcccccaggctggagtgcagtggcgtgatctcggctcattgcaacctctgcctcctgggttcaaggattcttctgcctcagcctcctgagtagctgggactactactcagctgggcgtgccaccacgcccgtctaatgttttgtttttttttgagatggggtcttgctctgttgcccaggctggagtgcagtggcaagatctcagctcactgcaagctctgtctcctgggtccacgccattctcctgactcagcctcccgagtagctgggactacaggtgcccgccaccatgcctggcaaattttttgtatttttagcagagatggggtttcactgtgttagccaggatggtctcgatctcctgacctcgtgatccacccacctcagcctcccaaagtgctgggattataggcgtgagccactgcrcccagtcaatgtttgtatctttagtagagatggagtttcaccattttggtcaggctggtctcgaactcctgacctcgtgatctgcccacctcggcctcccaaagtgctgggattataggcatgagccactgtgcccagccaatgtttgtatctttagtagagacagagtttcaccattgtggtcaggctggtctcgaactcctgacctcgtgatccacccactttggcctcccaaattgttgagattacaggctgagctactgtgaccagccagatcttgatctcttaaatgaatacactattgagtcattttatgaaaaatatgtttacctcctagtaaatctgtttgttaaatgtgggtttttattaattggttcagtgaccttacttattagtcactttttgttcatttttttaaaagtctccatttaaaactgctattgtgtggaa

SEQ ID NO: 691015 - DNA, 990 bp, Homo sapiens
cacgctttggcaattcatattttagaaaagttaaatgtgtcagtttttggcaacttatgtatattttatagatcttgaccttttttttttttggagacagagtctcgctctgtgtcccccaggctggagtgcagtggcgtgatctcggctcattgcaacctctgcctcctgggttcaaggattcttctgcctcagcctcctgagtagctgggactactactcagctgggcgtgccaccacgcccgtctaatgttttgtttttttttgagatggggtcttgctctgttgcccaggctggagtgcagtggcaagatctcagctcactgcaagctctgtctcctgggtccacgccattctcctgactcagcctcccgagtagctgggactacaggtgcccgccaccatgcctggcaaattttttgtatttttagcagagatggggtttcactgtgttagccaggatggtctcgatctcctgacctcgtgatccacccacctcagcctcccaaagtgctgggattataggcgtgagccactgcacccagtcaatgtttgtatctttagtagagatggagtttcaccattttggtcaggctggtctcgaactcctgacctcgtgatctgcccacctcggcctcccaaagtgctgggattataggcatgagccactgtgcccagccaatgtttgtatctttagtagagacagagtttcaccattgtggtcaggctggtctcgaactcctgacctcgtgatccacccactttggcctcccaaattgttgagattacaggctgagctactgtgaccagccagatcttgatctcttaaatgaatacactattgagtcattttatgaaaaatatgtttacctcctagtaaatctgtttgttaaatgtgggtttttattaattggttcagtgaccttacttattagtcactttttgttcatttttttaaaagtctccatttaaaacygctattgtgtggaa

SEQ ID NO: 691016 - DNA, 1889 bp, Homo sapiens
ctattaaagctataaatggtttaggtcaaataaactgagtgacatcttaagttatatgtgcatgtgcttgkgggtctgtatcaaatgtatctcttattgacaaacatatctcgtgaagtattcacatctcctttcttagaggatgtggcactgtctgaacaacagcctggtgttcttcagaacaatcattttgaaccggcatttcctttggaatcactctcaatcttttctcagcctgttcaacaagactgtgtataaaagtagtagagtggcacctaatagttagctcttgagcagatcattcaacatggtttaagttgtgaattttgactcaaaaatagatgaaaattaactacttgagaatgtgttacagatattatggctctttacctctaagtagttcagtgtatggttcctaagaacaagaccattctcttttatatccataaaactattattaaaataaggaaaataacgttgatacaatactattacttaatatacagaccttatccattggcatctttctctattctatcttttgtagcaacaaaaaggaaaaagtctgcaaatatttgatttttacttaatttttcatatattttaagctctttaagtaacttttaaaacttttaaaacacattaaagtgtttgtgggctgccatgtatcaaactttaacataggtattacttttttaaaatagtttaaagtgaccttaaagtgtcttctgctaccttattgaattaaaaagtataacacataatagtattcattcatttgttcacccatctatttagcagtactagtagtgttggagatctatatagcactgagacaggatgagacattaacaggatgagatgacctgttaatagactgtgatcattctataaatattgcagaattcatagaaataaacctagaagctgaggctgataaaatactacagctgtccgtaatcattcacttaaaatcgaatcatcttcatcaatttctggatgattttgttaaaatcaaacattgtaacttagaagttgaaaaacatagtttctattttaaaatattttaaataaatactgtttttctcttgttattgagattttacataagattttctattaaaaaaagattctgtttctaataatgcttaaagataacttgtctagacctgtggtttctggatgtttttggtcacacaccacatatgtttaaaaaaaattttatatctctaatgcatatgtgctggtttatttataaaagtattactagtatactagtattacatgtttattataaaacttaccaaaaataaaattttaaggagccaaataaaaataaatataaataaattttgaatgttttttttcacttcaatgaattatcttgaacaatccttggggttcttgcaccatgctttccttgggccaggacttatcttcaaggctgaactattttatgtttcattatctattccaggttattgttttatggtggtgactactactatagtacatagacctgtttaaaggtcatatttttcttgaggaatgtgcattcattttcatatttgcatatactcctaggtaaggatcattttcctggggtgtactcatttatttcatatttgtttataaatatttgtgcaccacagtgtgactcttacattttttgcttgtcataaagttttagataagacacttcaggaaacatttgtgctaaaggtaaagaataatgaattaaagaggtgactaaatggaaaactatttttaccgtaaacaatgccactccctcagtcctcctaaaggatgatttcacacattaagaagacgtagataactcaggaaagagtgtttcttttaaattagttgtaatttcatgttcatcgcaa

SEQ ID NO: 691017 - DNA, 1889 bp, Homo sapiens
ctattaaagctataaatggtttaggtcaaataaactgagtgacatcttaagttatatgtgcatgtgcttgggggtctgtatcaaatgtatctcttattgacaaacatatctcgtgaagtattcacatctcctttcttagaggatgtggcactgtctgaacaacagcctggtgttcttcagaacaatcattttgaaccrgcatttcctttggaatcactctcaatcttttctcagcctgttcaacaagactgtgtataaaagtagtagagtggcacctaatagttagctcttgagcagatcattcaacatggtttaagttgtgaattttgactcaaaaatagatgaaaattaactacttgagaatgtgttacagatattatggctctttacctctaagtagttcagtgtatggttcctaagaacaagaccattctcttttatatccataaaactattattaaaataaggaaaataacgttgatacaatactattacttaatatacagaccttatccattggcatctttctctattctatcttttgtagcaacaaaaaggaaaaagtctgcaaatatttgatttttacttaatttttcatatattttaagctctttaagtaacttttaaaacttttaaaacacattaaagtgtttgtgggctgccatgtatcaaactttaacataggtattacttttttaaaatagtttaaagtgaccttaaagtgtcttctgctaccttattgaattaaaaagtataacacataatagtattcattcatttgttcacccatctatttagcagtactagtagtgttggagatctatatagcactgagacaggatgagacattaacaggatgagatgacctgttaatagactgtgatcattctataaatattgcagaattcatagaaataaacctagaagctgaggctgataaaatactacagctgtccgtaatcattcacttaaaatcgaatcatcttcatcaatttctggatgattttgttaaaatcaaacattgtaacttagaagttgaaaaacatagtttctattttaaaatattttaaataaatactgtttttctcttgttattgagattttacataagattttctattaaaaaaagattctgtttctaataatgcttaaagataacttgtctagacctgtggtttctggatgtttttggtcacacaccacatatgtttaaaaaaaattttatatctctaatgcatatgtgctggtttatttataaaagtattactagtatactagtattacatgtttattataaaacttaccaaaaataaaattttaaggagccaaataaaaataaatataaataaattttgaatgttttttttcacttcaatgaattatcttgaacaatccttggggttcttgcaccatgctttccttgggccaggacttatcttcaaggctgaactattttatgtttcattatctattccaggttattgttttatggtggtgactactactatagtacatagacctgtttaaaggtcatatttttcttgaggaatgtgcattcattttcatatttgcatatactcctaggtaaggatcattttcctggggtgtactcatttatttcatatttgtttataaatatttgtgcaccacagtgtgactcttacattttttgcttgtcataaagttttagataagacacttcaggaaacatttgtgctaaaggtaaagaataatgaattaaagaggtgactaaatggaaaactatttttaccgtaaacaatgccactccctcagtcctcctaaaggatgatttcacacattaagaagacgtagataactcaggaaagagtgtttcttttaaattagttgtaatttcatgttcatcgcaa

SEQ ID NO: 691018 - DNA, 1591 bp, Homo sapiens
ccattaacctcggaacttaaaagtcatagaaytgggagttgcaaaaactgcctatgccactcagtccacacaaagtaaaagaattccatctctccatttctccacttttgtctcctttgttattcaaatgagcaaaaacttgttttttttttcctttttcattctgtttaagtagagttattctagaaaactatgtagaaaaattgtatgtgcaaaattaaataagttgtgggtgagagggtttaaggtcaccttttatgatcaagccaagattgtcagattcatggccactgtaacacacaaggatgaatagttggactaaaggattcaagatcacattttcagttctgaagacaacatcaacattaaagttcttgcttctcaccacataagatttgacgtgtacactaatgaagacaactccagacaaattatatatacttttcacagaaccaaaaaaaaaaatctcggaagtcaaatctgtttgctttcattctgtactaaattcttcttataatctttaaaatccatatttttccgttctcatttcaagtatttcaagataagcagctgccaccatttcccactgaaacttaatttcataatccaacagtttcaaaagtacatcttccgggactacaagaaaaaatgatcatctgtttcattttgtcctcttccatttccattctttattggttgctaaatgaggtatactgcttgaagtctcactgttctcagtgaccaaagtactgcaaaaaaagtagcatgtctgagaattagagcccgtagacatgatactagaaattttagccctttcttcctaaattcagcttctaaaatctagcattatggtccccaactaccgggaaaataaatgcctggtttctgagttattccaacactcagttgtaatgttactgtatttttagctacgttttcttcccacctctaagtcattagaaactgatgtcattagaattgaacaattttgacccaaagttgtttatattctcttgctgaaatggatgtgtcgccctggcccataatatttatacatattttcctttttagttaattataattagcatgctgtttattgcattccttttacctttccctaagaatttgctttttccttcaattgtttgcattggtatcttttgaatttcctccctcttatttattttttggcataaataataattggtgctgcagcaggagcttgataaagctttttattatgttcccttttgtccaacagcaatcatgaggcattaaaaaggctaaacagtttgcccacagttccaagacaaaataaaagtaaagctttcagtagagttcgttttcttgctttccacattccttttttattaaaggtatagttctcctattatttatgttgattttttttctaaattctgtcaatttttttatacgtcttaattagaattttcccataagtttatatgtttatcttgtttttgaaatgtctttctgactgtaatatataaatggttattatttaagtcagttagcatgaaaatgcttccacagctctctgcttaccacagaatccttagaaaattaactc

SEQ ID NO: 691019 - DNA, 1591 bp, Homo sapiens
ccattaacctcggaacttaaaagtcatagaattgggagttgcaaaaactgcctatgccactcagtccacacaaagtaaaagaattccatctctccatttctccacttttgtctcctttgttattcaaatgagcaaaaacttgttttttttttcctttttcattctgtttaagtagagttattctagaaaactatgtagaaaaattgtatgtgcaaaattaaataagttgtgggtgagagggtttaaggtcaccttttatgatcaagccaagattgtcagattcatggccactgtaacacacaaggatgaatagttggactaaaggattcaagatcacattttcagttctgaagacaacatcaacattaaagttcttgcttctcaccacataagatttgacgtgtacactaatgaagacaactccagacaaattatatatacttttyacagaaccaaaaaaaaaaatctcggaagtcaaatctgtttgctttcattctgtactaaattcttcttataatctttaaaatccatatttttccgttctcatttcaagtatttcaagataagcagctgccaccatttcccactgaaacttaatttcataatccaacagtttcaaaagtacatcttccgggactacaagaaaaaatgatcatctgtttcattttgtcctcttccatttccattctttattggttgctaaatgaggtatactgcttgaagtctcactgttctcagtgaccaaagtactgcaaaaaaagtagcatgtctgagaattagagcccgtagacatgatactagaaattttagccctttcttcctaaattcagcttctaaaatctagcattatggtccccaactaccgggaaaataaatgcctggtttctgagttattccaacactcagttgtaatgttactgtatttttagctacgttttcttcccacctctaagtcattagaaactgatgtcattagaattgaacaattttgacccaaagttgtttatattctcttgctgaaatggatgtgtcgccctggcccataatatttatacatattttcctttttagttaattataattagcatgctgtttattgcattccttttacctttccctaagaatttgctttttccttcaattgtttgcattggtatcttttgaatttcctccctcttatttattttttggcataaataataattggtgctgcagcaggagcttgataaagctttttattatgttcccttttgtccaacagcaatcatgaggcattaaaaaggctaaacagtttgcccacagttccaagacaaaataaaagtaaagctttcagtagagttcgttttcttgctttccacattccttttttattaaaggtatagttctcctattatttatgttgattttttttctaaattctgtcaatttttttatacgtcttaattagaattttcccataagtttatatgtttatcttgtttttgaaatgtctttctgactgtaatatataaatggttattatttaagtcagttagcatgaaaatgcttccacagctctctgcttaccacagaatccttagaaaattaactc

SEQ ID NO: 691020 - DNA, 601 bp, Homo sapiens
tttaaacagaatctccattctctttgcagattagctgtggcacttctcrcgtattggctgggctttccacctccctccctcttctttctttcacctcctccgcttgtatgatcaggaaaaatcagtttaatattagccaaaataaaacaataataaataaatcttctaggggaaaaaaattacactccatttacattgctccaacctcagtgggggcctcaacactgctgagccccgctgctttctccctggaccaccgagctcactgagaccttagccaacacttgccccaaacttctctgttttgctcaaactgcaacctcaaagccatctgttttcacttcctaataacacccttctctcatccctcacttcatagagaaatttacagcagccggacacgggttcttactccatttgggctgctttaacaaaatactataaactgggtagcttaccaataacagaaacttgtatttctcacagttctggagactgggaagttcatgattatggcaccagcggatcaggtgtctggcaagggctcactttttggttcacggatggcaccttcttgctgtgtcctcacatggtagaaggg

SEQ ID NO: 691021 - DNA, 2261 bp, Homo sapiens
tgcattttatatatttttagaaaccaaataaatgcagaaaactatttcgtatactaattatattaaaccagcagaaatataaaggcaataaagtatatacatatatatggggggaggggaaagattaaaaaatagatttacagccagacatggtgatagccctaaatgtatttctcaatatgtttttctttattgaccctaggaggatttgagttgctgcagctttaaacagaaaattgccatgttcactaattgtgagcacataaatatgcttttagtactgctttgcttatgtacaaataaatctgtaatatgtattatatgtaatatccttttctttgactttcattttaaatgtatattttctgatcattatgagctgtaaaacaaagaatcaatattggatattctcccaaataataaattttcaggattcattggggcattacagttgtcagtttgtttcttacatcctttatatttttaaatacaattttacttcctttaaaagataccaaagagaatagtggcacatatcactacacataattacatttttcatatatacttaaagaatcatctactgctccaaagatggcttcatcaaagtaaaactgaattaagaaactactatgccttttatttcaaaagtgaaagaagaaatgatatcttaatgaatctctgtattcccagatttccctaaaaccataagtgagaggaagagaactaacatttcagtccctactacgtgccaagtgcaatatggggcaccggtcacactttaaacattcacagccatccaaggaactgctcctaaatcacacaacccctaagtaactgacatagcatttgaacttagatgtttcagacctcaaggcacttttctgtattccatggtagagatgcatgagctttacggtgcccagtttctgcattttaaccactttttaatgtggaagtatataaattgtcatttttataggaatatttttataagaagttaaacctttacttagaaattatacatgagggccgggcgcagtggctcacgcctataatcccagcactttgggaggccaaggtgggcagatgacttgaggtcaggagttcgagaccagcctggccaacgtggcgaaaccccgtctgtacgaaaagtaaaaacaaaatagctgggcgtggtggcgggcacctgtagtcccagctactcaggaggctgaggtgggagaaccacttgaacccgggaggcggaggttggagtgagccgagatcgcaccactgcattccagcctgaacaacaaaagcgagactctctctctctctctatacacacacacacacacacacacacacacatatatatatacacattatgtatacacacacatatatatacacatacacacacacacacacacacacacacacatatatatatatttagccaaagtagtatttattgagccaaagtaaatttcctagtaatttcaactttctttagggccacatagaagaaacaatttcccatctatatatatagagagagagagagagtctcactctaaaaaaaaagtatatatatgagaataatagtacgttataaaagcaaagatgaaatgagaaacttaaagtcattcaaaataccaataagtcctagtttgggggacttttaaaatgttaattatccaccctgtcctctaaaatcatgttttgttaatggcagagcaagaaacaggaactactgttaactcttcacccactaccctctccacatacgtgtgctgtgtctattaggaaagaccagtggagtcctataaaatgggcataaatatgctggatgcgtttatactttctacagacatttagtgagcccctgtttttgtccggacactggagtgagatgcatatatttgttctctaccttcaggaggttttttttgaggtggagtctcccattgtcgcccaggctggacggcaatggcctgatctcggctcactgcaacctccccttcctgggttcaagcaattctcctgcctcagcctcctgagtagctgggattacaggcgtccgccaccatgcccagccaaattttttttttttttagtagagacgggctttcactatgttgaccaggctggtcttgaactcctgacctcgtgttccacccgcctcgtcctcccaaaatgctgggattacagcagtgagccactgcaccyggccggtttacagtcttgatgatagagatgacaacttcagtacaaca

SEQ ID NO: 691022 - DNA, 652 bp, Homo sapiens
attggcaaatgctacaaaacagtttttttttcccctcctgagaaatggttgttaaacatgtaacagcaaacacagcactgcacatgcccctctggtggtctgaaataccttgatgaatgcagtatgaccatatgcaggggttttcaaactttattgttgttggtacatccatgatcacatgacagatgatgtttgggtacaggatatacttctgggatgtggcatagagaatttgggtactaggttatgtacaattccttgcctatcaatcccacctttctttcttaggaaaacwttcctaaaagattcctactcattcttcctcctcaccccttatctggctctatcatgccatccatcaggtatcaatgcaggcagcactaatttatgaagtccttcccagcccctaggttaggggcaggtcttcctgctatgtgattccacagcacagtgtttgtttaactgcttgatgatgattaaatttgttacatgcggtgtcttttcttgctatcttattcatcgaagttttcccagggcatagctaactgccttatatgtgccagacactcagggctgattacatgaatgaatgaatggagtgtatgcaagacatgttattttcaggtatcttttcattggttctaatttatat

SEQ ID NO: 691023 - DNA, 613 bp, Homo sapiens
cctaacagtataggaccaaccaaggcatctcacaggatttcttgctcagaattccttctaaaacagtgtgaataccagctttgcgtgattttgggagtggggtgggatgatggggcaggagaggaatggaggcctatagacctcgcttttgtcttaaatgattaattgaaataaaattatgcacataccatatgaatgatcaagattgattgttgacccaggccaaatctattatctgtctaacctttccttaaataagcatggtgctcatttagttaagaaatatttatagatcacccacactctgccmagccctgcaccagacactacgggttcagtggtcaacacactcaacccctgatctcacctgttacttcttagggctgggcactaaggaatcaaaagaaataagggcttttcttcagggatcttatagtctaggtggagaggaaaaggcaaacaaaaaagcacattaaattataattcaggatttcagagaagagaaattacagaatataaaactctcaaaggagaaaggagctaaggaacttcaggaacattaattttaatcaagttcagagaacacacaccgcaaagccacacaaagcatccc

SEQ ID NO: 691024 - DNA, 613 bp, Homo sapiens
cctaacagtataggaccaaccaaggcatctcacaggatttcttgctcagaattccttctaaaacagtgtgaataccagctttgcgtgattttgggagtggggtgggatgatggggcaggagaggaatggaggcctatagacctcgcttttgtcttaaatgattaattgaaataaaattatgcacataccatatgaatgatcaagattgattgttgacccaggccaaatctattatctgtctaacctttccttaaataagcatggtgctcatttagttaagaaatatttatagatcacccacactctgccaagccctgcaccagacactacgggttcagtggtcaacacactcaacccctgatctcacctgttacttcttagggctgggcactaaggaatcaaaagaaataagggcttttcttcagggatcttatagtctaggtggagaggaaaaggcaaacaaaaaagcacattaaattatrattcaggatttcagagaagagaaattacagaatataaaactctcaaaggagaaaggagctaaggaacttcaggaacattaattttaatcaagttcagagaacacacaccgcaaagccacacaaagcatccc

SEQ ID NO: 691025 - DNA, 537 bp, Homo sapiens
caggcgtgcactaccatgcccagctaagttttgtattttttagtagagacaaggtttcaccatgttggccaggctggtctcaaactcctgacctcaagtgatctgcctgcctcagcctctcagtgtgctgggattacaggtgttagccatcatgcctggcctataayttttttcttgaccctttggtggcccacattagctacctagaaggatactgccttttgttatacaccaatcattaactgttagctccatccatgaaagttcaatgacagaagtttaggacagatttgtccctagaatatgaagactaaggctgtgatcatcaccagcaatcatgtccactgtaaataattcaataaaaagaagactcaggaaataaaacaatacagctccaatttagcttttactcaaaatacaagagaattgtagagatttttaaaaataccatggaggattttaaaggactcttgtaactgcctaagtgtttgtgtcttctttagcctaaaaattgggaaacaggaagaaggtactaag

SEQ ID NO: 691026 - DNA, 1546 bp, Homo sapiens
caattgcatttcccagatatggctgcaaaatactgtaacaaaggttgctatttaatttgaagttgttttggcaggtgagctctgctattgcaaattgtgatttggaatctgtgatttacagagtaaaaaccccttattgaaatataaatgctatttaactgttaagaaaaataaaaagctatgcagtcagtcatttaatcaatctgatggcaatatttcttgaaaaccttgtatacactgaaaccataacttgtgctttgaggaagtacagaagaaaaatgttgatgcatccsccaaggaatttttccatgtgggaaggtgtaatttatccaactaattaaggagatcttcagcattaaccaagttttatgagaagaaaaacagtgaatataaaatacctgaataggccaggcacagtgactcatgcctgtaatctcagcactttgggaggctgaggtgggcgatcccttgaggccaggagttcaagaccagcctggccaacatggcgaaacaccgtctctactaaaaatacaaaaattagctggacttggttgcgcatcctagctactcgggaggctgagacatgagaatcgctttaacccgaaagggagagattgcagtgagctgacatcatgccactgccctccagcctgggcaacagaacaagactctgtctcaaaataataataataccagaagatggtttatccttgaataaaaatataaactggtgggttaaagccaaggacattgtgtagtgacaagagttttactactaggtttctatatcatgtgccatacttacgggtttcgcaaatattatgaaagaatgaatataaatagatacatctttatcttacaattgaataaagctgtatgtattctgagcagttattttctgtaagcgcctaaaattttctttggtgcggtaaacatgtgactaccagatgcctggctgaatataccatttggcataacaaggcagaagagaggtgtgaagatatacagcatgatccccttaccttattgaagcaaaagtgaagatgtggcagcttcccactaagctccatatccctccagatagttgactgccacagtgttgaggagaacacaggcatcagtagataacagagcacagcatataggttgcttctgtgtgcatcattttcttatgacaaaagttagagtgctggctctagaaagcaatccatacttggcatgaatatctctgttatacagtttttgtgctggggaggcatgaagacaagggaaaagaagaaggaaagagaaaatggctgtgttttgtctcccctaagaggtttcactaataatcttgacttcttggagtgaatctaatcagtgtggtagatgtttctcatccttgttcaccattcttatttatttcccaaaagcacttctctaacttttgtccacttatatttttgcttccctgctttccaatacaattctttcttcttcattcttattcaattatttctcttgttgaaaacttgagtgatgaatcttctgagtctgttttctgaag

SEQ ID NO: 691027 - DNA, 1778 bp, Homo sapiens
aacctgaaagtttctgaggctcttcttagttcaaaaattgtaaaattttctgataaaaatgaaataagtttttataaaaacaggtgaggtcagcatgggcccatcagttaccaattattcatgccaacatatttctttttggttttccaaatatatgatgaatctagttgactgtcacaaatatattctagccctaccatgttccgaactctgttctggaatctgaagattaaagaacaacaagaagatagagccaccgtctctacctctaaggattccacagatcttaatccaaggtagagaatctgtattttatgggctgccatgacacttatggaatgccattcctttcctcaagtttaacacaaacagtcctttattgttgtgttttgaagtcaaccaggaagggaaaaacattaagatggagaacacaggaagactgaagtagaaagaggaggaagagcattggctttggcttaaaagtgtgagaacagccctgggctgaggctccactttaagtatgcagacttcaaatgtggctacctggttgatagaaaaaaaaaaaagtccctatacaaccaaccctcccttgactagagtagtgattctctcttaagtggctttccatattaatctaactaaaggcatttcattatatccttatcttgctcaaaagccttcgatggctctcactggcaccacactaaatttaccttttttcctcctcccaatctctttccttcttcaattcatttatgtttggatgtgtctcatatctcctcactaatattgccagctttcttagagtataaagcctgtgttacatgaggattgccctgtcccttgcatagaataaggaatcaataaatatttttagatagattgtgagcccgtaatttagcacttggtcttacagctttatatttccatctaattttcttgggcataactattttcatactagacaacaatttttttaaaataataatgttgtcctaaactttttatccacctaagggtaatatcagctttagattttgaagaggtgttttctaatcgatcaataataaggtgtgttttcttggcaataaagccaattttcttagtgaagttcacagaaaatattatatgacattcttttcaactttacacctttcctttctactggcaatttaacatatatttgtagaagcacatacacaccaacccagccaggaattgttagggctttatctgttgtgtagaaggcattacagccctggttttgctgctctgggcactagaatctttactgctattgacaaagttccacccagcctaagtatctgcccataacagcacctgaaagtatactttttttttttttttttttttttgctgagacagagttttgttcttgttgccgaggctggagtgcaatggcgcgatcttggctcactgcaacctctgcctcccgggttcaagcaattctcctgcctcagccttcctgagtaggcatgcaccacgatgcttggctaatttcatatttttagtagagacagggtttctccatgttgctcaggctggtctcgaactcctgacctctggtgatccgcctgcctcagcctcccaaagtgctaggattacaggcatgagccactgcacccaactgaaaatatactttattggaggacttcrtgacaacaccaaatatagtagttgtgaaagactcaacctatacatgtaatgagaagtgcacacagtttatcacatagatagcttatatatacagctagtta

SEQ ID NO: 691028 - DNA, 914 bp, Homo sapiens
gtcatatatgtatgtgtagatatatgtagctatgtataaagtccatatatgtatataaaatttggactttatatatacatataaatatatgtgcacattccattcacacccataatgttttagtggtttcaatatcagcctccagtttaaacataaagctatttatgctttctataactttattatgagtggygggttttatgagtggaggaaagaaagacaagaaaaagagaaaaaattgtttctactcatatgcataaagtttggggcatgatagagctctttggtttccatcatgaaatgtgttcacgttattatatatccctgggaccaaacaattcaattaatccaaaacttatgcgttgaatctgacatacccaatggtcctctttgagaaataaatgttgaaaatgtcaattccataatgtggtaaaacctgatttctctctatttgaggcatcacaaaccatttattgattttttaaaagaaacagaaataagaagaaacatgtaccaattgaataggaagtcagacaatccaattacagttatgaaactgaagcattgactctgacaggcctactgatggcaaacgactgctggaaaatgcaagagaatagctgcccacccagagatgcacatacctgaggacatgcctcatggggtaatgaagtagctgaaactagtagtcacgggaggtcaaaggccaacattttattacctgtttagtacagtcgtattgaactgtattatatatttgaacatttaccagtggtcagtggcctctgagggaatttgctttcaattatgctctactgtacaatgatctgaccatcagaaatctgcacataaaataaaaatattatttattgtgcttgataaaaactgaactcttttagctcaacaacacagtc

SEQ ID NO: 691029 - DNA, 914 bp, Homo sapiens
gtcatatatgtatgtgtagatatatgtagctatgtataaagtccatatatgtatataaaatttggactttatatatacatataaatatatgtgcacattccattcacacccataatgttttagtggtttcaatatcagcctccagtttaaacataaagctatttatgctttctataactttattatgagtggtgggttttatgagtggaggaaagaaagacaagaaaaagagaaaaaattgtttctactcatatgcataaagtttggggcatgatagagctctttggtttccatcatgaaatgtgttcacgttattatatatccctgggaccaaacaattcaattaatccaaaacttatgcgttgaatctgacatacccaatggtcctctttgagaamtaaatgttgaaaatgtcaattccataatgtggtaaaacctgatttctctctatttgaggcatcacaaaccatttattgattttttaaaagaaacagaaataagaagaaacatgtaccaattgaataggaagtcagacaatccaattacagttatgaaactgaagcattgactctgacaggcctactgatggcaaacgactgctggaaaatgcaagagaatagctgcccacccagagatgcacatacctgaggacatgcctcatggggtaatgaagtagctgaaactagtagtcacgggaggtcaaaggccaacattttattacctgtttagtacagtcgtattgaactgtattatatatttgaacatttaccagtggtcagtggcctctgagggaatttgctttcaattatgctctactgtacaatgatctgaccatcagaaatctgcacataaaataaaaatattatttattgtgcttgataaaaactgaactcttttagctcaacaacacagtc

SEQ ID NO: 691030 - DNA, 640 bp, Homo sapiens
gccagtaattggtggggcagccgaggccactctttcatttcttccctatcataagcagaatgctaaagtaaaactgtgaaacgaggtccccttcaaaccaaggaaagaaagggagtcctgggaatttaggactgggcctaataagatgtctctcaaaaggaaaaaaaaaaaaatctcttgcgtagaaaagctcccccaatgcactatgttgactgcttacatggtggaggaaaaagaaaaaaaaaataaaaaagaaaaaactgaagtgcagggaaggggaaggtgcccaggggaaagcctctttccctatggaaatggcttccttcaacaggggaaagaaaagtctcagttgttacattctccttgcttctaacaatagacagataccacattacattsttctgatttacattcctgatcactaagccaagcgcttattattttttcttttttctttctgtcttttttgttttcttttttttttttttttttttgagatggagtctcactctattgcccaggctggagtgcagttgtgctatcttggctcactgcaacctccacctcccaggttcaagcgattcttgtgcatcagcctcccaaatagctgggactgcaggtgcctgccaccattccctgc

SEQ ID NO: 691031 - DNA, 1402 bp, Homo sapiens
gtaacatattctcagggattaggacttggatgactttaagagccattattctccctgccccagccagttacacttgactgatattctctgagccccgtgtgagcccagcctatgccarttggaaacagagaggaacagggctggatgagcctctttctgcttccaggccccatctgcttatgggaggtcaacattccctctccatccctccaccaccacttccaccccggccctgcccttcacctcccctggtgaccttgcgccctctgtgcaaatactaggctattactcctctcttccccaatgcagcaggcttctgacaaaggaggtgggtctgagaacttatttagaagatggacagaggccatgcctagcatccggccacctggccgcttgtgatgaattgtagggatgggacagagatcagcacacacattgttagtgctttctgggtgccgggcatattccaggcgctttacttatagtaaccatttaatcctcacacccacccttcccggcagataccacactagtttcctcatttgtggggcaccagaaggctgaataactcgccaaggtcagctagtaagcagcagaaacaggattcagacttagggcggcaggctccagtgtccatgccttgaaccactattttattatattttttatttattttattataattttattttttgacatggagtctcattctgtgccccaggctggagtgcagtggcttgatctcggctcactacagcctctgcctctcaggttcaagcagttctcctggctcagcttcccaagtagcggggattacaggtgcccaccaccatgcccagctaatttttgtattttcagtagagacggggttttgccatgctggccaggctggtctcaaactcctgacctcaagtgatccgcctgccttggcctcccaaggtgccaggattacaggtgtgagccactgcgcctggcccttaaaccactgttttatacagacaacagcaaccctgctttgtgagctagcttacggttttaccaagtaccgtttttttgtttgtttgtttgtttgtttgttttttgcgggggtggagggctaccagctttatcaatataattcagataccataacactcatttaaagtgtacacttctggctgggcacggtggctcacgcctgtactcccagcactttgggaggccaaggtgggaagattgcttgagccctggaggttgagacaagcctgggcaacatagcaataccccatttgtttcttttttttttttttttttttttttgagacagtgtctcactctgtcacccaggctggagtgcagtggtacaatcccagctcaccacaacctccacctctgagattcaagcagttctcctgcctcagcc

SEQ ID NO: 691032 - DNA, 1402 bp, Homo sapiens
gtaacatattctcagggattaggacttggatgactttaagagccattattctccctgccccagccagttacacttgactgatattctctgagccccgtgtgagcccagcctatgccaattggaaacagagaggaacagggctggatgagcctctttctgcttccaggccccatctgcttatgggaggtcaacattccctctccatccctccaccaccacttccaccccggccctgcccttcacctcccctggtgaccttgcrccctctgtgcaaatactaggctattactcctctcttccccaatgcagcaggcttctgacaaaggaggtgggtctgagaacttatttagaagatggacagaggccatgcctagcatccggccacctggccgcttgtgatgaattgtagggatgggacagagatcagcacacacattgttagtgctttctgggtgccgggcatattccaggcgctttacttatagtaaccatttaatcctcacacccacccttcccggcagataccacactagtttcctcatttgtggggcaccagaaggctgaataactcgccaaggtcagctagtaagcagcagaaacaggattcagacttagggcggcaggctccagtgtccatgccttgaaccactattttattatattttttatttattttattataattttattttttgacatggagtctcattctgtgccccaggctggagtgcagtggcttgatctcggctcactacagcctctgcctctcaggttcaagcagttctcctggctcagcttcccaagtagcggggattacaggtgcccaccaccatgcccagctaatttttgtattttcagtagagacggggttttgccatgctggccaggctggtctcaaactcctgacctcaagtgatccgcctgccttggcctcccaaggtgccaggattacaggtgtgagccactgcgcctggcccttaaaccactgttttatacagacaacagcaaccctgctttgtgagctagcttacggttttaccaagtaccgtttttttgtttgtttgtttgtttgtttgttttttgcgggggtggagggctaccagctttatcaatataattcagataccataacactcatttaaagtgtacacttctggctgggcacggtggctcacgcctgtactcccagcactttgggaggccaaggtgggaagattgcttgagccctggaggttgagacaagcctgggcaacatagcaataccccatttgtttcttttttttttttttttttttttttgagacagtgtctcactctgtcacccaggctggagtgcagtggtacaatcccagctcaccacaacctccacctctgagattcaagcagttctcctgcctcagcc

SEQ ID NO: 691033 - DNA, 1973 bp, Homo sapiens
cacactgtatgtctaaacatacacttagttttaaaatggaaacacgacatacaaacatacaaaaaaagcagtttgcttttttcacttaataataccctataatcatttttccagctcagcacatatagatctaccttattttttaaaaatagataattcctgtttcattcttttattttttatttttttttattttgagacagagtttcactcttgttgcccaggctggagtgtagtggtgcaatcttggctcactgcaacctctgcctcataggttcaagtgattcttgtgcctcggcctcccaagtagctgggactacaggcaggtgccaccacaggcagctaatttttttttttttttttgagatggagtcttgctctgtcacccacgctggagtgcagtggcgcgatctcggcccactgcaacctctgcctcccgggttcaagcgattctcctgcctcagcctcccgagtagctgggattacaggctcccgccaccgcgcccagctaacggggtttcaccatattgcccaggctgatctcgaactccctacctcaggtgatccacctgcctcggcctcccaaagtgctggaattacaagcatgagccaccatgcctggcctaattttgtattttattagagatggggtttcaccatgttgtccaggctggtctcaaactcttgacctcaggtgatctgcccacttcatcattcttttaaatgattgtgcagtcttttgttttatgtatgtactgcaatttgcttgatcattgttcccttggtggtcattcactctgttttctggtttggactattttaaacaatgttgcattgcaagtttacacttaatttttggtcccctcaacttcatgaaaagtggccaaaacatgttacctactcatctgcccagtgctttggttcctgcctataaattggccacaggggagaaaggctaaaggcaacagctcaccgccgctgagacgaaagcccagagcatgctgggggccccacccgcagccatgcatctttgttgttttttttttgaaacggagtctccctctgtcacccaggctggagtgcagtggcgcgatctcggctctctgcaagctctgcctcccgggttcccgccattctcttgtctcagcctcccgagtagctgggactacaggcgcccactaccacgctcggctaattttttgtatttttagtagagacggggtttcaccgtgttagccaggatggtcttgatctcctgacctcgtgatccgcctgcctcggcctcccaaagtgctgggattacaggcgtragccactgcgcctggcgcatctttgtttaaaaaaatttttttttgagatggactctcgctctgtctcccaggctggagtgcagtggcacgatctgggcccattgcaacctccacctcctgggttcaagtgattctcctgcctcagcctcccgagtagctgggattacagtgcatgcgccaccacacctggccaatttttgtatttttagtagctatggggtttcgccatgttggccaggctggtcttgaactcctgacctcaggtgattcgcccacctcggcctcccgagatgctgggattgtaggcgtgagccatcgtgactggccccacactagccctttttcagttttccaacttgtcaatgtcagtaccctcatacaatgctagtaggagtgcaattggtcaaaccactttggaaaactggtgtgaaagttgtcagaatcaaaatggagtcatctgtgttacaaaacaaaaaccaaaatcaccttgacgagcagagccagggaagctgatgaagggaggattctcatgcacgaatgccagataacaaaaactatcacaaaagcctgcaaaacccacaaccttgcacaaaggccatcacaatcttacattaaaaatactcgttcgaagacatctgcccagcaactgcctatctaaacttg

SEQ ID NO: 691034 - DNA, 656 bp, Homo sapiens
ttacaggcctgagccactgcgcctggcagagacggggtttcaccatgttggccaggatgatcttgatctcttggcttggtgatccgcccacctcggcctcccaaagtcttgggattacaggcgtaagccactgtgcccggcctatttttattttttttgagacagagtctcgttttgttgcccaggctggagtgcagtggtgcaatctcagttcactgcaacctctgcctcctgggctcaggcgattctcctgcctcagcctcccgagtagctgggattacaggcacccgccaccatgcccggctaatttttgtatttttagtagagacggggcttcaccaygttggctaggctggtctcgaactcctgacctcaggtgatcctcccacctcagcctcccgaagtgctgggtttacaggcgtcagccactgcgcccggtcgagtttgactcttgattccatttcctgagcatcaccatgtgcagcaggaaacattctggaaaggtgttttccctgccgtagattccatgtagcccaagattaggggcgaatgcacttaggaggtaaatagatgcggcttcaggtctgagttccaccaccactgacccgctgtgtaacctttgcaggtcattgatcctctctgactctcagtttgcc

SEQ ID NO: 691035 - DNA, 614 bp, Homo sapiens
gcattctgtctccaagtctctctaattcccaaatggcctgatgacacagttacattagattatgttggataagttctatcactgctgaatctgcttccttaacttgtgttcacctacaattttaacttactattgcttgcattgtttttaagtcttcaaaagtcctcagtctacttgaacacagcttctcttgtgacacttttcctcttctggtctaagtttctttttggtgagctcttggggtcctaataagagaatttctgcagtccagagaaggaggagggarcatctggtaccaaagtaccaaatgtgttcatgagtgtgtgtgtgtgtgtgtgtatgtgtgtgtgtgtgtatgagagagagagagagagagacagagagagagagaagagagagacagaggaaaagagattggtcttccctttttactttttgtagctttcttctttctaccgcttcttgtgttttgggaaaggcgggtttcctcccttcaattccgtatgtctccttgctcaaaaatcatgctgacaggaggtcatggctcctgatacagtaaacctcaggatggtctttgcccatgcaagaggtttggctggcaattcacgttaatt

SEQ ID NO: 691036 - DNA, 676 bp, Homo sapiens
tactatcatggcagaaaatgatttttttttaaatgcaaagaggtgcttgtattttggcattttatcctttcccccttccatagaaggagaagtgtcgtgtgaggctcasggagatgggataagtagaagtccccgtttgctgggatgtggttctacagtacaacgtgaggtttctttctcggagtttgcaattctctgtggataatgacctggctccctggaccctctgtctcccctcaccggaagtggtgaatgactttatcccacccagccccatctccctgaatgcacccacctgctccttgagctccgccagctgacccgacagctgtttgaccagactcatggtcgattccaacttctcctgaaggctccgaatttcattttgctcactgtcgccttcattgctaacgagggacatggctcgcatccgaggaaaccaatccaaattcttctcctgaaagcaaataaatgtgtgcgaacaagggaataagtatggaaggggagaatgtctatagctgtttattattactaacatttaaaccaaagtctcttagcactcaaattggagagagaaaacctggcatagggaggggctgaagtagggcttagacactggtcttcacgggctgggggaagaccccaaatattgaagcaaactttatacgggcttcca

SEQ ID NO: 691037 - DNA, 649 bp, Homo sapiens
tgctacagttattttcctgatttcctgatattcctatgaatttctatttattgacagtttctcaccatcaccatcatcatcaccaccatcatcaaacacttgcatagcattgttctatatctattatataaaataattatcattcattcttcacaagcccctgtttattatccttcagatgaggaaactgaggcaaggaggcacaaacagatttkgtggcttgtctgaggcctcactggaattcaaacacaggcaaacttgttccagaactattctcttagtgaccataatatgtggcctctccgatacatataaatactaattcaagagctctttaaaatattactccgtgggatttctcaagtctagttaaagagcatggtttgcatgttatttttatgtacttaaactatgtagacgattcttaaggagtttttgctttaagttttattgttattgtgatcttgaagtgataatgtattgatatttcaattctactccttgcttcagtcctttaacttccccatttttgatcttgtctctaaaatttcctaaactagaagtatttttagagccagaagaggccaggggacaaataagaagggaaaatgactctattagaagtctctattggcttggtaaattccca

SEQ ID NO: 691038 - DNA, 646 bp, Homo sapiens
ttcactaagccccttggacttacatatccattaagagaaggcacaacttggtttaaggaacaaaaaaccagtaatttacaagtggcgtggtttatccatatttactcagagcaccaagcctccctctgagacccagaggagaactttcagttttaccctcgtgcttaaccacagtggtctctctttgtccaaagacattgcaccaccctggaagacacagtcaatgaaagttcttggagcaagtaaacgttttggggtgttgacctatgaaattccttcaaatacttcttttattttgactgactgacttccttccttccttccttccttccttctttcctccctcccaccctccctctcttccttccttccatctttattttctttcaaaaactttaaacaggagaggcggacaaatctgaaagaaaagggaggattatttttattacaaactgtgagtatatccaatatggctaaaattacataatactrttcttctgaaaggatggagttttaaaaacctggtattctctgagactacaagtaaacagacttcatagccacagagcttcttgttgttgaaagcaaatattgtacagaaggcaaacaaatatcttttttaaaaaaccaaagttaatgttgaaga

SEQ ID NO: 691039 - DNA, 2629 bp, Homo sapiens
  misc_feature 1027, 1028, 1029, 1030, 1031, 1032, 1033, 1034, 1035, 1036,1037, 1038, 1039, 1040, 1041, 1042, 1043, 1044, 1045, 1046,1047, 1048, 1049, 1050, 1051, 1052, 1053, 1054, 1055, 1056,1057, 1058, 1059, 1060, 1061, 1062, 1063, 1064, 1065: n = A,T,C or G
  misc_feature 1066, 1067, 1068, 1069, 1070, 1071, 1072, 1073, 1074, 1075,1076, 1077, 1078, 1079, 1080, 1081, 1082, 1083, 1084, 1085,1086, 1087, 1088, 1089, 1090, 1091, 1092, 1093, 1094, 1095,1096, 1097, 1098, 1099, 1100, 1101, 1102, 1103, 1104: n = A,T,C or G
  misc_feature 1105, 1106, 1107, 1108, 1109, 1110, 1111, 1112, 1113, 1114,1115, 1116, 1117, 1118, 1119, 1120, 1121, 1122, 1123, 1124,1125, 1126: n = A,T,C or G
caaagtttataacatagtgcctactgtgtgcaaggtaatatgccagtactacagatatgatggtgagcaaaacaaactgggcctagtccgcaaggggcttacactcagggagagggcagtacagcaaccagtcagagtcaagtgtggaccaggactgggataggactggggtccacacacagccactaggaagagaatttcacacaggaacacaggtacaaatgaaatgcttgtatcactgtagctccaaggagcctcagcagcaaatgcaaatgcaaygctcttcacacaggccctgggagatcttagacctaagcagctggacacacagcgtataagaaaagttagagaaagaaaagaggcatatagagactgaaggcaaccacaaagctggatgcccaggtttggccagcagaactacccacaggcctcctgcaagagacggcagaccgtccaggacttgaaagctagtgttttagaaagagtagaaatttcactctactctgtaatccttgccaatatcatctaaaagtaaaaggatgctaaactaaaatctccttaaaactgacatttaaattcaagtgcagttggggaccaaaggaggaccaagggtaacaggaacactgcacagaagagaacaagttagaaagcaaagatgccatgacgtgacagtaaccacagagacaggagcaggcacaccacagtgcgcacatgtcttggagaagggccgggaggaaaggccctgcagaggcttcctgcactgtggggacacagcctgcttgtctatgttttcaaatctgtctacaaatgggccatttattttctgtggtcaaaaaacttaaggggttgggtgtgtttgaaacaacatacgagagacaaatgcattcaagtatacaagagaaaaaagtccaccttttctgactcagccacatcagttctcccaaatttaatgtatctgtgcactctcaaccttcttatccacagacttcactccaagttgtgcctccttctcttgatgaactacttnnnnnnnnnnnnnnnnnnnnnnnnnnnnnnnnnnnnnnnnnnnnnnnnnnnnnnnnnnnnnnnnnnnnnnnnnnnnnnnnnnnnnnnnnnnnnnnnnnnnctgcgtagagccaatgggctttgagcaggccacctctgccctacatctgcttctgataggcaataagaactgatgcttgaaagatgatcttgaagtcctaaaccctttctagccattaaatagatgcttagttttgtgcattacattgcttaggtaggaatgtaagcaaaaacgtttaaagatttttcaacaaagaattgaatcaacaattttttttttaaattctaagttaacctgacagtttatgaactagcatctctcttttcttgagcgttccagttaatctgctttactgccttccactctgtaaatatccttttcacctgtgtgagggtttgagcctacaaaggccactggacacggtgtcacaagacccagacttgagtcctgggcctctgtgaacagtggaccattattttgcttctctgggtcacctatgcagagtagaggtaaaacagcctgtctctcagagttgtgtgaagttcaaataaggtaacagatgtgaaattagtttgtaaactgtataactttacacttaaacaaggtattactaggcataaggatatactgaattatgcctaacatcctcttttacacctctgtgcatttaccctgctgtttcctctccctgtaatgcccacaagaattaattgttagtcatctgtggtccctgaacactttatgcctgtttcttcgcaacgtttgtcacactgtgttaaagccatttgttcacatctgtgtctttggtgagattctgaaagtaaaccacagtttattcagtgcttagcatacaggtaacccttagtaaatgtcggattggataaatttgaataattactacctgtgtgcctatcttgaaggacaaagtccatgtatatacagttctttaggtatgtcatctggtaactgaccagtccaatgatgatgccaatgatgaaatagtcatgaaaatggagttttgtatttttaatttaagaaaatgatcagacttcttgagtacattttttgcattgtatttttaagcccatgaacaatgaaagaatgtagatgtagaatgtctattatttaaaaatattttttcctgctggagaaaacttaagctcccagtcatagttcttggccccagttctctggttctcctgattaatttagagcttcctgctcttttacagctggtttgccatccacccggtcagcatgaacaacagtaaccatcttgtaaacagtgacaatgtgggctatgcatcttacctgcttgagcaagagaagaacaaaggatatctacctggacaggtgagaatttatatcattgaaagcttcatcttgattcactgagtgtcatcattcatgctgcattcagaagaggtgattcaaatctccagaataaagtgtcatcatcaatctcacatattggtatgctcgaatagacagcatttaccatcctccctaatgtggaaagaaaaataaaaaatgagtactaaccatttgctttttgtgttacat

SEQ ID NO: 691040 - DNA, 607 bp, Homo sapiens
ccataccacagtcttgcctctttgttaggagagaactcatagaaagtcaaacaagaaaggaccctagagcaatgttgaggatggttttcattgaatgaagtttaatttaaagaaacatttttaacattctgtatataagttggagaccagtaattccccaacccagtgtgcattaaaatcatctgtgcaggtttttttgtttttttgttttttgtttttgtatttttagtagagacagggtttcaccatgttggacggttggacaggctggtcttaaactcctatcctcaagtgatcacccgcctagacctggcaaaatgctaggaatacaggcatgagccactgcacctgtccccttggtgcagttttwaaaaaacacaaatataaatatgttttttaacctacaaatgttactccataggtttgtggtagttcttgggacttgggaattagtgattctaagtgccgagtctcccgggcacaggcatcagagctgggccttggaggccgctccttgtgcctgctgtgcgggctgctagcctggctctcctctgctttctgctgtccatgttttggcatcagtgacttgcttggtttccccctttgc

SEQ ID NO: 691041 - DNA, 607 bp, Homo sapiens
ccataccacagtcttgcctctttgttaggagagaactcatagaaagtcaaacaagaaaggaccctagagcaatgttgaggatggttttcattgaatgaagtttaatttaaagaaacatttttaacattctgtatataagttggagaccagtaattccccaacccagtgtgcattaaaatcatctgtgcaggtttttttgtttttttgttttttgtttttgtatttttagtagagacagggtttcaccatgttggacggttggacaggctggtcttaaactcctatcctcaagtgatcacccgcctagacctggcaaaatgctaggaatacaggcatgagccactgcacctgtccccttggtgcagttttaaaaaaacacaaatataaatatgttttttaacctacaaatgttactcmataggtttgtggtagttcttgggacttgggaattagtgattctaagtgccgagtctcccgggcacaggcatcagagctgggccttggaggccgctccttgtgcctgctgtgcgggctgctagcctggctctcctctgctttctgctgtccatgttttggcatcagtgacttgcttggtttccccctttgc

SEQ ID NO: 691042 - DNA, 1117 bp, Homo sapiens
tgcaggtagggataaatcaaggatcttgggatagcgagattatcctgtattattcaggtgtatcccagtatcccattataacaacaagggtccctgtaagtgaaaaacagaagtaggatggttagagaggaagagaaatttgaagatgctacacttgattttgaagatggatgaaggggccatgaaccaaagaacataagcaggctctagacaccaaagaagatgaaraaacagattctcccttagagtctccagaaggtatgcagcttgccaacaccttcatttcagcccagtaagacctatttcaatcttctgatctccacaactgtaagttacataatatgtgttgtgttaagctattaaggttgtggtaatgtgttacatcaacaatgggaaactagtatcccactcagtagtaagtttgccccttgcccagggacccttcccagagcattaaatcctacatctcaagaaagtgtcttcaagtccatgaatccttctttttccaatcttatgctttggcctcttgatcaagccaaagcccaatccaatccaatcccagctcctgtgtgtacctattaggtaattcttgccattcctttgaagtatatataatcctttccctcttatgaagcccagtgtgtcctgagctgggttatgttggatataatcgtacccactggggtggtgtgggagtaagaagaggagatgggagcatgtcttttggaagttacctgttgccttgtggagttaaagcttctgcagtgtcttccacataagtgaagtgctggttcttactgtggtgcagtgggccacctctgcaaggtctggatagtctccagagccaaaatccttgtggccatccactcagatatccccatcccatattctagggttccatcttttcctaaccagagtcctggccttagtataactgacctactttggctgtgtatttaaatgtctctggagttctgcatttctaactattaagttctgaatctgctccttggccatgtcttcttttttattgtaagagataaattaacaaagaggctccgtggtttcctcacttagcttgtagctggttgccagtcatcgtcactttcacatgatg

SEQ ID NO: 691043 - DNA, 1856 bp, Homo sapiens
gatcctagaaggtcatataccagttaaactctaccatttgcctcttaatgcacatgcttgagcccactcacccaactcctgagatcttgttgggaagctgctgatcaccagattcagtgtttctatctattgggagtctgcctttccctggcaccagctgtgatcaattattatgttagagagacagctaacaactgcctgatcatcacgtgatagtggtgtaacatttttggtgtgtgtgggagtagtgggagctttctcctgccctgctcatgtctgactagttacctactgtaacagtatgaacaatgtggcagatccaactatgctcactgtggcaggttctcttaaaggaagtctgagtggcactcctccatggccaccccactggttaataacctcagctctggagtcagcatttctggatttgaaacttggttatgccactcattggctatgtgattattggcaaggtacttaatttctttaaactatagttatcatatcttaaagcatgaggtttatagtaattatgtcataggcaagcagtgagacttaaagagttaacacatgcaaaatgcatgcaacatgcgtggcatacagaaggggcataataaatggtaactaaacaaataaaataggattgatggctctagagcctgttcttatcttttctttaagtctacctgttactcttggatgtgaactaaagaagtcattgtaatgtagtaggagaaggaattcagtttcagtgataggactgaagaattccttgaaaaggagattttattgtatttgagttaaactctaaagtaggagttaacttttgacaaatgggaatggctaagaagataaaggagacaaaaaaaggaggtggatattggggagaaatttcaggtggaagaaaagccttattggtaggggagcagaaaaacatttactgaaaatcccagagaagatgcagtacgtgagggaagtggacaaaggcgagatgacacctttaccaaggttactccggactttatatttgaattcctttcagtcatttgggaaatgtaagtaaaaatttgaattccttataaactgcttcttgaaygtgactctgttctgagactgaactgaaagggaccaggttttgtcatggcaaaacaggctgtctgtggatattgaatatagtccttatctgggaatagtgcacttatatttgtggcataaaccaaagaataatgggagaagaattttgggccagatgggagatgacttctgactacttctatagaccacactcaagggtttaagaatgtggcaaatgaaagtctgtcttcaagataagatatctagctgcacacaaaatgttaactctcattattttgaatcttaaagatttccaaattagattacatatttccttacttgattaaatataggactgtaagaataatttagtctcccttaatggcccagtgtcatcattgtggacattagttattatgcaaggttgtacagggtaaagactttggaacttaaagtgcatcaggctttttgccccagtgctaatagcactacacacattcaagagatttttttaaaagtattaattcttctttagtcccttttctgctgccaattctttataataggctcatttctagtctcccagttgtcagggtaggggcttaatagtagctctacctctttttctgaagtaaggcaaagggtctttgtgagcatagtctgtgtgtatgtgtgtgtttttttttaatactttgagttttagggtacatgtgcacaacgtgcaggtttgttacatatgtatacatgtgccatgttggtgtgctgcatccattaactcgtca

SEQ ID NO: 691044 - DNA, 1856 bp, Homo sapiens
gatcctagaaggtcatataccagttaaactctaccatttgcctcttaatgcacatgcttgagcccactcacccaactcctgagatcttgttgggaagctgctgatcaccagattcagtgtttctatctattgggagtctgcctttccctggcaccagctgtgatcaattattatgttagagagacagctaacaactgcctgatcatcacgtgatagtggtgtaacatttttggtgtgtgtgggagtagtgggagctttctcctgccctgctcatgtctgactagttacctactgtaacagtatgaacaatgtggcagatccaactatgctcactgtggcaggttctcttaaaggaagtctgagtggcactcctccatggccaccccactggttaataacctcagctctggagtcagcatttctggatttgaaacttggttatgccactcattggctatgtgattattggcaaggtacttaatttctttaaactatagttatcatatcttaaagcatgaggtttatagtaattatgtcataggcaagcagtgagacttaaagagttaacacatgcaaaatgcatgcaacatgcgtggcatacagaaggggcataataaatggtaactaaacaaataaaataggattgatggctctagagcctgttcttatcttttctttaagtctacctgttactcttggatgtgaactaaagaagtcattgtaatgtagtaggagaaggaattcagtttcagtgataggactgaagaattccttgaaaaggagattttattgtatttgagttaaactctaaagtaggagttaacttttgacaaatgggaatggctaagaagataaaggagacaaaaaaaggaggtggatattggggagaaatttcaggtggaagaaaagccttattggtaggggagcagaaaaacatttactgaaaatcccagagaagatgcagtacgtgagggaagtggacaaaggcgagatgacacctttaccaaggttactccggactttatatttgaattcctttcagtcatttgggaaatgtaagtaaaaatttgaattccttataaactgcttcttgaatgtgactctgttctgagactgaactgaaagggaccaggttttgtcatggcaaaacaggctgkctgtggatattgaatatagtccttatctgggaatagtgcacttatatttgtggcataaaccaaagaataatgggagaagaattttgggccagatgggagatgacttctgactacttctatagaccacactcaagggtttaagaatgtggcaaatgaaagtctgtcttcaagataagatatctagctgcacacaaaatgttaactctcattattttgaatcttaaagatttccaaattagattacatatttccttacttgattaaatataggactgtaagaataatttagtctcccttaatggcccagtgtcatcattgtggacattagttattatgcaaggttgtacagggtaaagactttggaacttaaagtgcatcaggctttttgccccagtgctaatagcactacacacattcaagagatttttttaaaagtattaattcttctttagtcccttttctgctgccaattctttataataggctcatttctagtctcccagttgtcagggtaggggcttaatagtagctctacctctttttctgaagtaaggcaaagggtctttgtgagcatagtctgtgtgtatgtgtgtgtttttttttaatactttgagttttagggtacatgtgcacaacgtgcaggtttgttacatatgtatacatgtgccatgttggtgtgctgcatccattaactcgtca

SEQ ID NO: 691045 - DNA, 1856 bp, Homo sapiens
gatcctagaaggtcatataccagttaaactctaccatttgcctcttaatgcacatgcttgagcccactcacccaactcctgagatcttgttgggaagctgctgatcaccagattcagtgtttctatctattgggagtctgcctttccctggcaccagctgtgatcaattattatgttagagagacagctaacaactgcctgatcatcacgtgatagtggtgtaacatttttggtgtgtgtgggagtagtgggagctttctcctgccctgctcatgtctgactagttacctactgtaacagtatgaacaatgtggcagatccaactatgctcactgtggcaggttctcttaaaggaagtctgagtggcactcctccatggccaccccactggttaataacctcagctctggagtcagcatttctggatttgaaacttggttatgccactcattggctatgtgattattggcaaggtacttaatttctttaaactatagttatcatatcttaaagcatgaggtttatagtaattatgtcataggcaagcagtgagacttaaagagttaacacatgcaaaatgcatgcaacatgcgtggcatacagaaggggcataataaatggtaactaaacaaataaaataggattgatggctctagagcctgttcttatcttttctttaagtctacctgttactcttggatgtgaactaaagaagtcattgtaatgtagtaggagaaggaattcagtttcagtgataggactgaagaattccttgaaaaggagattttattgtatttgagttaaactctaaagtaggagttaacttttgacaaatgggaatggctaagaagataaaggagacaaaaaaaggaggtggatattggggagaaatttcaggtggaagaaaagccttattggtaggggagcagaaaaacatttactgaaaatcccagagaagatgcagtacgtgagggaagtggacaaaggcgagatgacacctttaccaaggttactccggactttatatttgaattcctttcagtcatttgggaaatgtaagtaaaaatttgaattccttataaactgcttcttgaatgtgactctgttctgagactgaactgaaagggaccaggttttgtcatggcaaaacaggctgtctgtggatattgaatatagtccttatctgggaatagtgcacttatatttgtggcataaaccaaagaataatgggagaagaattttgggccagatgggagatgacttctgactacttctatagaccacactcaagggtttaagaatgtggcaaatgaaagtctgtcttcaagataagatatytagctgcacacaaaatgttaactctcattattttgaatcttaaagatttccaaattagattacatatttccttacttgattaaatataggactgtaagaataatttagtctcccttaatggcccagtgtcatcattgtggacattagttattatgcaaggttgtacagggtaaagactttggaacttaaagtgcatcaggctttttgccccagtgctaatagcactacacacattcaagagatttttttaaaagtattaattcttctttagtcccttttctgctgccaattctttataataggctcatttctagtctcccagttgtcagggtaggggcttaatagtagctctacctctttttctgaagtaaggcaaagggtctttgtgagcatagtctgtgtgtatgtgtgtgtttttttttaatactttgagttttagggtacatgtgcacaacgtgcaggtttgttacatatgtatacatgtgccatgttggtgtgctgcatccattaactcgtca

SEQ ID NO: 691046 - DNA, 659 bp, Homo sapiens
ttgtttttgttttgagttttaagagttctctgtatattctggatgatagatgatctgtaaatattttctctcattccatattcctctggctccttttaagatttttctttatgtctggtttcaaggaatttgattttgttgtgccctggtggagtataagctttcttttgagttttttgctcttgttgttaagcttttggagtttgtgggtttatacttttcatcagatttggaacatctttggctattatttctccaaatagtcacacrtcgctcctcggattccagttacatatatattattaggttcttgaagttgtcccataccttactgatgctctgctctttttctttggtcttatattttgggtttcattttggatagtttttatttctgtgtctttacattcactcgtctttccttctgctgtgtcttgactgctgctagttccatccaatgtatttcattttatatattctataatttgtggtttgatagaaatgcagtgatgtagcaggtatcaataaatactgccttaatttgttgcgaaaatataacagatttcttgttctgtatgttagctaaaaaggtatgcaaaccaccctgtatgtcatattaacatttatgtccctttgttttcatgtcaacttttagtttc

SEQ ID NO: 691047 - DNA, 645 bp, Homo sapiens
tgctttgtgtggcatctcacaatttttaatttgcatacttttaatcatttattagtattatctaattttcattatgatttattagatatttgagtttagaaaaatgcttttttttttttttttttaaagacagagtcttgctctgtcacccaggctggagtgcagtggtgtaatcttggctcactgcaacctccacttcccaggttccaaccatcctcccacctcagcctcccaagtagctaggactacaggtgtgaaccaccacacccagctaattttttatagagacgaggtttcaccatgctgcctggggtggtcttgaactcctgaactcaaaggggtccgcctgctcagtctcccaaagtgccaggattaaatgtgtgagccaccgcacccagccagcagcattagcatcattacttcttgactcctgatttatttccttaccccaggctcccttcactctactccagcctgctctgctacacacaagagtagctactgaaagccagagctccttgggctgattcctcaggccctccaagagcttggccccacatcccttcygagggtcccacagcccaggtctacatgtttgcttgccacacctgacttccatgtctatctccttttttattattatta

SEQ ID NO: 691048 - DNA, 639 bp, Homo sapiens
ctcaactaaaaaaatacaaaaaattagccgggggtggtggcgggcacctgtagtcccagctactcaggaggctgaggcaggagaatggcacgaagctgggaggcagagcttgmagtgagccaagatcacaccaccgcactacagcttgggcaacagagcgagactccatctcaaaaaaaaataaaaaataaaaaaagtatctctacatacacacacacatacatatatacacccatgtatatatatgtatgtgtgtgcatccactgaaggggattacatttaattcaagattataaattatatttctttttttttttactttttgtgcataattttttaaaaacttttattttagattcaggattacatgagcagatttgttgtgaattctatttcaattaacatttagattaggtatcatttgaaaactgttagtattttaccaacattctgcatttctttcttaagatacaaagtctgtaggagtctaattcctgatagaaaaaaaaatgtggaaggatactaccacctccatcaattcatgttcttctacttatactgttcaaatatggaatgtcctattctcctctgtcctttcaaacaattcaactaaacaaatgtttaagtgccttaaaaagg

SEQ ID NO: 691049 - DNA, 1491 bp, Homo sapiens
tcagttcatggaaatagagtgtttacaatggaggaaatttttgtgctacagaagtcacatcttcagcaacccctcacctgaacctctcactctcagtatcagctgagtttactatatacaaaacacctgcaatcaacaagatggctaacccatgttctggagagttacacattgcctgtgaggcaatgggaagaaactctggctcttttcctgttaccccaaatcacgcagagacagaggctgaagtgtttccaccaccaggaacccacctgcgtggcctaggaaggcattgctgcgagagctgtgatggacactaacactgctttgcaagaggtgctggagagcgccttcatccatgagggcctggcgtgtgggattcgtggtggcgccaaagtctgaaacaagggccaagcccatctttgtgctcttgcaagcaaatgtgatgagcctatacgtatgtcaaattggtgaaggttcttgtgatgaacaccaaatcaacctgttaaggctgatgacaacatgatactagggaaatggttgggtatctgtgaatctcacaggggaaaacatgtaaagtggttggttgcagttgtgtgatagttaaggtctatgataaagaatctcaggccacgcatgtcatcaaagactacttcaaatccaaaaaaaatgaacaaatagaacacttaaaaaaaaaaagcgaacgagagaaataagctatggttaaagttgcccctccaaaggttctattttacagcataagaattgagttaaaaaataaaatcattttgtgccatttttaagtgcatccaataagctataaagaccaccatgatttgaggccccctcttgtccatttaaatatatgtataaatagctgttttttcagttgtcaattttatattactcatttttctctcagaacttctatttccattttaattcccaccgaattttatcctcatgcagtaggcttctgtctgacagatttgttgtttgttaattattgtaacacagttcattgctttgaaataaggaactgtggaacattttctatttttgctgccccagaggtcttcacatctctgaaaatgcaccatagaaagatcgaggcatctaaacagcatgccttttaacgtaaaaaatatgcaaaaatgaaaggagacatatcaaaggggaattccacaacaggacattttcagtcacctcagttttaggaatgatatctatggagagtgagaatctggacaacataaaactaccaygctgatgtggtttgactgtattcccacgtgttgtgggaggaacccagtgggagataattgaattatgggagtggtttcccccatgctgttctcatggtagtgaaagtctcacgagatctgacggttttatatggggaaacctcttgcgcttggctctcactcctcttttccgccgctatgtgagacgtgactttcaccttccgccatgattgtgaggcctccccagcca

SEQ ID NO: 691050 - DNA, 1039 bp, Homo sapiens
aaaatcactatctgggtcctggctacctccccagtttctgcaacctgcttctaactcctggaatagaggcaaacagtgattgacacaggttatctgagaatgtgcaaccgtttgggtgagtttatagaaaaagaaaatatttcctgtaatcaaagaggatacaaaatataggtgaaaatgagactagttaagagtaaagtaaacctttcgtagatatcaaggaacttgttttgttttattagtttgttctaagtatatcttactccattttggggtttaaatacaaattatttaaatttttttttcagagatagggtctcacgctgtcacccaggctagggtgcaatggcacaatcatgtatcactgtagtcttgacctcctgggctcaagtgatccttctgcctcagcctcctgagaagtcaaaactacagatgcaagctaccatacccggctaattttttattttttaggtttttgtagagacagggtcttgctatgttgcccaggctggtcttgaactcttggcctcaagcaatacttctgcctcagcctcccaaagtgttgggattacaggtgcaagccaccacacctgatcagtatatcatatttattatagctctgtacaggactgttagactatacagttcctgtagttagagtgaaagttattcctcttctttttttttttttttttgagacagagtctcgctctgtcgcccaggctggagtgcagtggctcaatcttggctcactgcaagctccgcctcccgggttcamgccattctcctgcctcagcctcccgagtagctgggaccacaggcgcccgccaccatgcccgggtaattttttgtatttttttagtagagacgacgtttcaccgtgttagccaggatggtctcgatctcctgacctcgtgatctgcccgcctcagcctcccaaagtgctgggattataggcgtgagccatcgcgcccggcctattccccttctactttaggtttctctctttgcacctagtaattagtgcttttaaaatatt

SEQ ID NO: 691051 - DNA, 631 bp, Homo sapiens
cctgacttaatccaagttttcatgtatttattctatttgtggttatggtttaatggagagcacaacacaaatatctaattctcctgatgttttttgtcaaaattctggctctttctttatgagaggagaaactaatttactacacttataacattgtaaacattaaaatgtcttattttcgttgtatttccaggtcaattaattatttgtgtatctgtttggtgtcagccttttactacctatccccactaccacttcccagctatcaggttcataatggcagaagttgtgtctctccgttcttaacctttgtgyctccagcaccaggtgcagtctaacaatgttcttggtgcatagtgggcacacgattttctcagtgaggattgaaccaatgaacacctgaaaacaaatagcatgccacccattttataccaattaaggtgatatgattaaatattgtgtccaaaattccagtaacacaaggaataaagtggaatacaaatatacttcaagttgtgaaaggtcaagggcaacaccacacgctaactctaccagggtaacatggtttcactaacaggcaggcaacaccaacaggtaggatgttgataactcttggaaccccttcacttac

SEQ ID NO: 691052 - DNA, 454 bp, Homo sapiens
tgtccctttcatggaagaccacttttctcctttttttagtaaaagatcattggggccctcccttgttgaaattaaattaaagccgtacagttatgtgattgttaccttccctaactttcctggcaggtcatttcaacaggtggggctcgcttccagggggggttataggcttctcaacacatggccgtaaaatttctgcttgtgcctgggtgaagcccccaggccgtgatatttgtccattttatattcccatgtgcatattttcttttctcagttgtgccattatctaatagaagtctgtttgtgtttctcactgaaaacacactattaatattaataacagtagcaactgctttacttactgtttgtcatctctaatttccataacaatttcagtagcacagttcttaatatctccacttcacagwtaagaaactaaggttttgagacaaga

SEQ ID NO: 691053 - DNA, 1520 bp, Homo sapiens
cagtagccagtagccacatgtagctattgagcccttgaaatgtggccggtgcaatggaggaactacaattttaattttatttaattttcattttaaaactgaagcaatgcaaaatattttttccattaaacacaactttattgtttggtaggattacgtttcactctaaccattgcattggataagatattactgttgtattgtaatgtacatgtatttttctccttttagaaaaattacatgtcaccctcattatatttctattagatagtactgctttagaccaaagagatagtcatacagtctgaaaagtaaagtattcattataatgctgggatagaaataggctcacctagtactcactgttatctggaaatattaaacaaaatgctcagaagatcctagatggcagagaaaagaacacgtattaaaagcaaatgaatgtaggctgaatttataaataaatgggtggcacatacttaagcagagaatgtagaggagcacctcataatctgacagagacttgtccttaccctgggttagagtctgtggctgttacagatgtggaaatatgatgttcacttttattacatcagtcagtgtgcattaggctacaaataacaaaaagtctaacagccagtagcttcaactttaaaagacatccatggtttactgtttaaaaacccagaggtaaaaaaatctatgggtggctcagcaggtgaaatgtgtcttcaaaaattcagtaactactatccttttctccaccttccgaaggattcagtgttttatcatagacttgtcacttgaaggtcccaaggcaagaagcaataggggtgggaacagccaagttagagaatttttcctttaggacattgacattccagttctatccctagcttccaaggaggcagagatagcaattatctggcaaaggagagccagaaagccataatatgtttacacaaatcctaagtgttccattgaaactggacatattgctgccaggaattatactgtggtcctattagcaaggactaaaggaaggtaatgcataatgtctgcagcattcactaattgtttcatgatatttaaatctcctatattctgattcttagcaggtagttggctaaaagacacttttaaatgagaaaacataaattttttataatcatatataaaggaggagagctacgaaaactctagccaaatcaaagctgtagtaatccaatggcaacttgcctgtgattctcttattctcattcaggaaaagtggtgttatctcagtccattatcttcactgagaagaacaagtatgggattcacaatgactgaactgmaaaacttgtttttactgagaaaaaaatgaattgtttctagtattcttataaagggatgagaaacctgtaaattgctcagcattattgaaccaagaacaagttatttttcaaatttttccaagtaacaatggttgtaaatggaatgctgtcctcagtgattttaagacacatttcttaaaaaaa

SEQ ID NO: 691054 - DNA, 1520 bp, Homo sapiens
cagtagccagtagccacatgtagctattgagcccttgaaatgtggccggtgcaatggaggaactacaattttaattttatttaattttcattttaaaactgaagcaatgcaaaatattttttccattaaacacaactttattgtttggtaggattacgtttcactctaaccattgcattggataagatattactgttgtattgtaatgtacatgtatttttctccttttagaaaaattacatgtcaccctcattatatttctattagatagtactgctttagaccaaagagatagtcatacagtctgaaaagtaaagtattcattataatgctgggatagaaataggctcacctagtactcactgttatctggaaatattaaacaaaatgctcagaagatcctagatggcagagaaaagaacacgtattaaaagcaaatgaatgtaggctgaatttataaataaatgggtggcacatacttaagcagagaatgtagaggagcacctcataatctgacagagacttgtccttaccctgggttagagtctgtggctgttacagatgtggaaatatgatgttcacttttattacatcagtcagtgtgcattaggctacaaataacaaaaagtctaacagccagtagcttcaactttaaaagacatccatggtttactgtttaaaaacccagaggtaaaaaaatctatgggtggctcagcaggtgaaatgtgtcttcaaaaattcagtaactactatccttttctccaccttccgaaggattcagtgttttatcatagacttgtcacttgaaggtcccaaggcaagaagcaataggggtgggaacagccaagttagagaatttttcctttaggacattgacattccagttctatccctagcttccaaggaggcagagatagcaattatctggcaaaggagagccagaaagccataatatgtttacacaaatcctaagtgttccattgaaactggacatattgctgccaggaattatactgtggtcctattagcaaggactaaaggaaggtaatgcataatgtctgcagcattcactaattgtttcatgatatttaaatctcctatattctgattcttagcaggtagttggctaaaagacacttttaaatgagaaaacataaattttttataatcatatataaaggaggagagctacgaaaactctagccaaatcaaagctgtagtaatccaatggcaacttgcctgtgattctcttattctcattcaggaaaagtggtgttatctcagtccattatcttcactgagaagaacaagtatgggattcacaatgactgaactgaaaaacttgtttttactgagaaaaaaatgaattgtttctagtattcttataaagggatgagaaacctgtaaattgctcagcattattgaaccaagaacaagttatttttcaaatttttccaagtaacaakggttgtaaatggaatgctgtcctcagtgattttaagacacatttcttaaaaaaa

SEQ ID NO: 691055 - DNA, 1520 bp, Homo sapiens
cagtagccagtagccacatgtagctattgagcccttgaaatgtggccggtgcaatggaggaactacaattttaattttatttaattttcattttaaaactgaagcaatgcaaaatattttttccattaaacacaactttattgtttggtaggattacgtttcactctaaccattgcattggataagatattactgttgtattgtaatgtacatgtatttttctccttttagaaaaattacatgtcaccctcattatatttctattagatagtactgctttagaccaaagagatagtcatacagtctgaaaagtaaagtattcattataatgctgggatagaaataggctcacctagtactcactgttatctggaaatattaaacaaaatgctcagaagatcctagatggcagagaaaagaacacgtattaaaagcaaatgaatgtaggctgaatttataaataaatgggtggcacatacttaagcagagaatgtagaggagcacctcataatctgacagagacttgtccttaccctgggttagagtctgtggctgttacagatgtggaaatatgatgttcacttttattacatcagtcagtgtgcattaggctacaaataacaaaaagtctaacagccagtagcttcaactttaaaagacatccatggtttactgtttaaaaacccagaggtaaaaaaatctatgggtggctcagcaggtgaaatgtgtcttcaaaaattcagtaactactatccttttctccaccttccgaaggattcagtgttttatcatagacttgtcacttgaaggtcccaaggcaagaagcaataggggtgggaacagccaagttagagaatttttcctttaggacattgacattccagttctatccctagcttccaaggaggcagagatagcaattatctggcaaaggagagccagaaagccataatatgtttacacaaatcctaagtgttccattgaaactggacatattgctgccaggaattatactgtggtcctattagcaaggactaaaggaaggtaatgcataatgtctgcagcattcactaattgtttcatgatatttaaatctcctatattctgattcttagcaggtagttggctaaaagacacttttaaatgagaaaacataaattttttataatcatatataaaggaggagagctacgaaaactctagccaaatcaaagctgtagtaatccaatggcaacttgcctgtgattctcttattctcattcaggaaaagtggtgttatctcagtccattatcttcactgagaagaacaagtatgggattcacaatgactgaactgaaaaacttgtttttactgagaaaaaaatgaattgtttctagtattcttataaagggatgagaaacctgtaaattgctcagcattattgaaccaagaacaagttatttttcaaatttttccaagtaacaatggttgtaaatggaatgctgtmctcagtgattttaagacacatttcttaaaaaaa

SEQ ID NO: 691056 - DNA, 530 bp, Homo sapiens
tttttttttttttggacagggtctcactctgttgcccaggctggagtacagtggcatgatcactgctcactgcagcttcaacctcccaggctcaagtgatcctcttgcctcagctccccaagtagccaagacttatggggtgtgtgccaccacacctggctagtttttaaattttttacagagatggggtctccctatgttgcccaggcttgtcttgaactcctgggttcaagtgatcttcccatcttggtctcccaaagtgctcccacagtggtgtgagccactgtgcctggcttagtcaaamtttaatatgctcaggaatcaccgagagctgttaaaatgcaggctgtgattcagaagatccagtgtgggacctgagattatgctggtctggcgagacacaggctatactgatgctgtgcagaccacactttgagtatcaaggatctggtccatccctcagcctccgtgcagtccatccctgaagacaggcttatttttaaatgtggaaattcccagctcttgaaggg

SEQ ID NO: 691057 - DNA, 687 bp, Homo sapiens
ccccmaaaactatgaaaacaaagatttttccgttatcttctgcaaacacatttggtgggaaagacttaagtgaactgaagtgagcatgcatacctcctcagagtctctatttgaccctctggaatattcacaggtttcactgcagattgttggagtgtttgattatagtagctagcctacaacctgctggggcctttatgcaatacatggttttcagactgtgctacatttttaaaattgaaacaattctgaattctaaaacacatctgacattcagcaaagggattatggatttgaggtatttggccatgcacagtttgcactgttttctactaacatgatttactgtaggccctaggtttgtagttttgagcctgcttattgtcttatctctgacatgacctcttcatttatgctaaagtttatagttattgaaaaggctaaatgagagtgtttacacttctgatttctcctctgtacataaaatctctaaatagaaagttttttgattaaatgatatttttgattgctgtctttggccttccttggtaccttaagtttgaaaaagcagtaaaaacaaatcaactgtttagaaaaggcaaaataataataataataataataataagtgattggggtatgtctggagaactcatgggcactggagatgtgtatctgccatagagt

SEQ ID NO: 691058 - DNA, 603 bp, Homo sapiens
tttcatttcctttggatatatamccagtagtgagattgctggatcatatggtagttctatttttgatttttctgaggaacctccatactgttttccataatgactttatcaatttacagtcccaccaacagtgtaacagggttctcttttctttatacccacaccagcacttgctctctctctctttttttgcttatagccattttaacaggtgtgaggttataactcatcgtggctttgattgtgtagccctgatgattagtgatgttgagcacctttttatatacctgtgggccatttgtatgccttccttggaaaaatgtctatgcaacggttctttttgatagagatgttaaataaagcagttctgggcagagggagatcaatgcaagtgtctataacaggctgagagttgattcactggtgaacaggacaaccaaggtccctgccctcagaggtctgagcaattccatcatcagtgactagattgaacagataatcccctcttacacacgtatatgcacacttcagtctggagtgtgatgagagactatggactataatgcgtgtgtgtgtgggggtgcatcctctccttggccgggg

SEQ ID NO: 691059 - DNA, 652 bp, Homo sapiens
tacactaagataagccttcacacaagtaacaccatgcattggttttcatttatccatatgttttggaaaacgttccatgttaataccaatgaaccttgctctttttaactgctccttagtagtcccttaaatagtggtactttttttttaaaatcaaataatttctttctttatgagcatttacggggcattatgccccacttttcattattacaaacaatgctgcaatgtacttcacctttcataaagaggcatggagacagggagtaaatacatttttaactttacaaaaaacagaaggagaaataaaattatgatgggcaaatggagaagcacaatagcaaaacaatggcgtgttttcaactggtgccaggtacaggggattcttcttgggtaccacctgaaaacttgaattaaacatccatgaattaaaatgacaagctgaagaaagtgttctaagcccaycagagatgaagagtttacgcaaagatgtaagaaacaagatgactgtgtaaagaaacatggatatgttgtggtgggagaagaatgtaaatgagactgtgatcctgtatctctggaatccagcagggagctccatgtagctttaaatacaactaggaaaacctgggaaggagagccttgtaaagccgtt

SEQ ID NO: 691060 - DNA, 625 bp, Homo sapiens
gctgtgatggggacagcagagggccagaggtaactgaatggkctccgtgactgggttttttttttcaaacttaccagatatggccgggcacagtggctcatgcctacaatcccagcactttgggaggctgaggcgggagggtcacttgaggtcaggtgttcaataccagcctgacgaacatgtccaaacccagtctctactaaaaaatacaaaaaatagctgggcgtggtggcatgtgcctgtagtcctgctcctagggaggctgaggcaggagaatcagcttgaaccaaggaggcagaggttgcagtgagctgagatcgtgccactgcactccagcctgggcaactccatctcaaaaaaacaaaataaaacaaaacaaaactaaactaaaaaacttgccagatgtgttgagaggaagactaaaatactttgccagtattttaattctaggaacatgctttcagtaggctgaattgaacttatcttttcaccttgtttataaaaggacagagatgttttatgagttgaatttaaattaaaatgaaacattactgtagtaagaaggccgagggatttgagcttttgtctcctaatgacatatttagcaagggtctccgaacacaat

SEQ ID NO: 691061 - DNA, 625 bp, Homo sapiens
gctgtgatggggacagcagagggccagaggtaactgaatgggctccgtgactgggttttttttttcaaacttaccagatatggccgggcacagtggctcatgcctacaatcccagcactttgggaggctgaggcgggagggtcacttgaggtcaggtgttcaataccagcctgacgaacatgtccaaacccagtctctactaaaaaatacaaaaaatagctgggcgtggtggcatgtgcctgtagtcctgctcctagggaggctgaggcaggagaatcagcttgaaccaaggaggcagaggttgcagtgagctgagatcgtgccactgcactccagcctgggcractccatctcaaaaaaacaaaataaaacaaaacaaaactaaactaaaaaacttgccagatgtgttgagaggaagactaaaatactttgccagtattttaattctaggaacatgctttcagtaggctgaattgaacttatcttttcaccttgtttataaaaggacagagatgttttatgagttgaatttaaattaaaatgaaacattactgtagtaagaaggccgagggatttgagcttttgtctcctaatgacatatttagcaagggtctccgaacacaat

SEQ ID NO: 691062 - DNA, 829 bp, Homo sapiens
ccagaaattgggtaacttatttaaaaaaaaaaaaaaggaggtttttttggctcatagttctgcaggctgtacaagaagcacagtgctggcatctgcttctgggtgggggagcccaggaagctcacagccatagcagaaggggaaaaggcaacaggtatgtcacatggcaagaaagggagcaagagggatgccaagatcttttaaacagccagctcccacatgagctaatagcatattattatgtcaggacttatccgcttggaagtgacaaaaaaaattcaaactagcttaaacagaaaggatatttgtgggctcaggcagagctagagccaggggttcaaccaatgtcactgggactctctttccttctctttgtctttgagctctgctttcctgctgaaggctggcctcttcttctcscactggaaaaggacttcctccctatagctggagaaagtgccacttaatagcctcaagcttatattgtctgagccaaagaccaccagcaaaagagaacttcttggtattccaattatagacaaagattcttccatcacatgcgcagctgttgccaggggcataagatgatctgattggccaagcccaggtcacttccctttccctatagatggggacagagtgggaggctggggttgacagccccaggagaaccacagggggacagggaagagcagtgagcagatgaagcaatacgtgtccatttatacatttgcctttgtgttaaaataacaagaacttgatgagaaagaccaaactggacagcactcatggggtgggaaggactcctctctgggacataattgaccat

SEQ ID NO: 691063 - DNA, 669 bp, Homo sapiens
cataaaacaatttccaaaggctttaaatagttgtggctttgatcttaagcaatttccagagattatggtcatttcactggggagagggttcwtggagctcctcatgctgccattcagaagtcatggaaaccaaaatgtgtctgagacagatctctatccatgtagaggtttattttgccatgtagaggtttattttgccatgtagaagtttgttttatttcttcttctgggagaaagaaacacaagttaccatagttcttctgggagaaagaaacacaagttaccataggatctgtggcctgtgctttttccaaaaagggtttttcaggactttagagaggaaaggaaaaaaagaaggaagggtaagcaatgagacaggagattactttcctatgcggctttgattagcactcgctgaatctacattttacatgtgaaaggggcgggtagaggaacagtcaattatgttagttttcttgcttggtaaatctacattttacataaaatatgtaaacacagagtagaggaagaaatctaatatgcatttgtcttgggtgggcagaggaattatttctagtctggtctttgtctcatacctgtgaagataagatgttaatctacatagttggccaggcacagtgactcatgcctgtaatcccagcactttgg

SEQ ID NO: 691064 - DNA, 669 bp, Homo sapiens
cataaaacaatttccaaaggctttaaatagttgtggctttgatcttaagcaatttccagagattatggtcatttcactggggagagggttcttggagctcctcatgctgccattcagaagtcatggaaaccaaaatgtgtctgagacagatctctatccatgtagaggtttattttgccatgtagaggtttattttgccatgtagaagtttgttttatttcttcttctgggagaaagaaacacaagtwaccatagttcttctgggagaaagaaacacaagttaccataggatctgtggcctgtgctttttccaaaaagggtttttcaggactttagagaggaaaggaaaaaaagaaggaagggtaagcaatgagacaggagattactttcctatgcggctttgattagcactcgctgaatctacattttacatgtgaaaggggcgggtagaggaacagtcaattatgttagttttcttgcttggtaaatctacattttacataaaatatgtaaacacagagtagaggaagaaatctaatatgcatttgtcttgggtgggcagaggaattatttctagtctggtctttgtctcatacctgtgaagataagatgttaatctacatagttggccaggcacagtgactcatgcctgtaatcccagcactttgg

SEQ ID NO: 691065 - DNA, 642 bp, Homo sapiens
tgagaaaattctgccttctaggtttcatggagttaggataaaaatctttcttacatcaacattgcgttcttaggaggttgctgtttgcttcagcaaaacctttgtatgaatcccatcctgggggccttagatacgtaaatcatttcacaaagtactgatgaatattaaatacagaacaaagaatagcacttttcaaaaaagaagtatttttcaaataaaaatcaaaagtgccctctcgtaattgatttattttagtacctacccacaaaaaaagatgtcttggaagatatatgcttcacttamaaataccagcacattaaaaaaaagtttttaaaataaagccatattaaatagattgttagtaaattatggcactgttaagccactcattttatcaaagtaccatttttaaagttaaatattaacctttaatcaaagaaaacctcttttattttatatgacttattgcttcatataaatggatttttattttaataaaaataagataaatcatgtataaactaatattaatgagtgattcatataaatacattttttataaaggacataagcaaatttctcttcttcccaatttttcctgtatttaaaaggtcctagtacaaacagtcacaatatggtgaa

SEQ ID NO: 691066 - DNA, 1270 bp, Homo sapiens
  misc_feature 700, 701, 702, 703, 704, 705, 706, 707, 708, 709, 710, 711,712, 713, 714, 715, 716, 717, 718, 719, 720, 721, 722, 723,724, 725, 726, 727, 728, 729, 730, 731, 732, 733, 734, 735,736, 737, 738, 739, 740, 741, 742, 743, 744, 745, 746: n = A,T,C or G
  misc_feature 747, 748, 749, 750, 751, 752, 753, 754, 755, 756, 757, 758,759, 760, 761, 762, 763, 764, 765, 766, 767, 768, 769, 770,771, 772, 773, 774, 775, 776, 777, 778, 779, 780, 781, 782,783, 784, 785, 786, 787, 788, 789, 790, 791, 792, 793: n = A,T,C or G
  misc_feature 794, 795, 796, 797, 798, 799: n = A,T,C or G
tacttttatagtaagttttgaagtaagaaaatacgagattttcaactttctcttgtttttcaaagttgttttggatattcaggatccttgatttaaaatgttaaatgccacaaggatgtagctgtacaaatctgakaaatatgtataatatatctaaaatatacattaatttatgtacattgcagtgctcctagaagttaaatttcattgtttattattgttttctttcaaaattattgtttttaatgtaatatattacatttaatagggctaaaataagaatatatttttatagtttatttgtattttataaagtaattcatcagtagatgaccagcataacacacttctctaataatagatcccacacctgaacatacaacactcttaagagctttagaagtaataacctgggtcctatctctagggcacctaccatagtaagtagagtagactcagtggtgagtcttggaaatctgagctctctatctattccttaatgaatttgaatcagaggtatttgcaaatcactaattggaataaagataatgaaagactgataatttaaacttgtttctagttgcatagaagagaagtgtggagaatgaagaaagaaagataatttgtgaattgaatgatgatcaagacaagcaaaacacctagtgattaattgttagagtctttaccgaaggccaacatnnnnnnnnnnnnnnnnnnnnnnnnnnnnnnnnnnnnnnnnnnnnnnnnnnnnnnnnnnnnnnnnnnnnnnnnnnnnnnnnnnnnnnnnnnnnnnnnnnnntaaagattgtcttgggataaaattatctgttgcaaagcatatagcctatagccaagtgttaatcttgttttccctagcatgcaggttactttcaataaagagaaatactaaagttgagttacatctgacataaaatttctatagaaaatgtacattctctgaaggatattttattaatgctgtatgctcatcatcaaaatctaggtttacctttgttggattcatgtgtaaacttatgtaggcagaggaaagagtggcatatactcctatgctgaaatatatcagttttcaaagaatatgagagattaaaaatgatggtgtatatgtgaattggaatttttttttttggtaattttctgagagtggggagtagagtagtgagttccaatttgtatttaaatagctcaccaaaaataaggtcacctgattcaaatttattcattttcattcagttctgaaaccaaagacaga

SEQ ID NO: 691067 - DNA, 635 bp, Homo sapiens
aaacaggattattttataccattagatagatatattttacagcataatacatttctaaattttttactttttaaaaactgtgtataaatgtgtcttttctttcttttttttttttttttgagacggagtctcgctctgtcgcccaggccggactgcggactgcagtggcgcaatctcggctcactgcaagctccgcttcccgggttcacgccgttctcctgcctcagcctcccgagtagctgggactacaggcgcccgccaccacscccggctaattttttgtatttttagttagagacggggtttcaccttgttagccaggatggtctcgatctcctgacctcatgatccacccgcctcggcctcccaaagtgctgggattacaggcgtgagccaccgcgcccggcctaaatgtgtcttttctatgcttttggaatggtataaaataaagcaatcagattacttacagttgtgtgccaacttatatgaggttgtataatttgggggataagatcaggactccccctactggctgcatgcctgcttcatttgcatcaaaatcaggacataaaaaactcaggaaacactagaaatttagcagaagagtaagttaagatcctccaatccgcttctca

SEQ ID NO: 691068 - DNA, 623 bp, Homo sapiens
ataatcagaaaataaacagtatgttccaggaaccatataaggtttttttttctcaaatgaccaaatttgataagcatatagttatgtatgtatcatcttccaaacagtgcataatccttctttcatactttaatacatacctgatgctctcaaaattcatttcatatataacatcaacattcaaacttcaagtgtatttctatataccactctattagatgtctagggctgccataataaagtaccacaggctagatggcttaaacaagaaacatattttctcaaaattcaggaggctagaagtgtgtaatcaagtgtaatcaaggtacgattaacagtgttgtttccttctaaatcctcartgattggtttgtagatggttgccttccttcagtggttttacgtggactttcttctctgtgtttgtccttatgttcatataagacatcttctatatgtcctcattttatattattgttttccttaatggccctgtctccaaatgtagacctattctgaggaactgggtgttagaacacaaacaaatgaatttggagtaatgagccatgattcagctcataagcactatttaatatttcaaaataatatatacattttgccaa

SEQ ID NO: 691069 - DNA, 602 bp, Homo sapiens
attggataaataggcataaacatatctctttatccaaccaacatctattaaatgccagatacagccatggatatatacagatagccgaccccttgctaggatgaggagatacaattagacttagatatgccattacctcaagctaatttccttcacagtaagtctatctgccatcttcaaactatgcctggagatttattttaatgtttctccacttctttagtttgaaaagtggactgtaaatatggcattctgaaatcctttagtcataattcctgagagtaaccaaatctatattacccttttaatatggttttctaaacaattttttaactcttctttaatttgattgtgtatatttatctgatttttttcataaatccatagcaacacacttttttgcctagcttttctatctccttcccrtaataaagtaatccatgtaaaaagcctggtatatatacgcttctgtattttaatccctacagataaaatcctatataggtgtgtgcatgcacccacacacatatacacatagagaataattccattatttcttaatagaatcatcttatatgattttctgcagatttgcttttctc

SEQ ID NO: 691070 - DNA, 619 bp, Homo sapiens
aatgtggcctccacattttaaatacactcaaaccttaattaggaaaataacaacaatgtagaactccaccgtttacaaagggattttatttttacttagtttataaagggaatcttactttgtccttaataacactaagaggcagttgctagtccctcatagctagtaaaagatgtgagattaaaaagccagattccccgccttcagagtctaagttcaaatgaaactatgccacctccctgcaattaacgtttagataatgctttacggttttacttaacagactattttttggagcagttttaggttcacggcaaaactgagcagaaaatagagattttccacatamccccaaccctacacatgcattctctctccccatactttatagcttttgaagcataaaaagaagcattcttaaatttcattacaaaaactctgtgaaataagaaatactgctttaattcccattttacagggaaggaaggtaaatttcagactactgattctctcagtctcaacctgtgttcctttattaaaataacaaaaactaataggtaaaaactgtccaaatgtccttcagttgacgtaagccacagcaacactaccattccccaca

SEQ ID NO: 691071 - DNA, 2568 bp, Homo sapiens
aatacatttagttttcacgtctctgtagcctctcccaacttgtgctgattcttcagccattccttgttccatgaccttgacactttgagagattactgatcaggtattttggagcatgttcctcagtttgggtttgtctgatgttttttcatgagagagtgagtttatgcattcttggaaagaatatcacaggtgtgattttttatttttcatagtgtaacaggaggtatatgatgtcaatatgtgttattactggtgctgttaactttgacatgtggttaagatagcgtctcccagttttctccaatggagagttaccatgcttccctttgtaattagtaagtatcttgtgggaaatattttgagactatgcaaatatcctgtttcttattaaacttttgccaatgaattttttattctccattgacataattatacctcttaaaattatttttagtagttatcctaggtttcacaatataatcagacagattctacagttaggtaataatactgcttcatttaacagccstatacggcattgtatttccaattcttctcgcacttttttggtattatttttgtcatgcaatttacttttgcatatgccaggaacataatattttgctactgtttttacttctggtagtcagttatctgtttgagcaattaaatgtggggggaaagttaatttaattatcatttgttttatttccattgttttttttaaattattttttggtataagtttaagtttttgtctggcatattctttctgggtgaactactttagcatttcttgtagagtacatttgttggcaataaattctcagttttttgtttggggaagtttttatttcttcatttttgaaagatgctttcactggatatggaattctgtgttgacagccttttttaagatgtttctttgtgtttgtttttcatagtttgaatatgatatgcctagaggggtgtgtgtgtgtgtgtgtatatgtgtgcatttgtttgtgtgtttctaaagccttacagccttgggtgctgttggtgctcttggatctgtgattttgaaatatttttcttttttattgaggagaaatttatataatatacagttaaccattttaaaacatacaattcagggatatttagtgtattcacaatgttgtgagcccaccagctccctctagttggttttgaaaattcatgattaattttttcttttctttctctctcctctttctaagattctgactatgcatatattaaatagtttgttttttgttctacagcttttgtttgttcttttcagtgtgtttcagtttgagtaatttctgtagctctagtaatttctatagatctatcttcaatttcacttattctttccttgactgtgtcagttctactgatgagactgttgtggacattcttcatctctgttactgttttttttttttttttaatttcaggcatagtttatctttttttgctgtaattacccatctggcttaggtattgtctgtttttctatttgagcctttagcatattaatcatagtcatctaaaatttcctgttctaacatctgtgtcctatctcagtctgtttttttttaatttctaaaatcacgtttattatcaaagccaaaattgcccatataattaatacattagtcttcaatttttatttctgcatgattatgcagtctgaatgactaactcacaatcccaggtggtattacaagttttgctcttcagaatggtgttactgttgtaaggggaaaagtcctcactgacaaagaaatgaaaacaaaatcaagaatgatccgcttgtatcacagattacagagaagctgtcagtgagcagttcctcacctcttgcagcaaaggggatcaagggctaaaaatatctcagaaaaatcaaacagcacctgcaatacactcttatatataaaaggccaagcttgtaaactatttcttctcatccatgctgctcaaatatgaagggattaaatataaggctaattcctggtgaatcttctcacttcttcctcttctttgtgtaatataattttcctttaagtgggattgggacaatcccttcacattcttttagttcctgggtcagagggtgtttgacaatattcggtctaatcacatctacgtttggagaagtgctccatcatgctttcaacagttgtggttggtgcataaaaattcaccaggaaatacccgcctctgttgtgccactgattgtgggtggagatcttacaaggaagcgctcactcacccaggttttccaagttcctcactattgctcctttttccatcagaacctctatcgtatgtttcaaagcagcagcagtctggccgcggcatggctttcaggattaaagccagcttatagcggggcatgcctggaggctcgatgcgtgcggctcggaagcgagctggttcccaggacgcgaaggggcgggatggcagggatggcggggacctggaggtggccgggcctgacgtctcctgggcggcaaaagcatgcttcagctgcatgagcctgggccccctcatgca

SEQ ID NO: 691072 - DNA, 1106 bp, Homo sapiens
tgaaacaaaagactcagcgaagccatgtctggattatgttttgagctcctgaattttggggtaatttgttaatttgttatgcaatatgaactaatataccttccaagaagtaaccactgtcctaaatgtgctgtttatcattctcatacgtgtgtgtgtgtgtgtatatatatatatatatttgtatgatcattcccatgcatgtgtatatatataaattgattaaatgtttttattccagtctgccatggaagaagcatatataagttgtattaaatgttttaaaaatccatataagtgccattacaatatttgtatccctctggaactagcttttcccttattcatttttctactgccaccactcaatctttgctcttccaagaggtctttctctcacagcccctgtgacttctagtctcctccccagcccagcctttggtgttctattcwgtttatgtgcaacagtcccaagccattgaattaagcctggtcataccttaaacgaagctcagcttcttcccatattgctctctaaaccaaaatctgggcctaggctctttaatattacatgggcttctaggcttatctggatcatcactttggttttctttgataatgctgctttccatagcagtgtgcatgttaaagtttaagtgtacaggaattacttgtggatcttgttaaagtgcgattgtgattcactaggtgtgcagagggcctgagactctgcatttccaaaacactttcaggtgttgctgatgctgctgatacgtggaccacatatttagtagcaaggttctagaagatagacatccatctctgtctttgcagaaattgttttaacttggtattttaatttatatagttcagcaataaaggaacttaacataagcttacccaatgattgaatgtgatagctttcaaagaagggaaggtaggccaaaacaaaaacaaataatgtaaggaaacattttactcagtgttatttacctaaagcaagtgaaaagaagagaaaaattagagtgaaaattaacagactagataatagaaaaacaatagagaaaaatcactgaaactaaaagctgcttcttggaaaaaaatta

SEQ ID NO: 691073 - DNA, 1673 bp, Homo sapiens
agtatcctcccccccaaaaaaattaagaaatatggtactaaggtctaatgcaatgaggttgatgtagtttcatttgaagattatttgtagtttagcagagagctcctggaaagaatgccttaacctaaagaaagaattctacaataaaggaaaagtaggctccagtggtggggaacgtattatttgggagaggattttggagtacttcaccacattgtatgggcaactaattattttttcttgctctgtctctttaatactgatgacaaagggatatctgtcttttatttcgccctgtagttatggtcctaacatatactaggatataatacattttaaaatgttaacacaagtgccaaaatggggtggggaagcattaagtccacttaactttagcaagcacttactgagcacctactatgtataaagcacagtgctaggtgatataggatagaaaggcaaataaaattctataaggtgtgaaccttccagaacctgacaatccctaggagggggatagataggtgatataggatagaaagacaaataaaattctataaggtgtgaactttccagaacctgacaatccctaggaggggtatagatagacacacacacacacacacacacacacacacacacacacacacacatacacgacagtacacacacatatatatatatatataaataatattaatgtaagacagactatgagatatgctattgcataatatgggagaaggcattgatgctaactagagagcacctaggaagctttaactaaaagtagaaacaaggctaccaaccctcaaatccctggacccttccccttctctgaacaactatcttcaacagattcagagattaggtccactgaactttaattttttctcttttttctttattatgaaatatttcagacctgcaaatggtatataaaaaccattataaatacccatgtgcataaatacccataacttaagcaagaaaatgttacagatatgttctcattgttcaattgccacctatgagtgagaatatgcattgggagatatacctaatgctagatgatgagttagtgggtgcagcgcaccagcatgtcacatgtatacatatgtaactaacctgcacattgtgcacatgtaccctaaaacttaaagtataataataaaaaaaaagaaagaaaatgttacagatatagttgaagtacccacacaactagaattattttactaacatcctctgcttttatttaaaaaaaaagtttttttttttttgagacggagtcttgctctgtcacccaggctggagtgcagtggcgcgatctcggctcactgcaacctccayctcccaggttcaagcaattctcctgcctcagcctcccaagtagctgggattactgcttgccaccacactcagctaatttttgtatttttagtagagacggggtttcaccatgttgtacaggctggtctcaaactcctgatctcaagtgacccacctgtctcggcctcccaaagtgctgggattacaggtgtgagctgctgtgccccgccatcctctgcttttactagcagctttgaaagatgaccctcaatgaaccctgtcttctggtattcatgcccttgtgtcatccccctcccccgactgtggctggacttagcgacttg

SEQ ID NO: 691074 - DNA, 893 bp, Homo sapiens
ttttttgtggaacaagtaatagaatcacgaggttcacaaatcaaaatgaagtctgaggcaggcgatcacttgagcccaggagtttgaggctgcgatgggctatgcgcgtgccagtgcactccagcctgggcagcagagccagactccatctcaaaaaaaaaaaaaaaaagaaaagaaaagaaaagaaaaatcaaatgatataacaacttttattcatttcttatatattcctccaatgctatttatgcaaatataatggtcactctacatgtgcaggattacatatcattcagaccaagtgagctacatcatcacaaagatgggaaaatgtaccctgaggtatccaaacgaacatcatacaggcccccaaacagggaacaaatgctaggcaggcaagatcgactgatataacaggtaaagagcaatcaagggcagtgtagttaagatgtatgatttgtctgtttctcccactaaacagtgagccctctgcagccagaaacagtggcttgctcatcactgtacccctccatacctagaagggttgwctggcacttgaaaggtggccaacaaatgtttgtggaataagtgcatcaaccaatattccatcatggaggacctagggactgaatgggacctgaaaggatggaggaatatggagatacttacagaggcaaagactgtcctggcagggacaacagttcaagctcacgggtaagaccactaagccactggatggaaatgtggttggagtctgcctcaaacctcagtggaaaggggcaagttcctgcaaagatgcatgcattcacatggcctttcctgcctggaggtgacagtgagtggtagtacctgcacacagggctctggcagactcaaccaggtagccagtctcagac

SEQ ID NO: 691075 - DNA, 893 bp, Homo sapiens
ttttttgtggaacaagtaatagaatcacgaggttcacaaatcaaaatgaagtctgaggcaggcgatcacttgagcccaggagtttgaggctgcgatgggctatgcgcgtgccagtgcactccagcctgggcagcagagccagactccatctcaaaaaaaaaaaaaaaaagaaaagaaaagaaaagaaaaatcaaatgatataacaacttttattcatttcttatatattcctccaatgctatttatgcaaatataatggtcactctacatgtgcaggattacatatcattcagaccaagtgagctacatcatcacaaagatgggaaaatgtaccctgaggtatccaaacgaacatcatacaggcccccaaacagggaacaaatgctaggcaggcaagatcgactgatataacaggtaaagagcaatcaagggcagtgtagttaagatgtatgatttgtctgtttctcccactaaacagtgagccctctgcagccagaaacagtggcttgctcatcactgtacccctccatacctagaagggttgtctggcacttgaaaggtggccaacaaatgtttgtggaataagtgcatcaaccaatattccatcatggaggacctagggactgaatgggacctgaaaggatggaggaatatggagatayttacagaggcaaagactgtcctggcagggacaacagttcaagctcacgggtaagaccactaagccactggatggaaatgtggttggagtctgcctcaaacctcagtggaaaggggcaagttcctgcaaagatgcatgcattcacatggcctttcctgcctggaggtgacagtgagtggtagtacctgcacacagggctctggcagactcaaccaggtagccagtctcagac

SEQ ID NO: 691076 - DNA, 639 bp, Homo sapiens
agacacacaagtacccatgtaaatggtcaaaatgttcaagtctcacagtaaataaaggcacttgtattacagctatcgttataaaaatctgtaacacttcaagagaccattatggagctattaaaaagattttgcattcagttttcaagatgacttaggcagaatgccaccactatagtaattactttatttatcactatgtaaacggatttttttttttttgaggcagtctctctctgttgctcaggctggagtgcaatgacacagtcttggctcactatgacctccgcatcccaggttcaagccattctcctgccctcagcctcccaagtggctgggattacagatgtgcaccaccatgcccagctagtttttgcattttttttttttttaagtagagacaggagtttcaccatgttggccaggatggtctcaaattcctgacctcaggtgatccactcaccgtggcctcccaaagtgctgggattacaggcgtgagccaccgcgcccagtcrgatgctcaatttaaaaagagaaacacaattcatttaaaaagagaaaaatggtgttctcacacaataaccaagcaaaatgtggcagcaaaggcagtggctctgtctgcaaatactggtcatcttg

SEQ ID NO: 691077 - DNA, 698 bp, Homo sapiens
tgttctcacttgttagtgggagctaaatgatgagaactcatgaatacaaagaaggaaacatcagmcactggagcttatttgagggtgaagggtgaaaggagggagagcagcagaaaaaataactcttcactattaggtgtagtacctggatgatgaaataatctgtacaacaaaccccataacacaagtttacctgtataagaaacctgcacatgtactgccatccctaaaagttttttaaaaaatttaaaaagaaataataaaaaacaaaaaaaaataaattaaattaggatttgttttcaagtggatggatctccattaaaattagaaaaatatttgggaaaagtgtgaatgtgtgcatttttaatgtgactactaaataaaatataatgaatagataagtacctctccctttttatcatggaagctccatgtttaaagcaattgcttttataatcttggctgtctgaaactctttccttctgttttgaatatttataagttttttaaaagttagtgtcagcaaattaattagttacacttctatactgagacatatttaaattacttagtatagtactgctgctgctttttctgtttaaaatgtatgacttggtgttttaaagtaaaaattatgaagttatttgtggagaaactaaaaaagtttcacaactgactgaaataaaacgcttgagaca

SEQ ID NO: 691078 - DNA, 700 bp, Homo sapiens
aaagtaggcaaataccatcttagatttttaattcattgtctaaatcttttattttaacctgaataaattttgaaaagacaactaagctttctgggaagcaaatgtttagctgatattggaaaaatataatgtagtgacagatcaagaaaaaaaaggaaaaatactttttttcattaaaaatttaaaattataatacatatgtatgtatttctgtcaaaattgaaatacaaaaagaaagctgaagactcccttgactaccacttgtgaccccagtcttctctaagtgtatatccttccaaatcatattccctgcagttatatatgtacatatccataaaacatacagctttcttttatgttaggtatttaacttacagcctgatggatggaagattatgcattaaaagggggatcttgttaatttttttkgtagattcttttattctgatcttgattaacagtaaacttagttgcactttcacaccaaatacctcttggaaacggaaatgatgctagttaaaatggcgaatataaacttggacttagtaaaagataacagtaacttgttattaaaaactttcaaagggataaaggcttgaaacctcaggtatccagtttcatgtaaattacttacaagtctaggtgatatttgagatgggtcttaagagaggaagaggaatcctagggagggggaggcgag

SEQ ID NO: 691079 - DNA, 607 bp, Homo sapiens
ggacctaaggagtcgcagttgtgaacaggtttggtgccgcgggctggggtaggcggcggttgggtccgtggctctggggcactgggaagatcgcgagtcgtgcgcatgggaaggtcctcccccggtcctccgggtcatctttgctcccgaggagcggcatatttcgcatctgcctgaggtgtgcccgggggtcgttgggagagtgacgggatgaatccctgcagagagcccggactgggagggaaggtgtcggggagacgtcgtttcctggcgacgtggtcccggcaggcgacttagacctgagccgaatctgttgaccccaaattgtgcttttcccaccaagaagaaaagggagagaaacagtacaagttcggcagtaaaatatagtagasaagcaatataacctctgaaatcacacagctattcagtttcaaagcgttcctagtgcccagctctcctaactcccggccagtgttccttgacatatggtgatatataaagactttctgtttccgctcgtgtgtgtgtctgtgagaagcctctgactcacttctgtgctccagtagcaccctctgcagccttgcaatgtagcccttattgcatggca

SEQ ID NO: 691080 - DNA, 1796 bp, Homo sapiens
tgcatgaggtgctgagctccctactctgaaaaacaactcctaaaatcaggtcctgacttttgccctctagagagaagcagaattaggagagatagatgctcttagaatataattctctagccctgggatttggagaaggagtgagaagcctgcagctttaaaatttcaacttatatattttttcagctcctcacccagattgagtttctgcaaggtctgattttattcctgaggacacgtgaagcagaggctcgagggcaggagcagaaccctgaggattccttgcccatgttatcgtctgtagctgctcttgctctaagcccaggcctcctcctacagccacacatgtccataaaagcacccccttttactcttgggtttcttaaaatgtctcagtgcacatcttctacgttcccaggttacctttgggaaagggcctatgctggagattgacagccccttgaaagaaatcctgcaagtccctttctctgtgtggagtgctctctttttgctgccaccctacattccagccacgctggcctccccgaggagctcggcctgcaccttggagctggtgcccttcgggctgccctcagctgctcctcttgtttttctctccttagcctttcctttattctgcaaaaccacattccactcaactcacgacttatcctgcagagcttttcccaaatcatagcaactcttgatccaatgcactccaccttgacccagatttctgctctatggaaaccagggagaaaggtagaggggaggagagaggcgatgatgaacctggtcatggcatttgacagcccctcccctcccccacagcatctatttccactctgcccctccaggacagtcttattcacagcattctgtttcaggggaagaaccattttcttcaaaatcctgatttaagagccttcagagtcagggacacagggctcagtggaaggcaaggatgatatttgggctcaaaatgggagttacaagggaacgttgggaagaatgatgcttccttgcatcagcctgcttcccttgctctctgcctggaacaccagaaatcgggatgttcttcctacgcagggggatggaaaattcacccttggagggactgtaaattctcaagagaaaacaccttcagacattgacattttcccaaaggaaaaatcatctttctgctgctttatcattttccgaaggcaaccactcaacacgttctacccatgcttacaggacagccaattttaaggcccctatcttagttaaatatgaacaaacagctaaggtgatcaccatgcatccaaggacaactttcaacatgagaggctgaaagtggcattatctctagaagggacacacctgcagggattggaggaaaaggaatcgaattacaatagcgtccttagagaagatgaacaattcgagaacaagaaaaaactctttggaattacagataagaaatctgaaacaaagacttcagaaagagttggaagayaaaggccctctcctagaatgaaaagacaaaaagacagacaactattagataagatgggaaggtgttttctggagtcccaatatctttctggagttctaggaaaagagaatagagaaaacagacaggaaaaaattttaaataaagcgtgcatgaaaacttcctagaaaaggacttaattttccagttttaatgggcttattataagaacctaatttagtgactaaaaactttcagaggaataaaaatggtcacaaagaatcaggcattaagatcacatcaggtttttcagtaacaa

SEQ ID NO: 691081 - DNA, 2524 bp, Homo sapiens
  misc_feature 901, 902, 903, 904, 905, 906, 907, 908, 909, 910, 911, 912,913, 914, 915, 916, 917, 918, 919, 920, 921, 922, 923, 924,925, 926, 927, 928, 929, 930, 931, 932, 933, 934, 935, 936,937, 938, 939, 940, 941, 942, 943, 944, 945, 946, 947: n = A,T,C or G
  misc_feature 948, 949, 950, 951, 952, 953, 954, 955, 956, 957, 958, 959,960, 961, 962, 963, 964, 965, 966, 967, 968, 969, 970, 971,972, 973, 974, 975, 976, 977, 978, 979, 980, 981, 982, 983,984, 985, 986, 987, 988, 989, 990, 991, 992, 993, 994: n = A,T,C or G
  misc_feature 995, 996, 997, 998, 999, 1000: n = A,T,C or G
aaaagctcaaatctactttacaaacaatttaccatagaggttaagagattagcgttgctctctgagagacctgagttcaagtcttggctctgctatttgctatgactttggaaaaattaacctctttaagccgtagtttccttatctgtaaaatgaagatcatagtagtatctacctcataaggtttttagagattagtaaaggtatgtaaagaatttagtacactgcctggcacacagtgacaagaaatgttggttcttaaagtaatcagtggtagtaggactctggacttttccttgatttcaacatgcactctctttctctttgtctcataatttggcaatttttttttttgagacagggtcttgctctgttgtccaggctgaagtgcagtgggttcaatcatagctcactgcagccttgaactcctgggctcaagcaatcctcctgcctcagcctcctgagtagctgggactacaggcatgcagcaccacacgtctggctatttttaaaattttttgtagggacagggttttactaagctgactaggctggccttaaattcctggcctcaagcagtcctcccacctcagcctcccagagtgctgggattgcagtgtgagacttcgcgcctgagctatttagcaattttatagtcagattctggactggtgggccccactgatggcttccctcgacactctccttcccaactcccatctgaccttcgtcctgctcagtagtgattcagctccccacccctccttcaccagcctctgcagacttctgggtcaggaattagtcgacattatcataaaatctttggatccctccttatgagaaactacatcttaaatcctgttccaacttgagaaaagtctcacaagctacataggaaaannnnnnnnnnnnnnnnnnnnnnnnnnnnnnnnnnnnnnnnnnnnnnnnnnnnnnnnnnnnnnnnnnnnnnnnnnnnnnnnnnnnnnnnnnnnnnnnnnnnctaaaagtacttgcttcctgtttcccaactacaccaactggtggcttctcctcatcccacgtgtgctaacagcaggctctgtgtatcacagaacaacacagtgtgagccttgagcctcatgtcaagccggtgcttctcaacctggggacaattttcactgccaggggacacttggcaatgtctggaggcattttagtcgtcacagctggggcagagggcgttgctactagaatggagagtgtcgaggccagggaactgctgaacatcctgagattctcaggacagcccccaccacaaagaaccatctggtccaaatgtcaatagtgccgaggttgagaaacccaatgtaagctcatagaaattaacataaataaccgttgcattgaatctaatatactaaatttgactacttttctgatgagtcctttttataaattatcagacaagtgaagccacatcttctttctaatctttctttctaatactggacactgactagaccggagagtgtgggtgatagagctgcttctgccaaaaccatggcctctagtttctcttctctgtatccacagcaggcagaatggcatctgttggaaagggcatatactctaaaatctttttttttttttttgagatggagtcttgctctgtcacctaggctggagtgcagtggtgtgatctctgctcactgcaacctccgcctccygggtttaaacgattctcctgcctcagcctctggagtagctgggattacaggcatgtgccaccgtgcctggctaatttttgtatttttagtagagatggggtttcaccatgttggccaggctggtctcgaactcctgacttcaagtgggccacctgcctcagcctcccaaagtgctgggattacaggtgtgagccaacacacctagcctctataatcattttaattgggcaaaatattatggaatttttttcagtcatgaaaattaatcaggcttgcattctaattcagtctaaccctggctatttccaaagccaaaggaagcacaacacaggtatttcttttcaacctcccaggaaatagttcaactgatccatggaccagatgtcaaatctacaccattaaatcaccttctccatagtcttaaagttcaattggccaaatcatgcatgaagaggctaccagtcatggttacattcagcttcatagcataaaactgcaaaagacaaaggcatatataagattaaatttcatttttctctcagttaaaagaaacctagagataagcagtccagagctgctttggtagctccatgacatcatcatgctccattgcattctctgtgcccctcatcctcatagttccagatgcttgctgaagctcccccagaacatccctgtttctaagttcaaatcagcaggaaggagaagggaagggcatggttctactcttttaagaacacttccaggcagctccttgcaacccaactacttttatctcactggccagaatttaattacctgaccatacttaatggtca

SEQ ID NO: 691082 - DNA, 598 bp, Homo sapiens
tgtgattctccaggtcatgccccaggagctctgcagcaccagcagggtgaagcccacactccaaatggtgcccaaggccctgcctgtcctctccccaccttctctccaactcagtcatcacaatctcctcttgctgctttcttttttttttgaaacaggttctcactttgtcacccaggctggagtgcagtggtacgatcatggcttactacagcctcaacctccacatggaaggttcaagcaatcctccatcctcatcctcccacatagctgggattacaggtgcaggccaccactcctggctaatttttaaaattttttgtagaaatggagttttgcaatattgcccaggctggtcttaaactcctgggctcaagtgatccacccaccttggcctcccaaagtgctggaattacaggcatgagccaccgtgcctggccttccttttggcattttatgatccgtaactccagattccataaggtgctgttctggtctctacaaggctgctcctgttgctttccctcctccaggaagcctccatacacacatgcacacacacacacacacacacacacasacacacacacacacacac

SEQ ID NO: 691083 - DNA, 2036 bp, Homo sapiens
ggcaagtttaaagttcaaacatggctactgagagggacagcaaggccatatgctgattccccagttcctttttaagaaaggagagctcagagataaatacagaaaatcattctcttactattttcaaatatctaacctttaactttgtttaacttcaataattgcctgagttgagactgcttctaaagacaagttcaagttgaatactaagttccccacttgattttattcagtatacatttccttttagagcagttattttgattcagacacacttgattcacatcatacattataacacaaaaaaaagcccccatgctaatgctggtatagaataaaaacacttgaatttgtgaattccggaagaatttgtaagcctcctggtacttgtattatgcttccagcaaatatacttctaccaagggcatgcagaacatgactttgtacagagatattactttgtacaggaccacacatgcatgaaagaccagaacagwgaaagaactgaaaactcagagacaaagataactggaaattatctattctacagtcctcattttgcatttaaagaaggcggattctctggagtgaactcaaagtttccttccagccctgaaatcggtttttgcttcatacagcagaggttcctggtgcccagaatgatcacttcaccaatcagggttcctatatctgaccacggcttcctatggcagcccttcctaagggttcccgtatctcccttttctggccacagaacatactgagtttatgcataagtagaaagaaggcgctggaaagttaattctgcataccagctctcagctaatgacagaagaagttagattattaaccagcttctgaccctcaggtgggacaaccctgaagtgtgctttacaccatctctcagaggtcgggtacagtgcctgctgacacaccctgtgggagcttccctgacccacttcactttcccaccagtgtccactgaatacttacccctactggcactcaaatcctggccttggagtgttcttctgggagagtccaccctaacacaaaaggtcccaaacctatggcagaaagggaagaccatactggtttggttttgcatattttaaggatatttaaagaaaatagttgggagcagtggttcaagactataatcctagcactttgggaggccacaggaggaggatcacttgaacccaggagttcaagaacaatctgggcagcaaagcaagatcctgcctctacaaaaaaaattaaaatttttaaacttctaaaataaataaataaataaaaattagcaggcaatgtggccttgcacctgttgtcctagctactcagaaaactgaaacaggagtatggcttaagcccaggtgtttaaggctgcagtgagctatgatcatgccactgcactccagcctgggcaacagaacaagactttgtctccaaaaaaaaaaaaaaaaaaaaaaaagataactttattagatcatgtcatgggaacctaaaagagtaagtaaacagtctgtttcaaacagtttaagacatattcatccaattcttaacaagagccaagttttcaaaacctttgtttcaattcaatcagacagttattcagaactgaatatcaatcaggctcaaaactgatttaacaagcaattttgaggtaaaactaaaaaaatcaaccatatttgttcaaaagccaaaagtagtatttggcatacttgccttatgaaatgaggacaaaacataacaattctgtaaatatcttcagaattaggaggacagacaaggaaagatgactgaagagaagcctccagtaatcatcctcccctcaaaaacaccaaattgaacaactattcacacaaaaatcaccttaataagaaccaaaatcaggtgagtgattacagcaccgggtttgaacatcatattaaggaaagaggcactgaagagggtaggaaagtcttgaattgccaataccacccctctcctattccctggtagtggcctcatgacacagagagagaatctgtgca

SEQ ID NO: 691084 - DNA, 588 bp, Homo sapiens
ttatgtacacgccacagcactcggcagttatgtagaaaagacctcaggaagtgctgacactcttcatttagggagagtgatggatttcggggtgaatagcagggacagtgtaacctgcatgtgtgaataatcttaagcaaaaatgtaagtaaagggaaaagacattttagataaactcatcaggtattggtctgaagtaacgaacattatctggaacactcttttatgaaactgctggttaggtgcttgccgtgttgtattggtaattttctggttgtaaggtttcacttgtatcaacttgttgtttatgctctctactaaatacatcctgtatgttycaatccttgtgtcttttcttctctcctttaatttaaatattacttcttgcaaggactggttcacaatccagtcaggaaactccctgcttgcccagctgagagttgtctttccttgctagtgtgtcaattcaccattttgctcactttgccacttctaatatcctattttgcattgttggcgtatttctggtattaccgtatttgatctctgcaactatatagaaaatttgggagcctcatgcctataatc

SEQ ID NO: 691085 - DNA, 611 bp, Homo sapiens
tgttggaggttgaagaaatataaaaaagaaaatgcatctgggactgtaatagcataatatctagatattttccaagcaatttagtaataaaaaccaaatttgtcatcgtgttgggccagcaaaaaagcaatcagatggctggattaattaatacctgcaaacaatcatgttagaattttcacatatagtctaagttgacagaatatgcatgtgcatcccaaaacattcttttagctggtgaagctgtttacttaagacatgcttacagtgaaaatttgccagcatgacttctgtttccttagtccacttgagtttattaatctgatctagaatttcctgtcctcaacactaccactaaaatgaaagaaagagaaagagggagggaggaaaggagaaagggaggaaggaaagaaggaaggaaggaaaagaacgaaactttgtatttaacagatacatctactctggagttgaagtggaattctgacaagccagttgggcaattctaaaggaaaacttttaaattcctacttttaaaacattggatgstgagaatagtaggttattgctggttatcactattatgttatatttctacagagagattctccaga

SEQ ID NO: 691086 - DNA, 1245 bp, Homo sapiens
tcatgagttaggaaataaaatatcagtaatcttggacatttctttgtactcttctccaatttcatcctcttacttactctccccccaaagtaatactaattctaatatttgataatttttattcttaacaaataactttattcttttgcacctatgtatcaatatacatgtatatgtgtatgtgtatacatacacacaaaattattttttgtttggatgttatagaaattgttttgttttattttaattttatactttctttgtcacttacattttccacttaactatgtgtttgtaagatttgtccatgttgataagtgtcactttaaattatatagaatatttcattgtaaaatatcccacaaaaaatttagagaatacatccaggaactccaaggtttaaattataggtgtgtcaaaaataggaaacagaaatagaggacaggaaataaacaattaaataattttttaaaatccacaagtcttgaaggacagaaatctccatttttgaaagaattaactgagtgtccagtaaaatggatgaaaataatcctacacctagaagtatcattgtggagtattagagtactgaagacaaaaagaatccaaacatggtagcagtttcataattataaaattatatttaaaaaataaaataatcactatatttctttcattgtgttgtttataggatgaaataagttaatattgtgaatagaacaatgcctaatataagcaattaataaatattagctattatttatattattcctttgcagataatatttcttttgctcttcagccacctttctaatctttgcgttgtctttgtgttcagtttcactgtgatttgtctggatctgggtttattcgtgtttatcttgtttaagctttgttttgcttccataccctgtggattcacaccatcatgtatttttttatttctcatttttaatttattctaatattatctcttcctcattttctactatatttttctgatttaattataagatgttagaacttgtcatcataaattacaggtctctttaacactcatattttctaagcccttttctatatgagctgcctaataattttktttccaatttcttaatttgttttcagctgtgcctagtcttttatttatcaactgagattataactccaactctttttcattactaggagtttgatcttttccaaggttatctggcattgttggtggtaattttttgcttaatc

SEQ ID NO: 691087 - DNA, 1144 bp, Homo sapiens
tacgacctatattactggaatatttttttctaaaaaattttaggaaacagttaaatatttaaaagattacttttttaaaaagcaagtaaatattacagaacagaatgcaaaatttattttacatgggagactaaaaattttcacacacatggccaccctttgggcctcttggctcaacatttcaggggctgagggagtctctgctctaggagtaaaaggtccttggagagaaaattttgacaagtcctaactttaaaaaagaaaaattggttcctggtcaatatttgtactcactgtaaatgtgatggttggtaatgatactctgtataaaagtaaaaatcatattttatgtcctttgcaaacaaatatatttgtacctgaggtacagattagaggtgctagtaattccttgaagattctgaaaatgatctttttttccaaaatgctttcttggtttttattaaactttctattttcttaaaactctcacatcaggtatttccagtgttttcaagcatgtataaatattttaatgtataaatgttgtttaaaatcccctcaatcggtatctcctgattgagaaaatacacagtgaccaatagctaataggaattcagtattgctttcaaagaaatgtgcatattaatcactgtagcatctgcatacatttgaaacacggagtaatacaggtctgtgcaagaattagcagcttgttccttgctaataatgacttgtgtcatctggaaggcccccaagagcccatggtctacaggtggaatgaccaccacttgggagtgagctgatggagagcacccagcaggtctcctccatcttcctggttcctgtgctcascataaggctggtgtacacttgggccattaataaacgtttgttgaacaaattaatttggaattaatgtgttccctttttagctatcgatttattactaagagattatattgaaactcttacggctatactggagtcatgtggtaagcagtatccaagtttctgttgtgtgcagaagatggcactagatatataataaaggggggcattaaaaattacaaccttggtttctgttctcaacatgtctgggtgacagaataataagtgcaacatgttatataatatggcgggtttc

SEQ ID NO: 691088 - DNA, 1144 bp, Homo sapiens
tacgacctatattactggaatatttttttctaaaaaattttaggaaacagttaaatatttaaaagattacttttttaaaaagcaagtaaatattacagaacagaatgcaaaatttattttacatgggagactaaaaattttcacacacatggccaccctttgggcctcttggctcaacatttcaggggctgagggagtctctgctctaggagtaaaaggtccttggagagaaaattttgacaagtcctaactttaaaaaagaaaaattggttcctggtcaatatttgtactcactgtaaatgtgatggttggtaatgatactctgtataaaagtaaaaatcatattttatgtcctttgcaaacaaatatatttgtacctgaggtacagattagaggtgctagtaattccttgaagattctgaaaatgatctttttttccaaaatgctttcttggtttttattaaactttctattttcttaaaactctcacatcaggtatttccagtgttttcaagcatgtataaatattttaatgtataaatgttgtttaaaatcccctcaatcggtatctcctgattgagaaaatacacagtgaccaatagctaataggaattcagtattgctttcaaagaaatgtgcatattaatcactgtagcatctgcatacatttgaaacacggagtaatacaggtctgtgcaagaattagcagcttgttccttgctaataatgacttgtgtcatctggaaggcccccaagagcccatggtctacaggtggaatgaccaccacttgggagtgagctgatggagagcacccagcaggtctcctccatcttcctggttcctgtgctcaccataaggctggtgtacacttgggccattaataaacgtttgttgaacaaattaatttggaattaatgtgttccctttttagctatcgatttattactaagagattatattgaaactcttacggctatactggagtcatgtggtaagcagtatccaagtttctgttgtgtgcagaagatggcactagatatayaataaaggggggcattaaaaattacaaccttggtttctgttctcaacatgtctgggtgacagaataataagtgcaacatgttatataatatggcgggtttc

SEQ ID NO: 691089 - DNA, 643 bp, Homo sapiens
agtgaaaccctgtctgtactaaaaatacaaaacaattagccgggcgtggtggtgggtgcctgaaatcccagctactcaggaggctgaggcaggagaatcccttgaacccaggaggcagaggttgcagtgagccaagattgtgccattgcactcgagcctgggcaacaagagtgaaactccgtctcaaaaaaaaaaaaaaaaaagttgttaaaaaaattaatgttttggaaattttatctattgccctttacttaaggactcgtgatgattccccatttagtctaatttcacaagtttgtacagaaggcatatagacttttccttttggaaaaaaatttctattttgcctttacagaatgaagtttagcagtcaaaaaagacattggtgtaagagaacagtagtaacaaatgggaaaaatggcacagyccccagtctgggttcaatttcaataagaaatgcaagaaggatgagaagaaagagggggttgatctatagatagggacttggggctaaaggaagtaagtcttttttatttttaaatagactagaatatgtctaagttcagagggcaagggctactagaatgggagaggtttgaggggaaggctctcataattgcagaaaataggaaagatttgctaa

SEQ ID NO: 691090 - DNA, 1054 bp, Homo sapiens
tacacacacasaaagaattatgcttctgtgttaaacttatccaaagaatcaactgttacattttgtctgattgttcacaacttaatataaaacacatctactttattatgtgtctttttctcaaattttgactagcctaattattactgtttgttcttgagcacactaatacaattttgtcacttttccaccttataatttactctcaatagtataattagaagtgcatcttgaagaatgagtaagttttttttttaacgttaaatctttggaaaggacaacccagaccatggagaaggcatattcaaaagcaaagaggcttgaggaaaattcaaataattagaagaatcatgtctgatatgctcacccacaacaaatggctgatagtacttaaaatatgacccaaaatagaaaatgttaatcaaatagctataatggtatgctgttaacaagtatctcatttaataaaggattgaaatcatgttacccacatcaatcctaacttgcactaaattctttcttcttgcctcagatattaaaaccacaaccccgtcacttcagttctgatttttaaaatcacatctttatatttattagtctataggagatttatacttcttcacaatagaatgatacggcttcagatacagaaatggattgttctgccagccacagggcaatcaatagaaaactacactgagtgtttcactggctgtttgccaatttttagaaggaaaaaaaagttactgatgtgcagtgtgatatcagttttctcttttaaaaaatatgagaagctctcctccaaccatcattgacaaagacccagacatctcacgatctaactttataatatactgtctcctggggcagcaggagactatcatacaaatgatttgagaacagagaattaatggtaaataaaaactcaaactaaaaacataaagagtgctgaaaagagcaataaaacttcaaatgagtgaaataactaaattttaaaaataaatttccatatcatgtatgtatagagattcagggtgatacaggtcagaaaaca

SEQ ID NO: 691091 - DNA, 637 bp, Homo sapiens
cacagcaggtcacactggcctgcagccacaacccccaggctgtgatctcaccaagctccgagaagccaaacagggtcaggcttggctggtccccgagtgagcagggagacctcacaagcaaaacacaggtgttactggtgattcagcgggccagccccaccctccacggagtctagttctgctcaggtgttggaattgcaactgggatgattcagggagctcctatcagtacctgggcagaggaaaggggcgtggtgctgccggcaggtgctgaatgctctttctggcctccatgtgtgacaagtgttgacactcttaagaatcagggtggatgcacttcctccctccctgtcccctgcccatttcctaaggctggttgttgtcagccattgacctaaattcctcactttgtctcaaccagataagggatggaggaggaaaaggcagctccggaggggcttcaggctcaggaaccatttagcccccactccaaacagctgtggtctggggctgccatcaggctcctggctcagcccccaggatggtcccttctggtttgggaacaagtaaggatgaaacgggtccatraaatgagggccgagggccgtcattagcctgttttatgagtacacagata

SEQ ID NO: 691092 - DNA, 605 bp, Homo sapiens
taaatggttctccccgttgatttgtccttcccatagtattctttgtcactagaaactaaggacttactcatactcatccatttttcttcattacctagcacagtgtcaggcataaagtaaatattgggtgattatttttatttttatgaataaattaaatagacaatgtaataattagatgacacaggaagtcaataatcttagagatcttcagtgcatcctatttggttcaatcatatggataaaggcaatgtttccatactaattaagagaatcyaattataactctaagttatgtttaaaaagactttgggggacctaatttttatatttgagcaaagaacaatcaaacatttattgatcagtttatgtatatcttttttaaccctatgtaaccactgcctacatgttataactaaagaatagaagaaaagtgtttttataaaataatgatagctaccatttgttgcatgtttattatgtgctatacctcgggctaaatgcttgatgcacattatcttatttatcttcctaggaactctgtaagtgagagcatcagtaattctctccattttacgtatggggaaatggaggtcctgagatct

SEQ ID NO: 691093 - DNA, 822 bp, Homo sapiens
tgcggatccctcaggatcctgaaaatctctcctgtaccttccacattttgggagtgctacagtttgggtatctgaccctccagatctcatgttgaaatttggcccccaccattggaggtgggcctagtggcagatgtttggtcatggggcagataccttatgaatagattaatgccctgggcagggggttaaaacgagctcttactctgttagttctggagggctgattgtcagaacgagcctggcacctccacccccaccttgcttcctttctttccatgtggtctctgtacacaccagctccctttcacctctgccctgagyggaggcagccagaggccctcaccaaaagcagatgctagcaccacgctccttgcacagcctgcagaaccatgaaccaaattaaatatctcttctttataaattacccagtcttaggtattcctttatagcaacataaaatggactaagacaaggaggcacaaatctgcaattctttggctgataaattatcaaatatagctaacctaactagcttcctccgttttgcatatgtctggcctgtctcctggcacctctgctttctcttcatgaagcacccaggtaacccattatccagagctcttactaattctgttcagtgtttgtttcttgctgctggggcaggaggtggagaacaaagggaatgagggaacattgagaaatttctcttcattgtgaccagctagggcaaattgtccttggtcttctaacccagcagcaagtattcattgcgaaaacacacacacacacacacacacacacacacacacacacacacac

SEQ ID NO: 691094 - DNA, 822 bp, Homo sapiens
tgcggatccctcaggatcctgaaaatctctcctgtaccttccacattttgggagtgctacagtttgggtatctgaccctccagatctcatgttgaaatttggcccccaccattggaggtgggcctagtggcagatgtttggtcatggggcagataccttatgaatagattaatgccctgggcagggggttaaaacgagctcttactctgttagttctggagggctgattgtcagaacgagcctggcacctccacccccaccttgcttcctttctttccatgtggtctctgtacacaccagctccctttcacctctgccctgagtggaggcagccagaggccctcaccaaaagcagatgctagcaccacgctccttgcacagcctgcagaaccatgaaccaaattaaatatctcttctttataaattacccagtcttaggtattcctttatagcaacataaaatggactaagacaaggagscacaaatctgcaattctttggctgataaattatcaaatatagctaacctaactagcttcctccgttttgcatatgtctggcctgtctcctggcacctctgctttctcttcatgaagcacccaggtaacccattatccagagctcttactaattctgttcagtgtttgtttcttgctgctggggcaggaggtggagaacaaagggaatgagggaacattgagaaatttctcttcattgtgaccagctagggcaaattgtccttggtcttctaacccagcagcaagtattcattgcgaaaacacacacacacacacacacacacacacacacacacacacacac

SEQ ID NO: 691095 - DNA, 1577 bp, Homo sapiens
gagttaaaagctccgagaagaacatatggaaccctctctgcttctggccctgcccccctgtcggcctcttcacctctccactgtcatctcacmcaacgctcagccacggccaactccttccagcttcttgaacatgatttgttctttcttactgccattcctttgtatatgcctttccttcacctggaagactctatctttgcgtggctaacttctttttattcccaaagcttcagtgcaattctcttcttcctttgagaaaattttcttgattctattcttctgccagccaagatccgatgcctccatcatctaaagtacgagacacatatttcatatttcttttatagttcagttcaatttaaagatgagtacttggctgggaactaggaagaccatgacagtgacacatggctcaggtccaagtggctcactgtggtggtagaggaaacatacaattacgtggatggtgatgtagtttaatgaggtacgtattgggcacagattggactcaaagggctgagtggtcacatggcaccaggtaggcaaggaatggcttttcttgaaagatatttgagctgggacttgaaggattctctgagtgagaagacttacctcaattattttgcattaactttgcatccattgcctccttccccattacttgggaggtgcttaagtaccatgaagtcacacactctggtccttgaaactgtactgtctgcaagagggctgatgtgacagaggaggaagaggagtgatggagggggaggaaacatgaacattgtataactcaagattgaggtagtgtagtctcttgtatcctattctaagtaggctaactcttttcttctgggtatgtggtttaattcaataaactaaatgatttattaaaataagtaataaaaagtatttgagctttttcatttggtttggacttttgtgctctaggaactctgggatagtctgcctggtagtatctgtggaggctaccattgaatcaaggtaacttcccacgtgacatagttctctaatcagagttgtgctttcagaagattttggtagtgggggtgagcaactgctagtccaggcatgatctcaagggatgaatgagagatttgatggctgaaatatttctacaagacttaatagctctttgtagaaggttagaagaaagaggaaagagtgtgaagaattaaagatggtcattttaagaattagtgtcattgggtgggaatgctatttataagtccaaatgaaagccagaagtttggattctggtgtctgccctgcctcactgtagctatgtggccttctacaaattcttcattaaaaaaataacagagctggaccaggtgatctctaaagatccattccagttctcagagtctacgaaaagctattttgcactcctatcctcatcctttagcatgtggtcagcttagggtatttgaaggtgttttaacaagatctagctacagtccgtttactaaaggacaggctgccagtgtgacagcctgttcaaatgctgcttggaaacagaatgagtgctctatgttcagggcactgtggcaggt

SEQ ID NO: 691096 - DNA, 1577 bp, Homo sapiens
gagttaaaagctccgagaagaacatatggaaccctctctgcttctggccctgcccccctgtcggcctcttcacctctccactgtcatctcacccaacgctcagccacggccaactccttccagcttcttgaacatgatttgttctttcttactgccattcctttgtatatgcctttccttcacctggaagactctatctttgcgtggctaacttctttttattcccaaagcttcagtgcaattctcttcttcctttgagaaaattttcttgattctattcttctgccagccaagatccgatgcctccatcatctaaagtacgagacacatatttcatatttcttttatagttcagttcaatttaaagatgagtacttggctgggaactaggaagaccatgacagtgacacatggctcaggtccaagtggctcactgtggtggtagaggaaacatacaattacgtggatggtgatgtagtttaatgaggtacgtattgggcacagattggactcaaagggctgagtggtcacatggcaccaggtaggcaaggaatggcttttcttgaaagatatttgagctgggacttgaaggattctctgagtgagaagacttacctcaattattttgcattaactttgcatccattgcctccttccccattacttgggaggtgcttaagtaccatgaagtcacacactctggtccttgaaactgtactgtctgcaagagggctgatgtgacagaggaggaagaggagtgatggagggggaggaaacatgaacattgtataactcaagattgaggtagtgtagtctcttgtatcctattctaagtaggctaactcttttcttctgggtatgtggtttaattcaataaactaaatgatttattaaaataagtaataaaaagtatttgagctttttcatttggtttggacttttgtgctctaggaactctgggatagtctgcctggtagtatctgtggaggctaccaytgaatcaaggtaacttcccacgtgacatagttctctaatcagagttgtgctttcagaagattttggtagtgggggtgagcaactgctagtccaggcatgatctcaagggatgaatgagagatttgatggctgaaatatttctacaagacttaatagctctttgtagaaggttagaagaaagaggaaagagtgtgaagaattaaagatggtcattttaagaattagtgtcattgggtgggaatgctatttataagtccaaatgaaagccagaagtttggattctggtgtctgccctgcctcactgtagctatgtggccttctacaaattcttcattaaaaaaataacagagctggaccaggtgatctctaaagatccattccagttctcagagtctacgaaaagctattttgcactcctatcctcatcctttagcatgtggtcagcttagggtatttgaaggtgttttaacaagatctagctacagtccgtttactaaaggacaggctgccagtgtgacagcctgttcaaatgctgcttggaaacagaatgagtgctctatgttcagggcactgtggcaggt

SEQ ID NO: 691097 - DNA, 2231 bp, Homo sapiens
gggtggagagatcactgaagcagatcctgacactaaggacatgctgaagcttctgggcttcagcagtctatccaacctgcaggtcactcagcctgcagttgggatgaatttcaaaacgcctcatggagctgtttgaatatttctattctggcataattaaaatttccaataaacctgggacaacaggaaaaaaaaaaaaaggaagcagtctagaattgagattaaatcgtttggactctacaatcagactacttgggctcaaattaccttcctatgaaagtgtatctcatttatctccattttatagatgagaaaactgaggcccctggagttgtattaattttccaagaccgcattgctcataaagggtacagcagggacccaagctcaacactctcaccctcaaacatttccacaagtgtagaccaatggctctcaactggggtggttttgctcacgtaccactcccttgccccacagcatttgaaagcatctggagacatctggggtagccatagctgggagggtagaatggcacctagaggatggagaccagagatgctgctaaccatcctacaatacacaggacgccccccgctcaccaccaccacgaatggtctgaccccaagtgttgtgactgtgccaaagctgagaaacccaagtttctcctcagcaagaagggaaaatacctgcaacgtggatgcacctctacaggagccccaggctgacaataaccttcctgatctggtttcaaccctggatgcttttacctggtgcgtccatcagggatttcagggactccaaagagttattacccttgaatgctcggttccgcctgacaacccagaaatctctgccaaggtgcctggtcttgaggaaggctcagcaagtggttgaggttgataaccaaatacctaggagagacttttctctccctccaggaggagctgtgggtcagacacaccctgggatcattcacaagcggtcaataaaggtttggggagggccaggttttctaggccttctcaatggggtgggtgtttgtggatacacaagaagcctgtgaaacttctgatattggcaggaaatcaatgccccccaccctccaccctccacccccccaacctccccaccataaacacatgccctgcagcaggacttggcactcaggggctcctgggggcccgatttacctgctaaaacatcctctagccaccaccgaataaagccaccccttgccacccaaccacaagagcacagcctgggagccactccaagggacatccagtcacattaaaacctcagccatccagagcaccaggcctggtgatgagaaagaacattttatccttaaaagcatctgaatgcccatgctgcttcttgcagagaaaagtccaaaataatctgctattaaagaacgaggatggttttgacatttttaccaagctaatggtctacgcagacaaaatctcataaaagggcactctgttcttcttgatccactcagacatggcctgtgagtgaagaaacgggctctcctcctcaaagaaatcactgctggtcctcacaccagcctgacactgcttcttgggttcttcaaagagagtattcccatagaaactaaaagggaagaggaatgggtgtggcgggcattgtgggcagcagtgggctttgggacaaattttaagtttgaaaatcaagattccctcttttcgaggggctgccagactgagcagatacagacaccgtgaaaagagggtgccacattcagattcaggaaacaaggatggtttctgttcagttcctgcatcatcsttcaggtcatgcgattcccatttccctcggtggaccaagaaattcagtggggtttctgccttttaaatatttcattatcaatatgtcatccttttagcctccagaaagcattttaacatggagattctggcttaaaacacttgtgggtctgtctctctctctctcttttccttgaaacagggtctcactttgtcacctacactggagtgcagtggcatgatcccagctcactgcagcccgaccttctaggctctagcaatcctcccacctcagcctccaaagtacttgggactacaggcacacaccaccatacctggctttcttttttttttggtagatatgaggcttcaccacgttgcccaggctggtcttaaactcctgggctcaagcgatcctcccccttcggcctctcaaag

SEQ ID NO: 691098 - DNA, 613 bp, Homo sapiens
gacactaaactacagagtaacaataagaaactctgaaaacaggctgggcatggtgcctcatgcctataatcccagcactttggaaggctgaggcgggaggatggcttgagcccaggagaccagcctgggcagcatagggagacctcatccctaaaaataaacaaaaaaatcagccgggaatgatggcacatgcctgtggtcccagctacttgagaagcctgggccctgggaggactgcttgggccctggaggtcgaggctgcaaagagccgtgagcgtcccactgcattccagcctggatgacagggcaagaccctgtctcaaaaaataaaasaaaaagaaaaaaagaaaaagaaactgaaaatgccaaacaataccaaaaaagggggctgggcacggtggctcatgcctgtaatccaacactttgggaggccgagacgggcagatcacaaggtcaggagtttgagaccagcctgaccaacagggtgaaaccccgtctttactaaaaatacaaaaattagccaggtgtggtggtgcgtgcctgtaatcccagctactcaggaggttgaggcaggagaatcacttgaacctgggaggtggaggttccagtaagc

SEQ ID NO: 691099 - DNA, 629 bp, Homo sapiens
tgccagctgcgtcatcaaggaaaggcaaagggtgagggtggagaaatcttgaggtagaaacagaagaggtgtggtcaagccaagggcatgcctgggaaaggaaacagtgaagctagagggtccatttgggtttatgacttggaagcaaaatcagctggcttcagttccataagtaagtacaaygacaaacacagaaaatgaagtgggaaggctgagtgaggtgtgtgataaagacctgataaagttgaaattttgtacagaagtaatgcatggcttaaggttgtgcaggtaatcgtgaagcatgtctttgtttctactctggggctgtggattccaacaaggtccctggaggaagaaacaatggccaacaagggaaaagggagtcagtaaagggacagggatagaacacagaaccactcaaggccaattcatcattaggagacgattaaaaggacaagctggcaaatgcctatatagggctctgccacaggcctgagataatgaatggctgagggtgactccatgggacttcttaaaattaattcagctgtcaaggaagaggcagggtgatgtaagctgtaggagtggggtaatttatgagattttggagagtttttagcttgattttt

SEQ ID NO: 691100 - DNA, 629 bp, Homo sapiens
tgccagctgcgtcatcaaggaaaggcaaagggtgagggtggagaaatcttgaggtagaaacagaagaggtgtggtcaagccaagggcatgcctgggaaaggaaacagtgaagctagagggtccatttgggtttatgacttggaagcaaaatcagctggcttcagttccataagtaagtacaacgacaaacacagaaaatgaagtgggaaggctgagtgaggtgtgtgataaagacctgataaagttgaaattttgtacagaagtaatgcatggcttaaggttgtgcaggtaatcgtgaagcatgtctttgtttctrctctggggctgtggattccaacaaggtccctggaggaagaaacaatggccaacaagggaaaagggagtcagtaaagggacagggatagaacacagaaccactcaaggccaattcatcattaggagacgattaaaaggacaagctggcaaatgcctatatagggctctgccacaggcctgagataatgaatggctgagggtgactccatgggacttcttaaaattaattcagctgtcaaggaagaggcagggtgatgtaagctgtaggagtggggtaatttatgagattttggagagtttttagcttgattttt

SEQ ID NO: 691101 - DNA, 417 bp, Homo sapiens
cttccttccttccttcattccttccttccttccttccttctttcttttcttttctcttttcwtttcttttcttcctgttgttgagacagggtctcactctgttacccaggctggagtgcagtggcacaatcatgccccactgcagcctccatctctcgatctcaagcaatcctcccacctcagcctcccaagtagctaggactacaggcatgtgccaccatgcctcgctaatttttgtagtttttgtagagatggggttttgccattttgcccaagctgttttcttgaactcctaagctcaagcaacctgctcacctcggcctcccaaagtgctgggattacaggtgtgagcaaccatgcccggcctatttctttcttacacgagtctgttgaggttctttgttttttgttttcccc

SEQ ID NO: 691102 - DNA, 1214 bp, Homo sapiens
caacataggcaacaattcatgttctcaatgagtttatcttctagcagaggaaaaagataacaaaataaattttaaaaaaacttctttggcctttgagccatgggttggaaatcagaagatcatgacacatccctgtatgactatgggagtcaatattttcttcctattgaatatcttatttgtgtgtcctcacttaaataataagcttctggagggcaggtcccaatgggcattcagaacatgtgttttatcgactgatggaagatggggactctggagcagttccctccactttgatccactgcagtcatctctgctcctagtgtgactagtgatgtcataaatgcccccacaggccatgggattacatgcagagaataaaggacagtgactcatctctgataagtacacagacataaccagtacataccctagggtagtccttgagagcaatttctcacaggacctagaattgacacatctcccagaaaaatctgtttgttttttctactcaccttcatttcctccaggatctgctttgtggtttcttcttcaaggccaatatttgtaaataaccctgaaatctaaaataccattcaaaaaatcatgaactaagtaaggcacacagacatgaaaacctgggccagtggcagactggggtcccaggctgcagatggtggttactaattcgggccctggatagaagcttggaagaaaagcatctccttctctctgtggaggctgcctgactccatgtgggctagacagacttttctgttcccacagcccatggaagaaagtgcacagtgaggaggggaggacaatgagaaagggaagagagaatggggcagagtgggaggagggataagtcttttccccctctaaagccctttagccctctcaccacaatctgtaatgcccagagaacaattggcarcagcagtgcagagggagcatgcaaactttgccagttgctccttcttctccagtctctgtgattacagagttctggaagataactcttattgataagattcctaagaaacgaggcttgtttccagggcatgctttgctatgtggagaacagcctttccgttaacgtttatgtatatcttttctcattctgaatgtgcctaggacccctcctgcatactcccagcccagcccaccagcctttctcttgtgaagacacaatgttcttagggactcgggga

SEQ ID NO: 691103 - DNA, 2663 bp, Homo sapiens
tacttttcagtactttctccactatagtgccttgcttctagaacagcaaagtggaaaacatcaggttcatacaccacctccatgcccccataccccatacacattgggtttgcttccacacagcctatattttaaactgagtctctctcaagaccagttactcttagtagagagccggaggacttggaccttaggtcttagagggtactgtagctactacattttgaaagaaaaacccaaagcctcccaggtttctaaacctctggagaaagctatcagccattattatgacttcaattaggtgcacacaacagggaaatcaaatacctttgggatactggcatggttcaaagtcagacctcaaagcctgctgtatttgaatgttggggcactctgcagccaatatcaacagcaggtggagagcctgtagtgggggccaaatcagaaatttttcatttttatcattatagcacttttataccttttacatatacaattttaaaggcctgacattgaaatattgttattcaatattgactattgaaataaaattcatgtatttattttctcctctggaggttctcaaagtattggtcctaaggattttctcacataagagggcctcttatttgtgttttaacagtaatattgctatagttttaaaatgctaatgaaaatgtccacactcatataagtcagtatctcatttgctatgttgtattattcatggtagccagttgcccaagtggtctcaatgaggccaaggatatggattcagttctaggagggccagttagcttcactccatttgctgtccaaagactctggccccttcattctggttaaaagtctcatacatctttgttcatttagccataggggaggcaggcttaagctttaacaagctaggacttcccatgcttggagacacagaagctaagaggtcacacttgataaagatagccttcacccatgttactagcaatatattaaattctacacaacactaaatctttctccaatatccatttcagcctcacttcctaactatagcagccatccatttgctgaaaatgcatttcttccattaattgcrctcatggctttggtctgcattgactcaggatttgcctaaggaacatataaaagggaatgatgcaaagaactgtagagttgagggaactgactctgctagctaccatcttttaaaatatctcaccatatacacaagtactattatatactgactgaagatttatttgtttttcattagcaaaaagaaaaaaaaacacttttctctgctttttgttcaggtgttccaaggcaagaagttattttcaccagggaagcctgtgaacagaaagagctcctgagactacacctgcttttaatttggtgtcagtaggaacgatggtatacacattttacaaaagtcattttttaatgttaagaaaaaattatcaattgtttccaagatctttataataagctactaaattggtatactaatatagctttgtcctaaaacttggaagccataccaaaaatccttgattcagattcctttctaaaatagacaggaaacaggtacaaaaaaaaatctttctttttctgatgatatgtgcattatcttgtttataaaagccacggacatcgcaactgcttaacacaggcaaggatccacttactgataccttcctgaagctgaacacatggaaatgtcgtcgttgccactgcctcctccttctccgcctcttcctcttcttcttcctcctttctttttcctctttttctccttcctctactccttctttttcaccttctccttctttttccttttgatgttttaagattggaggattacattataaggcaaaagttaatatgccattctggcgaaaggctccggaaactaaataaagagggggctttctcccagcggggctggggcagcctctgaggcacagcaaagatagaggcaagctgagcacacttgcagaagcctaggaggcagatcttttgcaaggtgccgtccattgaactaattcatcttcaaggagtctccagttggaaagggttgttaaagcaatagattaagccaccagcattatagtagtttatttgcatttccctgcaggtcagcctctgtttaacagtaaatttatactgtaatcattgtgtattagacattagaaattagacatttgacattagaaacactagagtttgagtcctgggcaaaagtctaccatttgtatgattctgagcaaataatttaaactctcaaagcctgttttcattttatgaaaatacccacttttgtgtgtattttaaagattaaatgactgggtgattagaatgtttagcagaatgtctggtaaaactgctcagcacaaaacacctagatattccttgcagatcagtccctgtcctcctttgtgttggtttccaacgcctgcctttccggtctatttgtattcttgcctctcttaaagttctattcttattcgacttttatgaggcctttactcacacaaaaagagacacaatgtttctgatttcagcaaacgatttcctgccccaataagcaaaacattccgggcagatctcatgtgttgcaagttaatggtgaacaccaacactgcttttctgtgtttgtttcc

SEQ ID NO: 691104 - DNA, 1920 bp, Homo sapiens
aatatgtgaaggttgcagtccaagtcatgcttttaactcaaccacatcctgtgcttgactcccagctgtttgggaggtggtaactttgactgtcccctgggctttgctctggtctctggctgtgctaagtgcatgccacttgttcatatcctggtgaggcctgtggaatacacataagagggcaaataactcacaaagctggaagaggctcccggatctagtctgaactgcccaattaaatgcagattagaaggcaggtttattgaggttttgaagtaaaggagagttagggttaacctttatctagcccacaggttaggtataatatgtcactgggcaggatgtgaccctttgcccagacttctttatcaccatatgacatggtacatggaattcctgacattcaagatactcttttggattaaggttttatctccaaggcatttgccttggatattgtctgggggtgggaggagtgaatttagatgttactatacatcctcttggattatgacattctctatggatgaaactttggtctggtaatatggcatttgggatataaagaattaccactaaggcactggcagattccactcacagtaggttaccctgtatcttctggggaaatgggggaaggaagggtactctaaaaaagtggcatcttaaggataaggagtaggagcacagagtccaaacatcactaatgtcgccatttttatcccaatcttattttgtagatgctaatatcttagataaaactcagtgctttctatcaatagaggaggggttctaatgttaaatgtttctttctttaccgcctacctttcttcatctttggtgcttgtcaacatctagcaagctgtgtatgacactgatttatcctgtttgtctctctcctactttgcaagcgttcaggggccagaagttttgttcttttctttgctgtgttcttgctactaaggatggtgcttagcatatagtaggtctctgtaaagagttgttgaaagagttagtaaatcctcatctgctgcccctccagcccaggtgctcacctcactcaactctctgctaagttcccctctctgtgcactcatggttggtgagactgaagtatgtgttgacacaaagttaaaaacccaaccgcattatggaatgatccactggggatctggggactaatgtctcagtttctgatctcagtggcttataggatgccagcttgtgaagactgagaaatcaggatggcatggacatcacatatgcatttgcctgattctcaggactaaacacacatatgggatatttctagattcttctaaaaatggaaaatagatataggacaattctatatttatgggacatacgtctgctctacatattattgataccagtttgatgactgttcatatttttgtatttctttgtgcttgcaaactgatgcttgtttgagaaactgaaggttatttgatgtcagtgtaccttggacaacatttctgtgtgcttttaaatcctatagtcygtaccagatacaaaccagtaaccactctataggacccctttactcccatgagattctggagcaccatcaacagcagataccagccccctccactggcatgtgtacttgccgattaggagcataaacccagccatcactcatatctaaagatgaagggaagacattttattgacagttgaagttattgaatggtccaagattaatttttgtttggctttgaaatgtactttactactttcatgttgcttagcttgtttctacttttatattactcctgtttccttctagtcctcatcttcctttagaatctacagcttcttctgagccttctgatatttctcctttagggtcctgaattcccataggattatgatgaggtttcttttcttttcctttct

SEQ ID NO: 691105 - DNA, 1020 bp, Homo sapiens
cacacgttggggatctgtagatgctgattggagggatttgagaaggggagaggttgggggttgggggaaactatgagtggcagtaaatcatttttcatcttatctgtagtttgtttttatctatgtcactgctcctttccattaacaaagctaattgagaactgactattgcaaacttttattacagaaggccagagacagaaaaacacctccagaaaaaatcagaaattattcaatcgtctgttctaagcatggtcagtttcaggaccgaatgatcaagtttcagaaacgtttctttcctgttttttaatttttaatttaaattagaggattttttaagtttaatccacagagcaaaacatatgctttccatagaattcttttcagcaatgccttgcaagacacaggttagaagtaaaatcgaacaatttccctaatattttatttcctaaagagtacctttcatttctgaactctattcgtgtgtccagatctaaactgtggtgttttaattgcctaggaacctcctctcaaatgctggggctggacttgggtattattggattcattgagactcactgcccagctctctaaggagtttctctccctgttctgtctgtcatgccccaatctcctcacctggaaatgtgaaaattatagggagtcttgtctcttaatactaacttttaaaatttaaaaaatcaaagatattrttatccacttattgatcccttactatgcctcagaccctctgctaacacaggtccctcttttagccctcacaaccccccacccccaacctcccactccatgaggcaggtgccattgttccagttctcagatgaaagaatgaatcagtgtgcctaaggtcactcagttgtaagtggtggggcagggattcttaggtctcccggaacccatgacccgtgcccttaaccactatctggtgcacacaccttgccccgcccccctatctcatcacttagaatattaggctattctttaaaatacgtccatggg

SEQ ID NO: 691106 - DNA, 608 bp, Homo sapiens
attagccacacagcagttaaaaggaatgcaataggcctgtatgtactgccattgaaagacttccaagacagatttttaaacaaataaggaaagttgaagaaaaatgtgtatgacatgacactattcatgtaaaagatataaccatataattatatatttatggatacatatatcttttaaatacacttaaaaatgtccagaaaggtatatgccagaaattatagtggttaacctccagggacaggaatgaaattagggcagtggtgatggtgatggtggggtgggattggtagtcaagaacgccattgtattttctggcattattatgtattatttggcataagcacaacataatttgtaacaaaagcaaaaacagactaatgggtttgaatttaactaaaaagattctgcatagcaaaggaaacaacagattgaaaagacaatctattgaatgggagaaaatatttgcagaacatataactgataagargttaatatccaaaatatataagcaactcaaacaattcaattgcaaaaaaaaccaaataacctaactaaaaaatggacaaaggatctgaataaacatttttccaaagaagacatacaaa

SEQ ID NO: 691107 - DNA, 1437 bp, Homo sapiens
  misc_feature 3, 4, 5, 6, 7, 8, 9, 10, 11, 12, 13, 14, 15, 16, 17, 18,19, 20, 21, 22, 23, 24, 25, 26, 27, 28, 29, 30, 31, 32,33, 34, 35, 36, 37, 38, 39, 40, 41, 42, 43, 44, 45, 46,47, 48, 49, 50, 51, 52, 53, 54, 55, 56, 57, 58, 59, 60,61, 62: n = A,T,C or G
  misc_feature 63, 64, 65, 66, 67, 68, 69, 70, 71, 72, 73, 74, 75, 76, 77,78, 79, 80, 81, 82, 83, 84, 85, 86, 87, 88, 89, 90, 91,92, 93, 94, 95, 96, 97, 98, 99, 100, 101, 102: n = A,T,C or G
ccnnnnnnnnnnnnnnnnnnnnnnnnnnnnnnnnnnnnnnnnnnnnnnnnnnnnnnnnnnnnnnnnnnnnnnnnnnnnnnnnnnnnnnnnnnnnnnnnnnnntaacttgctttgggtttgtagagaatgtcaattaaatttgaataagaaatctaatagatgaatttgtaagtcaatagacagttaatctattaagcaaagataataattcatatttgggaaacaattactgagcatctcccatctgccaggcatattttaagatattagtaaaacatatttcttgtttattgctgaataatactccattttgcatgtgtgtgtgtgtgtgtgtgtgtgtgtgtgtgtgtgtgtacaatgcattttcttacctcttctttatccattcagccattgatggacatttaggttgtttgtacaaacactttagttcacaaaatgctttcacatgtattatcacatttggctttcacaaagactggtattgtctccattttacaaatgataatatagagtcaaaaggattatatgactcacctaaaactaaagccaagagtttayatataaaactcctgggttcaagatatatatatatatatcttcatatatatcatcttaatgctggcactacacatatattttctatacaatatacacatatgtatataaatatacatatactacacctatgtatttataaataaagtatacatacaaatgaataaatatataaccatatatatttatatattacttttatataaccatttataatttacatatttataaatacaaacatgcaaacatagcacatactctacatataaacatttattcatatgtttataaatatatgtatatattaatataatactacatattttacatatataatcttaatgctggcagtacaatttcttctatagcagtaaccaggaaaatagtcttgagaagtctgctgggtgagggcaggatggaaggaagcaagaaaaaaagagaaaataaagctgttctgcataaaaaaccaatagccacttgcagaagagatgacagaatagagataatagctaggcaatatgagcaagcagataaaggttcttcagaaataggaatctcttttaaaaattaaaaattttaaagatttttggcaaacctcctccaatttcctaaaatctttttttgtttgtttgtttgagactgtgtcttgctctattgcccaggctggagtgcactggcatgatcttggctcactgcaacctccccttccagggctcaagtgattctcctgcctcagcctcctgagtagctgggaccacaggcacacgccaccattcctggctaatatttttggtattttttgtagagacagcgtttcgccacgttacccaggctggtctcgaagtcctgggttcaagccagcagcccacctcagcctcc

SEQ ID NO: 691108 - DNA, 1437 bp, Homo sapiens
  misc_feature 3, 4, 5, 6, 7, 8, 9, 10, 11, 12, 13, 14, 15, 16, 17, 18,19, 20, 21, 22, 23, 24, 25, 26, 27, 28, 29, 30, 31, 32,33, 34, 35, 36, 37, 38, 39, 40, 41, 42, 43, 44, 45, 46,47, 48, 49, 50, 51, 52, 53, 54, 55, 56, 57, 58, 59, 60,61, 62: n = A,T,C or G
  misc_feature 63, 64, 65, 66, 67, 68, 69, 70, 71, 72, 73, 74, 75, 76, 77,78, 79, 80, 81, 82, 83, 84, 85, 86, 87, 88, 89, 90, 91,92, 93, 94, 95, 96, 97, 98, 99, 100, 101, 102: n = A,T,C or G
ccnnnnnnnnnnnnnnnnnnnnnnnnnnnnnnnnnnnnnnnnnnnnnnnnnnnnnnnnnnnnnnnnnnnnnnnnnnnnnnnnnnnnnnnnnnnnnnnnnnnntaacttgctttgggtttgtagagaatgtcaattaaatttgaataagaaatctaatagatgaatttgtaagtcaatagacagttaatctattaagcaaagataataattcatatttgggaaacaattactgagcatctcccatctgccaggcatattttaagatattagtaaaacatatttcttgtttattgctgaataatactccattttgcatgtgtgtgtgtgtgtgtgtgtgtgtgtgtgtgtgtgtgtacaatgcattttcttacctcttctttatccattcagccattgatggacatttaggttgtttgtacaaacactttagttcacaaaatgctttcacatgtattatcacatttggctttcacaaagactggtattgtctccattttacaaatgataatatagagtcaaaaggattatatgactcacctaaaactaaagccaagagtttatatataaaactcctgggttcaagatatatatatatatatcttcatatatatcatcttaatgctggcactacacatatattttctatacaatatacacatatgtatataaatatacatatactacacctatgtatttataartaaagtatacatacaaatgaataaatatataaccatatatatttatatattacttttatataaccatttataatttacatatttataaatacaaacatgcaaacatagcacatactctacatataaacatttattcatatgtttataaatatatgtatatattaatataatactacatattttacatatataatcttaatgctggcagtacaatttcttctatagcagtaaccaggaaaatagtcttgagaagtctgctgggtgagggcaggatggaaggaagcaagaaaaaaagagaaaataaagctgttctgcataaaaaaccaatagccacttgcagaagagatgacagaatagagataatagctaggcaatatgagcaagcagataaaggttcttcagaaataggaatctcttttaaaaattaaaaattttaaagatttttggcaaacctcctccaatttcctaaaatctttttttgtttgtttgtttgagactgtgtcttgctctattgcccaggctggagtgcactggcatgatcttggctcactgcaacctccccttccagggctcaagtgattctcctgcctcagcctcctgagtagctgggaccacaggcacacgccaccattcctggctaatatttttggtattttttgtagagacagcgtttcgccacgttacccaggctggtctcgaagtcctgggttcaagccagcagcccacctcagcctcc

SEQ ID NO: 691109 - DNA, 2062 bp, Homo sapiens
cggtggctcacgcctgtaatcccagcactttgggaggctgaggcgagcagatcatgaggtcaggaggtcgagaccagcctggccaatatggtgaaaccccatctctactaaaaaaaaaaaaaatatgaaaattagccaggcatggtggcatgcacctgtaagtcccagctacttgggaggctgaggcaggagaatcacttgaatctgggaggcagaggttacagtgagcagagatcrcgccactgcactccagcctgggcgacagcatgagactccatctcaaaaaaaaaaaacaaaaaaacgttcagttgatatgaaaaggaatcttgctccaatttaacaagaattactgccagggttgttaagaggaaatagctgcttgaataagctgataactggaatgcttttcatccaaatttatgttaaaactctatgacatgtcttctagactctttagttccaacaggtcactttgcctaagatttgggcaactgccaccttgtggccaggactgccctgtggattaggaggggccagcttgggcttctggctttgttgccagcggatgtccaagatcacttttctattgctaataaaatgactacagcttaaagcttctatacagtggaataacttagaaatccaatctgtttttttcaagatttgaagccatagaaaacttttaagtaagatatagtagagggttttgttttgtttttatatgtagagctaataaatgctatttagtcttggactgtgaacttattctaaacctttccttcaagctaaacttgtgggattttacttgctctggtctccagtcctaaaaagaaaccagctgtatcctgtagttggccacctgtcctgaatttgagagagtcagttccaaggacaagcctggggtctctgtcagcctcattctaggcaggaggaatgttttccttggtgtgcctggtaacctcactgctgacgattgctccctcttttactgacatttgtgtaattaatacttcatttacatagaaaggaatttctctaattaaatgttacatttcattaatctagaattctggtgaaaattatattttaacaagactttgtgactcccagcctcttttaaaaatcgtctgtatctttaatggggcttggccctttttttcttctgagatgttagaatgtatctgtaatagatgacaacagtttttatgcagctacccagtggtttaatcacaatgcaaaaacaacactgctaatctgaacaatctacatggatgacaactcattgaaataactatcaattaacaacataattgtcagttataagttgccaacattaaaataagcaattgttacttctatgaggcttttgtgcttttttttctccccctctgcagggtgtggatatagggcaggggcctgggttgaaaagcttaaactgatgaccaagttacttgttgttttaatcactggatcctcttccttatagtttactctgaagtgaaaatagtggtactagtcataaaattccactccaggcttggcaggtcaacctggccttggttttgaaatctctgtagcatcaaatgtgatgccaggtctctattccctttaatcagggcctgctgtagacagagcatgacatgtgagttctctcctattctgttcgatcaagatcatgtcaaagaaaacccagcctctgtgtgaaggcagagtccacttttgctagagcagctgaaaagaatttaacccagtactgtcaggataatggcctcaatgtctcctctctacacgatttcagctgagagaccccgcaccccaagcatctgtgggtgagtgagcaaaacgtgtagcagaaaaagactcaggacttggtggaggagggcactgtgaaagtcaaaattgccacaaccaccttttgtgtttctctctctctcacttggtagaagacaggtagccaggtggacccaggttcctggtcatacaggaacaccttcaggaggaactacctcaaggtaggactccagcttgtgcttgggcacacaacacttcaaggtgcaaaatc

SEQ ID NO: 691110 - DNA, 2062 bp, Homo sapiens
cggtggctcacgcctgtaatcccagcactttgggaggctgaggcgagcagatcatgaggtcaggaggtcgagaccagcctggccaatatggtgaaaccccatctctactaaaaaaaaaaaaaatatgaaaattagccaggcatggtggcatgcacctgtaagtcccagctacttgggaggctgaggcaggagaatcacttgaatctgggaggcagaggttacagtgagcagagatcgcgccactgcactccagccygggcgacagcatgagactccatctcaaaaaaaaaaaacaaaaaaacgttcagttgatatgaaaaggaatcttgctccaatttaacaagaattactgccagggttgttaagaggaaatagctgcttgaataagctgataactggaatgcttttcatccaaatttatgttaaaactctatgacatgtcttctagactctttagttccaacaggtcactttgcctaagatttgggcaactgccaccttgtggccaggactgccctgtggattaggaggggccagcttgggcttctggctttgttgccagcggatgtccaagatcacttttctattgctaataaaatgactacagcttaaagcttctatacagtggaataacttagaaatccaatctgtttttttcaagatttgaagccatagaaaacttttaagtaagatatagtagagggttttgttttgtttttatatgtagagctaataaatgctatttagtcttggactgtgaacttattctaaacctttccttcaagctaaacttgtgggattttacttgctctggtctccagtcctaaaaagaaaccagctgtatcctgtagttggccacctgtcctgaatttgagagagtcagttccaaggacaagcctggggtctctgtcagcctcattctaggcaggaggaatgttttccttggtgtgcctggtaacctcactgctgacgattgctccctcttttactgacatttgtgtaattaatacttcatttacatagaaaggaatttctctaattaaatgttacatttcattaatctagaattctggtgaaaattatattttaacaagactttgtgactcccagcctcttttaaaaatcgtctgtatctttaatggggcttggccctttttttcttctgagatgttagaatgtatctgtaatagatgacaacagtttttatgcagctacccagtggtttaatcacaatgcaaaaacaacactgctaatctgaacaatctacatggatgacaactcattgaaataactatcaattaacaacataattgtcagttataagttgccaacattaaaataagcaattgttacttctatgaggcttttgtgcttttttttctccccctctgcagggtgtggatatagggcaggggcctgggttgaaaagcttaaactgatgaccaagttacttgttgttttaatcactggatcctcttccttatagtttactctgaagtgaaaatagtggtactagtcataaaattccactccaggcttggcaggtcaacctggccttggttttgaaatctctgtagcatcaaatgtgatgccaggtctctattccctttaatcagggcctgctgtagacagagcatgacatgtgagttctctcctattctgttcgatcaagatcatgtcaaagaaaacccagcctctgtgtgaaggcagagtccacttttgctagagcagctgaaaagaatttaacccagtactgtcaggataatggcctcaatgtctcctctctacacgatttcagctgagagaccccgcaccccaagcatctgtgggtgagtgagcaaaacgtgtagcagaaaaagactcaggacttggtggaggagggcactgtgaaagtcaaaattgccacaaccaccttttgtgtttctctctctctcacttggtagaagacaggtagccaggtggacccaggttcctggtcatacaggaacaccttcaggaggaactacctcaaggtaggactccagcttgtgcttgggcacacaacacttcaaggtgcaaaatc

SEQ ID NO: 691111 - DNA, 2062 bp, Homo sapiens
cggtggctcacgcctgtaatcccagcactttgggaggctgaggcgagcagatcatgaggtcaggaggtcgagaccagcctggccaatatggtgaaaccccatctctactaaaaaaaaaaaaaatatgaaaattagccaggcatggtggcatgcacctgtaagtcccagctacttgggaggctgaggcaggagaatcacttgaatctgggaggcagaggttacagtgagcagagatcgcgccactgcactccagcctgggcgacagcatgagactccatctcaaaaaaaaaaaacaaaaaaacgttcagttgatatgaaaaggaatcttgctccaatttaacaagaattactgccagggttgttaagaggaaatagctgcttgaataagctgataactggaatgcttttcatccaaatttatgttaaaactctatgacatgtcttctagactctttagttccaacaggtcactttgcctaagatttgggcaactgccaccttgtggccaggactgccctgtggattaggaggggccagcttgggcttctggctttgttgccagcggatgtccaagatcacttttctattgctaataaaatgactacagcttaaagcttctatacagtggaataacttagaaatccaatctgtttttttcaagatttgaagccatagaaaacttttaagtaagatatagtagagggttttgttttgtttttatatgtagagctaataaatgctatttagtcttggactgtgaacttattctaaacctttccttcaagctaaacttgtgggattttacttgctctggtctccagtcctaaaaagaaaccagctgtatcctgtagttggccacctgtcctgaatttgagagagtcagttccaaggacaagcctggggtctctgtcagcctcattctaggcaggaggaatgttttccttggtgtgcctggtaacctcactgctgacgattgctccctcttttactgacatttgtgtaattaatacttcatttacatagaaaggaatttctctaattaaatgttacatttcattaatctagaattctggtgaaaattatattttaacaagactttgtgactcccagcctcttttaaaaatcgtctgtatctttaatggggcttggccctttttttcttctgagatgttagaatgtatctgtaatagatgacaacagtttttatgcagctacccagtggtttaatcacaatgcaaaaacaacactgctaatctgaacratctacatggatgacaactcattgaaataactatcaattaacaacataattgtcagttataagttgccaacattaaaataagcaattgttacttctatgaggcttttgtgcttttttttctccccctctgcagggtgtggatatagggcaggggcctgggttgaaaagcttaaactgatgaccaagttacttgttgttttaatcactggatcctcttccttatagtttactctgaagtgaaaatagtggtactagtcataaaattccactccaggcttggcaggtcaacctggccttggttttgaaatctctgtagcatcaaatgtgatgccaggtctctattccctttaatcagggcctgctgtagacagagcatgacatgtgagttctctcctattctgttcgatcaagatcatgtcaaagaaaacccagcctctgtgtgaaggcagagtccacttttgctagagcagctgaaaagaatttaacccagtactgtcaggataatggcctcaatgtctcctctctacacgatttcagctgagagaccccgcaccccaagcatctgtgggtgagtgagcaaaacgtgtagcagaaaaagactcaggacttggtggaggagggcactgtgaaagtcaaaattgccacaaccaccttttgtgtttctctctctctcacttggtagaagacaggtagccaggtggacccaggttcctggtcatacaggaacaccttcaggaggaactacctcaaggtaggactccagcttgtgcttgggcacacaacacttcaaggtgcaaaatc

SEQ ID NO: 691112 - DNA, 1022 bp, Homo sapiens
  misc_feature 166: n = A,T,C or G
aggccactgcctgctccctctcgacagggaaaagcaaggtaacttgtaagattgggggaaggtcaaaaactgggaggaaatctacctctaaccttatgctacatgccgtcctagttttgccctctggagaaacttggaactgactgattttccacacaaccacctntggttgacaaccaccatctcctctgcaggccaagcctcacagctcttaggagtaatccttgcagggtctagttcccctccactccagccacactccccaagcacctgctggcttgcttttattcaccggagaaggtgggctcagaatggacacatctcaagtgtccaagctggctagaagcaccagctgatctctctccctcattttagtcctttctgaggctcaccatggagatgtggtctgatgccagtgtgagtaatagaggtcttagaataatcatcattactaccagccctgacatttctatagaacttcttgacattttcaaagtactttccctttgttcaggtgcaattatcctgccaacgcagcatctcggcaccagagtatctcttaagcactaggtatgcttattctgtgcctgggagccaaatgtgcagacattgttccaaaatgaatwtttgcatgcatggatgcacgcttggatctacacacatgcacatctctctgtgctgggcatgcagcgatccctgcccctaagctggccacatggtgaagtgacaaccaacagtccaggccactacgtggagtttgacctgtggactggaagacgcacacatgcagacatgttcccccagctctgctggtggtgcagcagagaggaccagctgcctctttggccatggaggcagagccagcattcacaggaagaggaaggaagctgctgcggcatcacacgcctgctgcctcccgtgccttccaaggaacacaggaggcagctggttggaaggcagcaagaggagaggcagggaagataggagcttgctgctgagagagcagggtgagtccacattgg

SEQ ID NO: 691113 - DNA, 642 bp, Homo sapiens
tgtgataattttagacagccagcaaaaccaaaagcattttacagcgaacctctatgtactcctgacctatactctgccataaacattctactatacttaccttattacatatctctctcttcaatgctacatccatccatcagtctcattttatatcagtacttttctccctaaatacaccatcacatgtattattaaatagatttgaatgttgtttatagattttttcttttcttataaaatttacaaaataaaatgaacaaatctcaagtgtacattcactgacgcttaacacatgcacatacttgtgtaactcaaactcacgtcaatacatagaaacttaccatcaccatagaaagttttctcatgctcttttctcatcacgccaccctcaaccccaagaggcaaactttcttctaattttatgcttctctagattagttttccttgttctagaattttaaataaataaaatcagacagtatagtatcttatgcaaggcctctgtatagttagttgtatgagtcaacttggctaggtcatagtacacagttgttcactcaaacaccaatatggatgttgctgtgaaggtattttgtgtatatgtktatcacctacagtcaattgactctaagtaaaaca

SEQ ID NO: 691114 - DNA, 1966 bp, Homo sapiens
ggcattattacggaaaatagatgactctcacaaacatgtattattgaaggggaacacagtagacccaaaatagtatatattatgattttatttatatagagtcaaaatgtggcaaaactaggaaagtgggattgggctttggagaaggcacaagtgatgatttctggtgctggaaatgtattttttcatctaagtggtggaaacacaggtgttaacacttagtgaaaagtcatcaaggcataccctttttagtgtgtatggttatttaataaaaatttgcaattatgtaaaatatacaataaaaaaggaaaggttgagagccaggagaagtgacacatgcctatagctctagctacttgagagcctgaggaggaaggatcacttcaggccaggagtagttcaagtcctgcctgggcaacatagagagaccccatctctaacacaaataaataaataaataaataaatgttgacgaaatcggggggtggtaagataatgaaagtagaaaagtagagaaaatgtcagcatacaatgtgtatatggtgagatctgcatcagtgtctgtacctgactcacaagttcattgtgggcttcctagcacatctttccttactttcccaaactgctctaaccaacaatgtcctcaataacatccctttgatacaggatgtatctactataatgttctacagtgaaggctgttgccatcacaaccagtggcagtgtagtaaaaataattcaacgagatgctaaaacatgctgtttggtcttttagaatattcagagtaatatagattacacgtctttcagataatcttctatggatgttaactactttgattggactttctctaacaaatgaatggcaacagtttgaggtcacactttccagtaaaagcctatagtgcagataatctatgtttccaattaagagcaagtctatagatttccaatcattctaaaacagggtaaggtttacccataataaggaaaatgaaggcacttacctggcacatttggctgacaagttggccacagtgattctgaacagaggttgctcaaaggaayccattggggcttaggtccacattttgcttaggaaacagatttggctctactataacatggaaataaatgggtagccaaggctcaatgttctactctattaagaatcactggaaaatttttaaagcagatattagtaatcactcaccagagccataaagaactcatcacagggcaacttcctggtgatctcactgaggtaaattaattgcaaaatatacttcattgatagctgcaagatttgacctgatgaataaaatggtcgaaggtgagtcaagtaaacagtgggagacttctgccatgaaaaattattttggtttcagaaacttgtgatgttattacagaaaatagagtatgtgatcaatgccttatctggcaggccttagtatgccactgcataatcatgcctttatcaaagagaaaaatatttatcattatattctcagtggcagaaaggtatatgtctatttaatcaagaaatatcaagtcattaatgtacaatttccaaaggaggaaagttaaaaatgaaacgtatttctagtttttatgctgcttaaattgtcatcaaagtactgttactctctgcggcattaggatgcatttttagattaggattaaaagtgagtttatactgctaattccatgtccaaagtctcaatgggcttttgttcatatttacctatgaactaatacaacaaacaaacaaacaaaaaagccaagatccaataaaagcaactaggttgtatctttaaacaatttttactcaggtatttagtgtatgatatagatagagtataaatgtaatggttgacttgatcatatcttgagaaatgcactaagttaaacatttgtcttgggtgatataaattcagttcagtaacccatatcaacctggttatgc

SEQ ID NO: 691115 - DNA, 516 bp, Homo sapiens
atatcatttttctagaagaaaagtactcatttctgagttagtattcacatatatttttaaatctgtgattttttattttacctcaagctagatccgtctcccaagaatctctttatagatgctgtgtgacagctttaaaggtgttatggtggcaattaactaactcagaagttaaaataataccaaccctttcctaaatccttgtatttgaatgttaattaagcaattagatgcacaagggayaattgccagatgatgcctcctggtagagttaagttagcagacaaaaatgatgaattctattaatactgtgtccaaattaaaaaaaaatctcaagcagcctaaaataaaaaccaaagcaacaacacaaaagcaatctgagaaataagagatttttagtttgtgggaaggggtcttttttgattgttatgggagtgccggtgaatgcttgtaatgaaacataaacaagagctagtcatgcaagcttttcacttgtgaatcaattcaattaactgc

SEQ ID NO: 691116 - DNA, 651 bp, Homo sapiens
gctgtgttttttttttcaacaacagcaaactgctggatggatattgccagaaattaattgatcaagaaaagctcctagaaatcttttttttttttttttttccaaaacgtaccttttgtgacagcttcaaacttgatctctgagctccagtgaagcacaaattactgtgtggcattttatctcacaaattagagaaggtcctaaatagcatgctgtgcctttcttaaaatgctgtccccaatacaggtttttttttttaatcttctttgaaatttctcatattgcattgggttcttcacccaagggaaatgacatttttagttaaaaagtawtaaagtataattaaaacataaataatttaaaaagattttgatataagcctgaaaatgggcatgtgaataaatttgcaccatgtcccaggaagtatattggtagacatatttgggaaggaggaattcactgcctggaggggtccagacgtaagggctagtaccccaagttctccaagtactcccttgaggtttccagataaactgcttttttagtcaaagagcctctacagaaagcctgctgctgcattgcctcatggagaagagagagccccaccacttctagtcagctgcaaaagccaggagtcccaccacttctagt

SEQ ID NO: 691117 - DNA, 656 bp, Homo sapiens
cacacacacacacacacaaacttgtacaaagctataccaaattgcagaaagtatagaacaccatacacaacatatacgtgttatgaacaaattttataaatgagactagaaataagggaaagaaatgtctcaaataaaatttgaatcaacacatttgtatcagagatttctcagtcatctttaggaggacaaataccggacagatccctggtacttgattttaggataaatgattttattaacatatttttaagaaagaatgccactcagaggactgttcaggttgcagcaacacaacaccaccaatgatgatactgatattaggaarccttactaagctcttgctatgtaccaggcatcttcacatattgttcctttttcctcttacaatgacctttagttaggtatttgggaagatgacagaactcaaattctatacctaggcagtgtggctcatgatactatacaacaatttatgacagagtcatagaggtatatatcagcttgctcaactaatatagtcctagaaagactgtctgcaggtcacaggaaattacttacttagttgtatcaatgaaaaatacaaaaattactaccatttatttagcattttctagttgctagggactgtgttaattttttatgcatattacttt

SEQ ID NO: 691118 - DNA, 656 bp, Homo sapiens
cacacacacacacacacaaacttgtacaaagctataccaaattgcagaaagtatagaacaccatacacaacatatacgtgttatgaacaaattttataaatgagactagaaataagggaaagaaatgtctcaaataaaatttgaatcaacacatttgtatcagagatttctcagtcatctttaggaggacaaataccggacagatccctggtacttgattttaggataaatgattttattaacatatttttaagaaagaatgccactcagaggactgttcaggttgcagcaacacaacaccaccaatgatgatactgatattaggaagccttactaagctcttgctatgtaccaggcatcttcacatattgttcctttttcytcttacaatgacctttagttaggtatttgggaagatgacagaactcaaattctatacctaggcagtgtggctcatgatactatacaacaatttatgacagagtcatagaggtatatatcagcttgctcaactaatatagtcctagaaagactgtctgcaggtcacaggaaattacttacttagttgtatcaatgaaaaatacaaaaattactaccatttatttagcattttctagttgctagggactgtgttaattttttatgcatattacttt

SEQ ID NO: 691119 - DNA, 3377 bp, Homo sapiens
  misc_feature 722, 723, 724, 725, 726, 727, 728, 729, 730, 731, 732, 733,734, 735, 736, 737, 738, 739, 740, 741, 742, 743, 744, 745,746, 747, 748, 749, 750, 751, 752, 753, 754, 755, 756, 757,758, 759, 760, 761, 762, 763, 764, 765, 766, 767, 768: n = A,T,C or G
  misc_feature 769, 770, 771, 772, 773, 774, 775, 776, 777, 778, 779, 780,781, 782, 783, 784, 785, 786, 787, 788, 789, 790, 791, 792,793, 794, 795, 796, 797, 798, 799, 800, 801, 802, 803, 804,805, 806, 807, 808, 809, 810, 811, 812, 813, 814, 815: n = A,T,C or G
  misc_feature 816, 817, 818, 819, 820, 821: n = A,T,C or G
tattatagaagaacattaccaaataattcatcaggtttttacaattatgtaagccaaaaagagcaactataaaatggaaatttaacctctaccaggtatccaagcatgtatatttctctcccagcttaaagactttgtagtgatgaaaatgtagacaaattgattgggttagaaagataatcatctggtgcagaagtaattgctataagttaactaatttagagggctcttgtggagaagtgatagctggaggctacaaaaactggcttctcaaagttctattgcacacaaataattacttcaagaaacaaatgaagtgttatttattggcagtaggacctggatccttggtgatcaccagtgaaaaaggaaactgaaattaatttgtactaagcaaaattgcattcaatccagcaaagctgttctgtgaatttcagttggtatttaggcaagttattattgcctcaggcctattgaacactgcagccagtgcttagccatttttttgcaagagttttctagttgggtatttcatttttgctatgcattcatctataacatatgatgagagttattatctgtgatggaaagtaatgatactatcagttggagggaaatgtttaaaacttacataaccccttattaaaattctaaatcaaccaaatttatcttatgccttaagaaaatcatttattaggagctttaagttatttatttctatnnnnnnnnnnnnnnnnnnnnnnnnnnnnnnnnnnnnnnnnnnnnnnnnnnnnnnnnnnnnnnnnnnnnnnnnnnnnnnnnnnnnnnnnnnnnnnnnnnnnttttatattgttgtgatcataagaacttgagtaaattccctcagaaaaatggcttatctcttctataatgcattgcactcttaccttttatctacattattattatttttatttatttgtatgcatttctctttacaatggaagacttttcatattggttcactcactgccatggtaactagcaaaatttttagatagaataagtactcaataaacattggtacaaaaatttccttggattatctcattttactgcctccaatactaatagacaagaggccaaattgagcttaatgcaaaccatttttgggtgctcagagttcctcagtgctttaaggaaaatctcaaatgtagttaccactttgctttaactgccagacagtccttacagtttgctgcatattgaacaaaacacttattctccaggaaatgcgaaagcaagtggattttaataacaatcatattttgcttgtttattaatatatacttttaatcacttttcatcctcaaaacgactcagagagtcacacatcattttgcaaatgaacaaaaataagggaaatatttttccaaagtcatgaagttggtccacagtggacccaggatgggaaaaataatgttctatgcctaattcactctgtcttctcttttgccatatttccatcattttattatttagcagggaggtctatcacacctattatcaaaggtgagcgttttgctaagtgctggtaccacaaggacatagatcagattctgttctaattctttcatatgtaagccaaagtggacgcatgtgacaagcataggctgttatttgtggtacaataaagttactaacatattgttataagactaaaagcattggtggattattttgccttgaaaatcagaagagctctcacaaagtaatttcttgttcaattatgcatagaatgaaagcaactacatttgaacacattttcaacatgatttgaaaatactgatgttattaaatcatatctttacattttggggtaaggcttctttttttaaagagtcacactaaatattgtctcttgtcttgtttttaatgcaaggatcttcagaaaagttgttctttctctgttccaattatagttaaaagctatatggtcaacaaaacacacgaacagttattataatttrtattaacatatatgaatcattttaattacctactttgaagtatggatgcttttgtaatttttaaaattttctttctaaatattttgtgtctttttgaattaaatgttgacagagtaggcatgatacatattataaaaccatttcaagtattgaaagtctcacaaaatacagttatatgaacatggtataagattataaaactaacgtaacatttattgaatactttttcttatgctatggtgaaaattttacctcaagaattctttggaaggttgctatatctcatgatgttctgtaacaaacatagaggcggttttgaggattagtaatatgcacaagtttgtgcatagcacagatttcaaagagaaggatttaaaatctgaatactatccttgttttcacctgtatactttttgaaattctctctccccctctcttctttattgtttctgtgtgtctttcaatataacatttctccaccccccaaaaatatttcttatcaaatttcttgcttttgttgtaaagtagcagaagaaagaaaacttttcaaaagatttcaaagaatggcagtcattacactctcagggctggtagttgctccttctgatcatctggctacctagtacttgtttcctttccttttaaggagcagtcatcttccagtgtgtggagtcgtggtggaacagtaagacaaagtgaaagtcactgccatagacagaaggtggtcacattaccaaagtgtgatccttcagtctttctcagtcttcagtgggagctttagagaaataacatctgaagcaatacgtcacttgcaacaaaactgcatttggttaaactgttttcagttaacttgatggacactgtcagatgccccatcctgcttttttctaattaggtctcactaatctcatgcaatgcaacttgccctgaccctctgaccttccacccatgcaacaggagagaccagccacaattagtctgcacccaacattatttaatattattcaacattgttccagctgccacaggaccatattctttctctttccttctcccaattgctatctgtgggcccctcagccagtatctctctttgctcacatattccttattaataaaccatttaattacttgtgattctgttacgacagtgtggtgtgttttgacattgacacctttaaagggtggggggcaagaatggcagaccctgcaggggtgggacaatacaagaaattttgtatcctaaagggaagaaagaataaaacaaacagtcggagtttgttcattctagcagagggggccaaatgatgcttctgagtagtttccattgccataactgctgattccttacttttctgggcctagttcttcatcattccatttgattgc

SEQ ID NO: 691120 - DNA, 914 bp, Homo sapiens
tgactatgggttgagttatttgggttaagcaaaactatataaatatttttaaaatggcagatctgaaaaaaaaaacaaaaacaaaatatacttggtagtcatatcctcagagtgtctaagcctgtgcatttgtaagggctcttcaatccagtgccttaaactttatgtcaatagttgtttttgtgataagtagttaatttaaggtmtttggctttcaggaaactgtttactttttgatgagcagggaaaccacttacttttgagctaggaaattgctgagcataaatgaaattgtggaactttagacaatgagtttgacattgtgaacacaggaatcttaagtctgctctgatcttggcaaacataatttctaatactgacttgagtctagcgttcctggggcaaggggggttatcaccaaaaagatctctttggctactttcactgactgtagctctcaaccaaactcctacataaatattcttcaacctagagtttaggtcagtttgtgtttgctgttagtactgtaaattaggaagtaaaataattgcaacaacatttactctttaattacagttcttaaaaatgccagctctcagctttagtacttttgctaacagtattgggccttggaatgatcagcatatccactccataaaaggtaagaataacttaatttgacttcagtcagccccagtgaagccaggagagaagatacaggtgccaatcatggcgtcacagatgccacagttagtcacttacacatcttttggcaatatggactatacgtgcctttcgggtatcctgttaaaggagaacaaaaccatatgtggtattgtaacttacagcaaccaatgtttaaattcacaccagtagacatgtggttaactcaacattccaatttctactggtat

SEQ ID NO: 691121 - DNA, 636 bp, Homo sapiens
gtccatcatgataccttaatttttaaagattcttaaaaaatgtttgaaagatgctatgtttgtttggccacagggcattttcattagcaaaatatcaaattatgtggccaagatatgttggtagatgaagacctaaatattatttgtccttcagttgtaggatttatttgcactggccattttaactcacatatgagggacacagtgcttattgtgtttacccagcacttaaacgacatttaaaaagtaaggttcttactcgtggacccaattcctaggaaaggtaaccatgctaccaaaaatagtgttgatttttactgattttactatctgtctaggcgctatctgtaggacttattatataacctgaagacaaggatggatagattagaggaataagaaattttkggcacatatcttttcatattttttctgaaatgcattggtacacttgccacagtgtacattatacttgagatttatttgggttctattcaaaaccaatgaggagaatagcacaagtgggtgctaagaaagaggcacccctaggagctccgtctagccagactagcagcaatcgcccctgtgacaggattcactggtttgggggagataagacctggaagatgtgttaga

SEQ ID NO: 691122 - DNA, 655 bp, Homo sapiens
ttgtcattaatatcaattattgtatattattgatattatgtattatatatgttattaatatattattacttttatatacatattayatacataaatatatatacataggcctgcatataagaaattacaggggaatggcaaggctgcggagaaacaggaacgcttttacactgttgaagggaatgtaaattagttcaaccattgggaaagacagtgtggcgattccttaaggatctagaaccagaaatacaatttgacccagcaatcccattacttggtatatacccaaaggaatattaattattctactataaagacacatgcacatatatgtttactgcagcactatttacaatagcaaagacatggaaccaattcaaatgcccatcagtgatagactagataaagaaaatgtggtacacatactcgatggaatactgggcagtcacaaaaaggaattacatgtgccctgtaatttcttcagtgattggaacagtaaaagtaccttttgtttaaaaaaatatttaggctgggctgggcacggtggctcacgcctgtaatcccagcactatgggaggccgaggcgggtggatcacgaggtcaggagatcgagaaccatcctggcaaacacagaaatacaaaaacactaaaaata

SEQ ID NO: 691123 - DNA, 594 bp, Homo sapiens
tgttaacttttatcacatttccagatcaacaggctgctgctgtgcagtacctgacctcgctgtgtaaccttgctgtgcttggacctggtttgattgattgcttttattctgtgcttgctttccatgcgcgcttgcttctttttggctgtgccaggagacacgcttgctagagaagttttttacatctttcagatgacttgtgacccgacctgtacagcagaaggtatctgctgagatcacataatttgcctcagattatgagatctaaaataaaagccttgttttgtttttgtttttttttacttttttatttccagtgactatcttccatcgctgttttttttttcatagtgtgcrcatggtcacccatcccactcgccagcgtgttgccacgtaatgctcacctagctccgtggttttaggtttctcttaagacgtcgtgtgtgttgttttgtttcttggttagatttagtagtagaatttcatcatgacattaaacctctattttcatcccatttcattttatatctaggtcgatggatttgaaaagagagttttatcaaaaatatttggataatattaataggatagaaa

SEQ ID NO: 691124 - DNA, 680 bp, Homo sapiens
ttttttccaccaatcactagatttagctttctaaaaatgcaaatttgaacatagcacttctttgacttaaaattcccagtgtttttcttttgctcttaagataaaaacaaaacatcttaaaacaatcttcaaagccccttatgattatgtccctgcctgcctccccggcctccatctcaccacatgcagcctgtcatccagagtcatcccaaccacaggaaactttcatatccccagcatgtgtcctctcacctccatgcctttgtgcacattagtctctttgtcagagacactcttctccacttttcattacagcaactccaatttatttttaggtcttagtctaaatataatttctttccaaaaatctttcttaattctccamtatcaagtgcaatttcctccttatcccaagttaccatttatcattgcatttatcacattttactcacagttttgtaattttctctacttcattagactttgctaattataaactaaatacttaaaaaaggtaaaaatgtccctgagattttagttcatggaccccagaaatagttacccactttagagggagaatattatttaataaaaagttgaaagtcttgcctaagagtatctttgttccaatatcccagatattaaaatgtatagtactttattggaaagagattttgttt

SEQ ID NO: 691125 - DNA, 586 bp, Homo sapiens
cttctagccatccagactgaaaagcagactgtcacatctgacaactcttttttcctccattgatcagcaaaccctctccatctactccactgggccaatatttctcaacatctattatcatttctttgcttcttcttgacttacctgggaacctcctggtccaccatctgtcctctagtaacctgcacacggctgccctattaatctcctaaaagtgctattctggcgaggtcatcgcttgctcaaaaactttgaatgacttcccaccgtatgctgaccacagtcaaagattgttactttaagtactagctagagcagtggttctcaaagtgtgatgcctgggacatcagcctcccctgggaactggttagaaattcaaatgtttcactctacatcasacctgctgaatcagaaactctggtagtgggcccagcagtttttgccttaaaaaatcttccaggtgattctggtgcattttcaattttgagagccactggctttgtgattgagacgatgaactaagatgtcttagtttcaaatcctttttcggtttaccagtcgtactctttacacaagacactttcta

SEQ ID NO: 691126 - DNA, 850 bp, Homo sapiens
tcctcatacccccaagaatcaattcaactcctagctgaaaaggccatcagatggacgtccaggcagacattttttgggcagcttccctgcaactgaattttatactaccatcacaaggattttgcagtggatttgacatgatttttcattattccctaaatgtcccactgatattgcaactggaacaataagcccaatagatatattccagcgttcccaagaatgacctaagttgtatgtcattctgaaaagtttctctaaattaagattctcaatcttaggacttctttgtctacacctttctgttccataaagcattaatataaaagaaagtgaaaatgctaagtattttattttcttactatattttcmtgctaaatggcttcagggtagaaattgcaaattgcagagctcccagataggaaatgccagtcgccccatctgttaatacaacaagcataaagtccttgtgctaggctttgaggatgctgttgctttgcagcgtaaggacaactagtccatctggccttaacagtcgtgttgctagagcctcaatttgaacagatggattcttggattaataaattgaaaagaccagctgatgtgttggctcagtgtatttttatcaactgtaaggtgggaagagttggaagtaagtgtggcaatatttctgatctaattattgtcaccttcaaggacataaaagatatcagatactttaaaggaaacagtgagagactttgattctatatcaaaggtcagcaaacctcccaaagggtaagacaatttttctggattctttgtaaaatgccaagatacaaatgaaaaagagatattaattagtaaaaaa

SEQ ID NO: 691127 - DNA, 850 bp, Homo sapiens
tcctcatacccccaagaatcaattcaactcctagctgaaaaggccatcagatggacgtccaggcagacattttttgggcagcttccctgcaactgaattttatactaccatcacaaggattttgcagtggatttgacatgatttttcattattccctaaatgtcccactgatattgcaactggaacaataagcccaatagatatattccagcgttcccaagaatgacctaagttgtatgtcattctgaaaagtttctctaaattaagattctcaatcttaggacttctttgtctacacctttctgttccataaagcattaatataaaagaaagtgaaaatgctaagtattttattttcttactatattttcctgctaaatggcttcagggtagaaattgcaaattgcagagctcccagataggaaatgccagtcgccccatctgttaatacaacaagcataaagtccttgtgctaggctttgaggatgctgttgctttgcagcgtaaggacaactagtccatctggccttaacagtcgtgttgctagagcctcaatttgaacagatggattcttggattaataaattgaaaagaccagctgatgtgttggctcagtgtatttttatcaactgtaaggtgggaagagttggaagtaagtgtggcaatatttctgatctaattattgtcaccttcaaggacataaaagatatcagatactttaaaggaaacagtgagagactttgattctatatcaaaggtcagcaaacctcccaaagggtaagacaatttttctggattctttgtaaaatgccawgatacaaatgaaaaagagatattaattagtaaaaaa

SEQ ID NO: 691128 - DNA, 1094 bp, Homo sapiens
ggagacttgaccttctatagtgtttgcactcttcggaaccttaaccaacgacctagttggccagtatacccctcaggccattgtcaatgaagcagtgggggagttggggtattagtgrttgtggtcagagagtgaaatgtctgtgtttcacatttcagagtgatgacaaggattagggtggggctatgggaatgttggctgaaatagagtaaaggaggtcaaagaagagaagaaagtcaagattctttttttctgagtgtttggacagctcacatccatggccatgaagttcctgcctaccaggaaaatggcaagacttagagcccagagatgggaaagaagttggatagatgacagggatgaacagctttttttgtttgagacggagtcttgctctgtcgcccaggctggagtgcaatggcgcgatctcggtccactgcaacctctgcttcctggcttcaagcaattctcctgcctcagcctcctgagcagctgggattacaggcatccaccatcatgcccgactaatttttgtacttttgaagagacggtgtttcaccatgttggccaggctgctcttgaactcctgacatcaggtgatctgcccgcctcagccacccaaagtgttgggattacaggtttgagccaccatttctgaacagctttaaaaaaattttatttttatttttattttttaagaggacgaagatgtcagctgccaagtgcactgatgaagagtttcttctggtaatggttgagtagcttcttttggagcaagcatcccgtgaataaaaactattaactctgaagaaaacatttttaacaacccaattccctgaaatcactggggagtgaaaaaaagcagcagattctgaagggagttaggagaaaggggtttcctttagaaaaaaaaaagaaaagaaaagaaaaaagaaaaaaaatagcttttggtcttccttaccacaggaagaatgggagatggggtcactgcaaatttattctagaatatttttcatcttattaaaatcctttaaaatgcagaccacttcttgacggggagggctaggtaaacaacaattcgtaagggaactaat

SEQ ID NO: 691129 - DNA, 1094 bp, Homo sapiens
ggagacttgaccttctatagtgtttgcactcttcggaaccttaaccaacgacctagttggccagtatacccctcaggccattgtcaatgaagcagtgggggagttggggtattagtgattgtggtcagagagtgaaatgtctgtgtttcacatttcagagtgatgacaaggattagggtggggctatgggaatgttggctgaaatagagtaaaggaggtcaaagaagagaagaaagtcaagattctttttttctgagtgtttggacagctcacatccatggccatgaagttcctgcctaccaggaaaatggcaagacttagagcccagagatgggaaagaagttggatagatgacagggatgaacagctttttttgtttgagacggagtcttgctctgtcgcccaggctggagtgcaatggcgcgatctcggtccactgcaacctctgcttcctggcttcaagcaattctcctgcctcagcctcctgagcagctgggattacaggcatccaccatcatgcccgactaatttttgtacttttgaagagacggtgtttcaccatgttggccaggctgctcttgaactcctgacatcaggtgatctgcccgcctcagccacccaaagtgttgggattacaggtttgagccaccatttctgaacagctttaaaaaaattttatttttatttttattttttaagaggacgaagatgtcagctgccaagtgcactgatgaagagtttcttctggtaatggttgagtagcttcttttggagcaagcatcccgtgaataaaaactattaactctgaagaaaacatttttaacaacccaattccctgaaatcactggggagtgaaaaaaagcagcagattctgaagggagttaggagaaaggggtttcctttagaaaaaaaaaagaaaagaaaagaaaaaagaaaaaaaatagcttttggtcttccttaccacaggaagaatgggagatggggtcactgcaaatttattctagaatatttttcatcttattaaaatcctttaaaatgcagaccacttcttgacrgggagggctaggtaaacaacaattcgtaagggaactaat

SEQ ID NO: 691130 - DNA, 3074 bp, Homo sapiens
tgttggagatgaacatttgctgactttggttttagtgatgactattatcatcatcctggttgttcttagtagtccctaatgtaaaatagtattatttctaattctgtgaacccagggcatgagtctagacaagttgatttatgagctgaatgatttgtgaactaaattacatagacaaaacattcggaagtattgtctaacaaatgtttagggccgggtgcggtggctcatgcctgtaatcccagcactttgggaggccgaggtgggtggatcacaaggtgaggggttcgagaccagcctaaccaacatggtgaaaccccgtctctactaaaaatacaaaaaaaaattagctgggcgtggtggcgggtacctgtaattccagctactcaggaggttgaggcaggagaattgcttgaacccgggaggcggaggttgcagtgggccgagatcacgccactgcactccagcctgggcgacagagcgagactccgtctcaaaaaaaaaaaaaaaaaaaaaaaaaggaaaaaaaaacccccaaaaaaacaaatgtttaaatgagcttcccaaactctgtggacaggtgtcttgtgagcttagatcctcataactgtcagtgaggctggtcaggttgtgggaacagcccaagtccctgggtctgttgactctagtcttgagcagccactccagttaatcccaaattctctagaaatacataattttctataagtgccatgaagtaggggtaaaatattgggaggcatcagtctaaacagcactgtacagaacatatccagtgatctttaaagaatatcattggccgcgggcttcgtttgtgaggaagggggcctaggcccgggcctgcggtggtgggggttgctgcgcgccgggggtcgctcctgctgtgtcttccgctccagcttcgcccacttccccttgccagcggggtgggcgcggagaagacctgccggagccatggaggacgaagtggtccgctttgccaagaagatggacaagatggtgcagaagaagaacgcggctggagcattggatttgctaaaggagcttaagaatattcctatgaccctggaattactgcagtccacaagaatcggaatgtcagttaatgctattcgcaagcagagtacagatgaggaagttacatctttggcaaagtctctcatcaaatcctggaaaaaattattagatgggccatcaactgagaaagaccttgacgaaaagaagaaagaacctgcaattacatcgcagaacagccctgaggcaagagaagaaagtacttccagcggcaatgtaagcaacagaaaggatgagacaaatgctcgagatacttatgtttcatcctttcctcgggcaccaagcacttctgattctgtgcagttgaagtgtagggagatgcttgctgcagctcttcgaacaggggatgactacattgcaattggagctgatgaggaagaattaggatctcaaattgaagaagctatatatcaagaaataaggaatacagacatgaaatacaaaaatagagtacgaagtaggatatcaaatcttaaagatgcaaaaaatccaaatttaaggaaaaatgtcctctgtgggaatattcctcctgacttatttgctagaatgacagcagaggaaatggctagtgatgagctgaaagagatgtggaaaaacttgaccaaagaagccatcagagagcatcagatggccaagactggtgggacccagactgacttgttcacatgtggcaaatgtaaaaagaagaattgcacttacacacaggtacaaacccgtagtgctgatgaaccagtgacaacatttgttgtctgtaatgaatgtggaaatcgatggaagttctgttgagttggaagaattggcaaaatatctggaccattaagaaaacggattttgtaactagctttaaactaggccaagcaactagttttcctgcaaatcaaatttttaaagcaacttgrgttagactttgtttttgacctaacatcccttccttaaatgccttctgtagtttcagatcagtagggagaccatataataattgtatggtacctgtttcaaaacatattttttctgtttttataagtaagttgatattaattaaactcttggcaatatttcttctttcttaaaggaaaatacaccttaactttttttcttttacactgtgaaacatacacagtagaaattctgttactctctgttattaatacataaatgaaaatacttttttttccatattggcatgtagctacaaatattaaaggaggagaaaaggtaatataattttaggtttaccaaatatggtgtgtattcaaataatacttgaccagcttatctaaaatgtacataattttgaggtagcttatgaatttgattttaattattatgttcacaagcttggaatattagatattattttgcatctgtaactaaccgtgatcatcatctcttgtaatttcttgtacatgtatattacttgttcttaatagatttttggaaacaagactttattgagatcagtttggttttcctgttaatttacctgtttgactttataatgtgttttagttttgcagaagaacactgttgtagtttagaaggcttttcataaatcccctcataggcaaagatgagaacttcccactatttttttcccctcttaggaagacatactggaaagaaaatgtttagcatcttagtgtagtatagctattgtaaacagttcatgactagattttgattcggaaatctatactgaccaaggattaatcttaaggactgtataattcattaaagcggtggtctttccatgtggagactgatagaaaataattttgtcccaagtcttatttgctgactttttctgtcaatgagtgagattgttgaacaaactgaatatatgggctatagcaagtagctttacagtacagatcttacaattaagttttgcttttgttaaagtgtgtaccattttttctgtttggagtaagacaaaaattgttttgacataggttccctagggtacacttgctctagcatac

SEQ ID NO: 691131 - DNA, 1288 bp, Homo sapiens
cttccctatcaatttttattgacctgttctaaaatttgcttgcctgatttgtctcagtaatcctctcaggtatcactgtttgaattcacattttacacatcaaggcacagagtagtgacacagctcattgctggagtctggtttttgagcccatgattttaactaccatacaatctatttgcccagtacagaggctaaataatagcaataatgcatactccatcagctccatttattgtcattcatagccacataaattttttttaattatactttaagttctatggtacatgtgcacaacgtgaaggtttgttacaaaggtatacatgtgccatgttggyttgctgcactcatcagctcgtcatttacattaggtgtttctcctaatgctatccctcccccagcccccgaccccccaacaggtcctgctgtgtgatgttccccaccttgtgtccaagtgttctcattgttcatttcccacctatgagtgagaacttgcagtgtttggttttctgtccttgtgagtttgctgagaatgttggtttccagcttcatccatgtccctgcaaaggacataaactcatccatttttatggctgcatagtattccatggtgtatatgtgccacattgtcttaatccagtctattattgatggacatttgggttggttccaagtctttgctattgtgaacagtgccacaataagcatacgtgtgcacatgtctttatagtagcatgatttataatcctttgggtatatacccagcaatgggattgctgggtcaaatggtatttctagttaatgctatccttctaattatctgtggaaaagtaggttttatccaccatctcttgctgacttttatagtaataaataccctacgtgtatggttaggttttagataggtagatttataggcatagtatagatatacagctttctgaaaggatacaaaagaaactataatagcctctagaggaaaaataaagtagcaatggatgaggatgagaggattaaccttttgacatttcttatacttacttatattacctaatcgaacacaattataaatcaaatccaatcaaacaaaaacaacagaaatttattctcctggaagaacgctggctttcaagtgaatgagtaatgacttgtgatcatttttatgcatcatcaataaaacattatgagccgcattctttctacttcactcaaattaattttaccattaaaaattaattcaatttcaatgatcagtttattttaattctctaaaaatgtgtcatcg

SEQ ID NO: 691132 - DNA, 609 bp, Homo sapiens
ttttagtagagactgggttctatgatgaaccttttttatttaatcctcactagcatcctcagcttagtttcttcactgccctgtgaactctcactgcatctctgtattcacacttttcttcactcttgataacgtcttgactttaattctctccctcatcaaattttcattttctcctcttctccttgacatatttcacccaaaaattttcataatagttttattgattcttcatggtctaactatgtcactcaattgcattcatttttatatcatatattttaaaatttgcctatttttttgagamggagttttcttgttgcccaggctggagtgcaatggtgcgatctctgctcaccgcaaactctgcctcccaggttcaagcgattctcctgcctcaggctcctgagtagctggaattacagacatgcgccaacataacttagctaattttgtatttttttgtttttagtagaaacggggtttctccatgttggtcaggctggtctcaaacccctgacctcagatgatccgcccacctcggcttcccaaattgttgggattacaggcatgagccactgcgcctggccaaaacttgcctcctaaact

SEQ ID NO: 691133 - DNA, 652 bp, Homo sapiens
gtttttgtgttaggcctttttgaactaaactgcttttcctccccttgtgtttcatgcagcacagaagtgtttgtacttttgaaaccagcttttgtgacttgtcaacaataatgtcttagaataaaagagattgtgtcctttagggtatacataacttttgtcctagtagttttttgtttattgttgctatttttcatcatgtaaactagatgccccttaaagatacttacagtmtggaaaggaaaaaagtggtcctttttgttatgaagatattattctgaatatggaaagtacaaaagcgttggagtcagacaaaccgcaactggaatttccaattcacttcttactagctgtgagttcttagggaggtcacttattcctttgagccatcaattcctctaccttatttatgctgtatcctcaatttttagtacattttccatcaaatagcctagtaggcaatcaaagataaagacatttgatttgccagaggcattttgggcacagataagcacactttaactttcttgcatatttttccaatttggtaaaaatattaacaataatcggagggagtaccacaggcttctgtgaatgagagcttagcaaatgaccatgaaatggataaatggtatgaaaacccacaaataga

SEQ ID NO: 691134 - DNA, 2373 bp, Homo sapiens
tcctagcagttcaggaggccaaagcaggagcatcacttgaggccaggagttcaagaacagcctgggcaacatagcaaaatctcgtctctacaaaaagttacattagctgggcatggtggtaagtgcctgtagtcctasatactcaggtcactgaggcaggaggctcatttgagcccagggattggaggctcctgtgacctatgattgtgccactacactccagcctgggtgacagaaggagactctgtctctaaaaaataaataaataaatagttatcaagtatgtcatgttattttaagggcatttttagcaacataaagaaatgctcagccaggcggggtggctcacacctgtaatcccagcattttgggaggccaaggcgagtggatcacttgaggccaggagtttgagtcctgtctagctaacatggtgaaaccccatctctactaaaaatacaaaaattagccagacatggtggtgcatggtggtgcatggtggcatgtgactgcaatcccagctacttggctacttgggagactgaggcatgagaatcacttgaacccagtgggtggagagccgagacacaccatggcactccagcctgggtgacagagtgagactctgtctcattataaaaaagaaaaagaaaacctcagtttgaacttcatgagaccactaaagaggtttaagttttacaaattatttattagaagtctttctaaattttgagagaaatcatagttcattaatatattagttaatatatcttattaaattcaggtttaattgtgttacagttcagatttctactgttaactctgtggtacatcatagatcattttatatccttaataatctagaataaattgagtgggtaatatatttatgactacttgggatgggggattggagcctactttagccatttcaaatggtcagaaaaatttaaggttgagtggttagtgtatcattatgattgtgatttatttgatcctaaatgattacttgggtactcagcctcaattgtagcattctttctaggaataaaatatgatttaccatccaattttaacaatgcagtttctgaaagaaatgcacagtaaaaacaaaacaaaactggagtgcctttaattttttgataaactatatttattaatttttctccatattaaactggatatgcttattctacataacaaatataacataaacagagatggtggtttctcttaataccctatcttgactctttggatggatgcaaagtttctgcatcatggtaaggactggaaaggcaatatgcttgcttccagtttcaccctcaagatatagcagctggaatctcacactcatctttacaacaacaacaaaaatgctgaacaaacaaccaaggaatgatttccttaacccatcagagaactgagaactcaggccaagccactaaactaaaatgtacagagacacaggctaccagggggagaaacaggaccctcacatttatttaccaggggcagacaataacagataccataagagtcattagggtactactgtaggcatgtgagatgcctgggggctgcggacacacggtagttgctaccctctgttaggtcccccctcaacacccaacaaggaagcccaccaagtactcatggggatgactggggaggttcctgggaaagctttcctcatcctcataatactgacgaaggaatgagagggctgcaactgataaaattctacctacaaatatctcgtctatctcccctatgatacaaaagccagtctgcaagggaaacagcaagaaaaattgtagcttgaggctctcataaaaatccacctcagatgggagaggggaacaagaaaataaataaagctctaccctaaatagaggagcagaaatactgctagacatcacattccaagtggagatgaggctgtaacaattgtgcaaggcatactcccaagatccagattcatgtgcctgaaactgaagctagggaggtagacactgccctaactgaaacgcaaagagtaaaaaatactaaagacaatccaacaaaacaagtgtttcaagagctgtgcaacagtatcactctcacatacagatgattggaatcccagaagagctgaaaaatggagcaggaaagaagacacatttgaagaagtaaaaattgggcaattgtgatttttcaaaattagtggcagaccccaaaccactgacccgtgaagctcagaaaatatcaagcagaataaatacccaaaaaaagagtcacaccgtattcaaagaactgaaaaccaaagacaaacggaaatcatgaaggctctacttcaattttagtttccgtcattttcacatagtttaaaaaaat

SEQ ID NO: 691135 - DNA, 2373 bp, Homo sapiens
tcctagcagttcaggaggccaaagcaggagcatcacttgaggccaggagttcaagaacagcctgggcaacatagcaaaatctcgtctctacaaaaagttacattagctgggcatggtggtaagtgcctgtagtcctagatactcaggtcactgaggcaggaggctcatttgagcccagggattggaggctcctgtgacctatgattgtgccactacactccagcctgggtgacagaaggagactctgtctctaaaaaataaataaataaatagttatcragtatgtcatgttattttaagggcatttttagcaacataaagaaatgctcagccaggcggggtggctcacacctgtaatcccagcattttgggaggccaaggcgagtggatcacttgaggccaggagtttgagtcctgtctagctaacatggtgaaaccccatctctactaaaaatacaaaaattagccagacatggtggtgcatggtggtgcatggtggcatgtgactgcaatcccagctacttggctacttgggagactgaggcatgagaatcacttgaacccagtgggtggagagccgagacacaccatggcactccagcctgggtgacagagtgagactctgtctcattataaaaaagaaaaagaaaacctcagtttgaacttcatgagaccactaaagaggtttaagttttacaaattatttattagaagtctttctaaattttgagagaaatcatagttcattaatatattagttaatatatcttattaaattcaggtttaattgtgttacagttcagatttctactgttaactctgtggtacatcatagatcattttatatccttaataatctagaataaattgagtgggtaatatatttatgactacttgggatgggggattggagcctactttagccatttcaaatggtcagaaaaatttaaggttgagtggttagtgtatcattatgattgtgatttatttgatcctaaatgattacttgggtactcagcctcaattgtagcattctttctaggaataaaatatgatttaccatccaattttaacaatgcagtttctgaaagaaatgcacagtaaaaacaaaacaaaactggagtgcctttaattttttgataaactatatttattaatttttctccatattaaactggatatgcttattctacataacaaatataacataaacagagatggtggtttctcttaataccctatcttgactctttggatggatgcaaagtttctgcatcatggtaaggactggaaaggcaatatgcttgcttccagtttcaccctcaagatatagcagctggaatctcacactcatctttacaacaacaacaaaaatgctgaacaaacaaccaaggaatgatttccttaacccatcagagaactgagaactcaggccaagccactaaactaaaatgtacagagacacaggctaccagggggagaaacaggaccctcacatttatttaccaggggcagacaataacagataccataagagtcattagggtactactgtaggcatgtgagatgcctgggggctgcggacacacggtagttgctaccctctgttaggtcccccctcaacacccaacaaggaagcccaccaagtactcatggggatgactggggaggttcctgggaaagctttcctcatcctcataatactgacgaaggaatgagagggctgcaactgataaaattctacctacaaatatctcgtctatctcccctatgatacaaaagccagtctgcaagggaaacagcaagaaaaattgtagcttgaggctctcataaaaatccacctcagatgggagaggggaacaagaaaataaataaagctctaccctaaatagaggagcagaaatactgctagacatcacattccaagtggagatgaggctgtaacaattgtgcaaggcatactcccaagatccagattcatgtgcctgaaactgaagctagggaggtagacactgccctaactgaaacgcaaagagtaaaaaatactaaagacaatccaacaaaacaagtgtttcaagagctgtgcaacagtatcactctcacatacagatgattggaatcccagaagagctgaaaaatggagcaggaaagaagacacatttgaagaagtaaaaattgggcaattgtgatttttcaaaattagtggcagaccccaaaccactgacccgtgaagctcagaaaatatcaagcagaataaatacccaaaaaaagagtcacaccgtattcaaagaactgaaaaccaaagacaaacggaaatcatgaaggctctacttcaattttagtttccgtcattttcacatagtttaaaaaaat

SEQ ID NO: 691136 - DNA, 652 bp, Homo sapiens
tagattagatgggcaatggaattttgggctgaagaagggagaggtatagttttccttgtgttaaaactctgtttgattaattagaatgaactgccaaggtgtttctggacaccagtaatttattatcttcctacaagtctataagagaaggattagagcctaaaagtctgtatggaactcgctatttataaattttacrgaaaaacaaacatgttggaaaactgcaagtttaatcagattctacaggacttcttagaatccttgtgacagcaatatgaactaagaattggtaggaggggttatagttctttctgtttaatgtctgtaatttacatagggctctcttagaccatagatttagggtgaccccagcctggtttcacaaggtaggacttccattgaattctctctcaccagtgtgttcctcgtttggagttcagcactggggactgactgggcggcaatgtgcatgagcacatacagtctcagaacatgcactttgggcaaagagcagagcccctttaggtcagggttggatttaccgtggtggctccagtagaggactgaagctttggcatatcatgttcaatgttccttcctctccatcagatatttttaataaatgtgcaagtctttaataaatgtgaatcac

SEQ ID NO: 691137 - DNA, 1435 bp, Homo sapiens
tgcatttagtgggggaaaaaaacattcagaccattgcactgtgaaagtgggtttcagcaattccagatcctcaagctgcccccctggctattcctgccctccccaactgggcaggagggcatggaggagcagagtccacacaggcaaaagaccctgggggctcccgactcagcaggcaattggcttctgtgcatttcaatgttctctcctccgaaacagggatgcaaacagctgccctgtctgctacagcaggtgggaagaggaggagcatgctgcaatctgtgcgatgtcactcagtgccaatggctgtcaccacgtggctactcacacacacggctctcctgcaagatctacactcccctctccctctgggatgaagacaggaggaggcagggtccccagcccgccacagaatcccagaaggccggtgtggcaaggcaccctcgagtcaacgcgcctaactcccttcattctttttccatctgagctcttcagttgagagcatgcttygatttaagtgatcgtgctttttaaaatcaatctctctgaataatcgtctatctggtttagagtacaactgtcgtggtaatgcgtaatgtgctatcttgcatttctgcagcaattattctttcgtgaattactgggtaacatcattccatgtgattttacagagctcccatcacattatttctttttcctttgtgtagatgctgagaaaaaaaaaaaagcaaaaacataacaatagacctaaccaccaccatttctaaattcttgtttgcagagaaaatagctggataatataaattcatatttgtgtagcagtctaaagtttataaacggtgacttcttttatctaatttaatctttacaccaaccatatttttttcttagttttacagcataacaaactgaggttttccctgagtcagcaagatagtaggtctgacaaaagactcatatccagaataagaaataaactccaaaaaatcaatcagaaaagggcaggcaatccaatagaaaaatgggcaaaagatgaacaagtactttaccaagaggatatcaataaatatcaggtatcaggtattgacgatacctgaaaataacaaagctaacccttaaacagagtttgcatttctaaatgtcacatgcacacgcaaacaacgcattttggcttcacgacaataatccagcaaaataaatactattatttttctcatttaataatggagattatgggagaccccccaaatttaattttatatgtctcttttctgtttgaatgctttgctatgagcaggtattacctttataatcaaaggagaagaggaatgcataaatatatcaattatgaaacaaacaagctcctggccctaggtcacacagctaagtacagaaacctgtttaagaggttagggggttggatttcagtttcata

SEQ ID NO: 691138 - DNA, 1435 bp, Homo sapiens
tgcatttagtgggggaaaaaaacattcagaccattgcactgtgaaagtgggtttcagcaattccagatcctcaagctgcccccctggctattcctgccctccccaactgggcaggagggcatggaggagcagagtccacacaggcaaaagaccctgggggctcccgactcagcaggcaattggcttctgtgcatttcaatgttctctcctccgaaacagggatgcaaacagctgccctgtctgctacagcaggtgggaagaggaggagcatgctgcaatctgtgcgatgtcactcagtgccaatggctgtcaccacgtggctactcacacacacggctctcctgcaagatctacactcccctctccctctgggatgaagacaggaggaggcagggtccccagcccgccacagaatcccagaaggccggtgtggcaaggcaccctcgagtcaacgcgcctaactcccttcattctttttccatctgagctcttcagttgagagcatgctttgatttaagtgatcgtgctttttaaaatcaatctctctgaataatcgtctatctggtttagagtacaactgtcgtggtaatgcgtaatgtgctatcttgcatttctgcagcaattattctttcgtgaattactgggtaacatcattccatgtgattttacagagctcccatcacattatttctttttcctttgtgtagatgctgagraaaaaaaaaaagcaaaaacataacaatagacctaaccaccaccatttctaaattcttgtttgcagagaaaatagctggataatataaattcatatttgtgtagcagtctaaagtttataaacggtgacttcttttatctaatttaatctttacaccaaccatatttttttcttagttttacagcataacaaactgaggttttccctgagtcagcaagatagtaggtctgacaaaagactcatatccagaataagaaataaactccaaaaaatcaatcagaaaagggcaggcaatccaatagaaaaatgggcaaaagatgaacaagtactttaccaagaggatatcaataaatatcaggtatcaggtattgacgatacctgaaaataacaaagctaacccttaaacagagtttgcatttctaaatgtcacatgcacacgcaaacaacgcattttggcttcacgacaataatccagcaaaataaatactattatttttctcatttaataatggagattatgggagaccccccaaatttaattttatatgtctcttttctgtttgaatgctttgctatgagcaggtattacctttataatcaaaggagaagaggaatgcataaatatatcaattatgaaacaaacaagctcctggccctaggtcacacagctaagtacagaaacctgtttaagaggttagggggttggatttcagtttcata

SEQ ID NO: 691139 - DNA, 653 bp, Homo sapiens
tgcatatttactttgtttctgccacttgaaggcaagccccgtgaggacaagaaatctacctttctgctctaacccccagcatctagaatagtgcctgacacatgatcagggtttaagcaactaactgatctcttcatttctaatatcattagaatatgaattttttataaagtatgaattcagtgcagcagttgcatgtttccataaatgagaagagctcattggttttattgatttaaaaatttatagacacaagcccaattcttttaagatttgtcactcagtgggaagattattattcaaaaaatttccttcatcccgtttacatttttctatgtacaaatagataagtagtattattcttaagaaaaaaatgaacaaacaaaaactagtgttcttttcttaacaaaatacaatttaaaatgttgtgacatgcaactatatattattgtacccataaatatacttgtgattaactttctagwttattccaaaaataaactgacaagcttcaaaagctgaattacaactctttttggctaacctataccattatggtttagacaacagtggcagatgtgatttaagttccaactaaatttgatctttgcttaaaatgattattctctggtcaggttactacctagggagaa

SEQ ID NO: 691140 - DNA, 472 bp, Homo sapiens
agtgtagatatctttatgaagkggtaatttcatctaatttaggtatatacccagaagagggattgctggatcatacggtaattctatttttaatttatttaggaatcctcatactatttttccataacagcttcaccagtttatattcccaccaacaacctgtgcttagagtggttaaatcacttgtccaagatcacacagctggtaagcgaaagaagcacattcctagtctcttaaccctgggtgtgtactctcttgatacatcagtttgtatctttagctttaaaatatgtgactggatctctaagtttttaaattcttcttttgttcatggccttttatttttagatcagacccaactcatcttagactttgccacagtgaacctgtgtttgtttgcaaattatatgtatcaatagcatgtttctatgtgcttcctttagtatctcaccatcagaaaacacaagcttgt

SEQ ID NO: 691141 - DNA, 575 bp, Homo sapiens
atcatgaaatcaccttgtaccccataaatatatacaataataaatgtcaatttacaataaaattttaaaatggaaaaaagtgctaatgtcatttttaaaatagcagcattatttctgttggatatatacattggcataacctttccaaaaggtaatttgataacacacacggatagcatttgaaattcttctctttgtctcagtaatgctgtctctaaggaactaacctaaaaaattatcagaaattagattcaacaattacattgagaattatttttaatagagaaaaagttgaaacgamcatcagaatggttaaataaataatgatacctttgaaaaatagaataatgtgcagccacccaaattatatttatgaaaaattttttggtttatatccaaaagacaggcaataacaaatgctgatgagggtgtggagaaaagggaaccctcctacactgttggaaggaatgtaagttagtacaaccactatggaaaacagtttggaggttcctcaaaaaagtaaaaatagagctaccatatgatccaacaattccactgctgggtatatacccaaa

SEQ ID NO: 691142 - DNA, 794 bp, Homo sapiens
gaattctcttggtttcacttctatgcccttgagaataagaatgttacatttttctagtatagggagggtgtctttcacatgggagcttcatctgttgcttttaagaagcagcacaaaggcacttgctgtttttcaagtgtattaaacttaaatggccaggatagtatattttaccttcctcacagccaaacaagctgcagtatgcagcttatacttttaagctgaagtttagttgtatttacattaactgtacattacatgtacaaatatacattaaactatgtacatttgaatttgtatattacatgtacaaatgtacattaaactatatacatttgaatttcctaggttttatggttttgttttaatttctaaatgtgtttttatagtgttataacagcgattacattttgtaatttatttgtattaattcataaaattgttttcatcttatataggagctataaagcacagwttatacctcatttatttaaaattataattaaaaaacttaagtcatccatggaaatccacaatagtttttccttaaaagaggtctatatgttactaaagttgaagaacaggaggaggagtttgtaaaggggtaatgggcaaaaggagtgtcagaggcatttgaaccagagcgactccatcttgaataggggctgggtaaaataaggctgagacctactgggctgctactcaggaggttaggcattcttagtcacaggacaagataggaggtcggcacaagatacaggtcacaaagaccttgctgataaaacaggctgcgg

SEQ ID NO: 691143 - DNA, 1192 bp, Homo sapiens
ctcagctgagttcctcaccaataacttccttcagctgaagataattaccttgcccaaggttatgcctcttttctagtttaaatgactggttaagaggttacaaggacctttccctcttgcttcaactcagaacaactctgagggaccatctcatctgaagcacatggggtcagctgaggtctttgttaagcctgcgttaccattcaacagctccctctgcccagtccttccttcactcccctatagttattgatcctaagtttattgtgatcaataaacttcctatatggaaatctctatctcagagtcagcttctcaaaaagcccaacttgcattatatagtaagtataaatctgccctcatataaagtctacttgtcctaattctaacttcagaatatatactgaataagacaatctctgttccacatggtggcctttaagatgtttgaaggcaattactagatatgtgacttctggtgagagckccaacctttagagtttgggagaagaggaaccaaaaaatgcaaaagaactatagtcagaagaatatggtgtcttggaaattatgtctgcatcagagctgccaagcactgctagagattattttcatccacagggactactgggtggaattgttcatagtccattggccatcaccattcctgaaaataccctgtatcagttttccattgctacatttaaaaaattgccacaaacttagcagtcttaaacacactcatttactagctcaacatattgtaggccagaagtccaggcaagctcaacatggttctctgtttatggttttacatggcaaaaccaaagattcagcaggactaacctcttatctgaaggatctgtggaaaaatcttcttccaagcttatccaagctgttggcagaatttagttccttgtagttgtaggattgaggtacccttgccagcagtcagccaggggccactctctgcttctagaggctgcccctccatctgcaaatcagcaatgccccacagagttcttctcaagagcatctctctaacttcctcttttgccatcagctggagaaagctctctgctcttcagggctcatgcaattagatctttcccacccagataatctccccatcttaacatcaactgtgccatataatatcagatcattacaggattgatacctcagcccattctca

SEQ ID NO: 691144 - DNA, 1290 bp, Homo sapiens
attttaatatatactaaacattccttcccaactcaagtaatatcaaaagtgaacatctgattgtgtcactcctgtttaaatacctttaattgctccgcattaccctcagaataaaatctagattcctccctgaagctttcaaggtcattgttattcaggccagtgctgctgtcyggctttattctctttcttctctccccacacttgtgctgctgcagaactgagcatctcagttcttgttgtttctgggccaacgcacacgtgttttctgtgcctagaaggctctatctcagccatcacctcttcccaccctactccccatatttctgcctgactaaactctaattatctttagcttccaatctaggtactacatttccaaaaatgcctttcctgacccaaaggctgatagttcttttcacttgagactctattttacatgcctatgtcctacttgacagtgagttcctcaaattcagagaccacaactgttaagtttctgtttctggaggctaacacagacaacactgagctaacaacaatcattgaagcaagaaggctgacctagggaagaggtcatggccatggacatggacatggctgtgttccaataaactttctatacaaaagtggatagtgggctggatttggcccaggggccctagtttgcaaacctctggtttaagatataaggaagcaatactactccaatgaatctgttatgttctgtctacagaaatcattataatcttgaacatatttaatccatacatgtctctcagtctgaccagtctgcttcacctggctaagtagctggttgcaggggcatcctcagggaaggtctgagcctccactatttagagaatgatgctctccatttccaaaatgccctcagctatacctctttactgtttctataaatacaaattgcaaaatagacaagaataaagtttttgttaaaatctctctaagataaaagttgaccttaaaaataaggtaaaattgatgagatgtaaaagcaaatataaaaagccaatgagataaaaggttaaaagtataaaatgatgaaagatttaagctaaaaggcccaaatacgataaacattttaaaatttaaagtaaacgagattaaaggttaaagataaaaattaagtactggtagtgtaggaataaaaattataaatctacaagaattaagaagattaaaaaaactatttttaaaagaaaagaagaaccaaaagcaccgagattacaaaaggtaaatattaagaatattataaagaggaaaaaa

SEQ ID NO: 691145 - DNA, 710 bp, Homo sapiens
tcaagcagccccttaacatgactcgtataaatgctgctgaaatagaaagcagagtttgagaactaagcaaattagctgagaccacagacaaagtccaacaaggcttttgggaagaatttgagacactacaaccacaggagtgcaaacttctctacagccgaaaagagggtcaaaggcaagaaaacaaaaacaaaaatagatataaaaacatcctgccctttgatcataccagggttgtcctacacgatgatgatcccaatgagcctatttcagattacatcagtgcaaacaccatcatgcctgaatttgaaaccaagtgcaacaattcaaaacccaaaaagagttgcattgccacacaaggctgcctgcaaaacatggtgaatgacttttgctggatggtgttccaagaaaactcccaagtgattgtcatgacaatgaaagaaatggagagaggaaagagtaaatgtgtcaaatactggtctgaagaggatgctctacaagaatatggggtcatgtgtgttaggaacatcaaaggaagtgctgttcatgactatatgctaagagaacttaarttttcaaaggttggacaagctgtactccaggggaatatggcgagaacggtctggcaataccactttcggacctgaccagaccacggagtgcccagtgaccccgggggcatgctggacttcctggaggaggtgcaccat

SEQ ID NO: 691146 - DNA, 690 bp, Homo sapiens
ggatagttaatcaaagtagctcaaaatcaccaaggggccaggagcagtggctcacttctataattctagcactttgggaggtcaaggtgggcggatcacctgaggtcaggggttcgagaccagcctggccaacatggaggaaccgtctctattaaaaatacaaaaattagccaggcatgatggtgggcacttgtaatcccagctactcgggaggctgaggcaggagaatcgcttgaacccaggaagtaaaggttgcagtgagccgagatcacaccactgcactccaacctgggtgacagagtgagactccatctcaaaaaaaaaaaaaaaaaaaatcaccaaggttatagtttctctccatatttttactctgacatcctcattatattaacatatatgctatatatatatatatattaacatataacatatgtgttaatatatgctatatatatatatatagcatatattagtctattagcattttactcactagttcacagtcataacattactctgcaaaaataacrtgtcttggaaggaggattattttttctcacagtcccgttttaaaacagggaacttcatctagaaaacgtttgtctcgttatccacaatttcgtcataatctcagtcttggacaaatcactggtaatgagagtgaaattaccattatttaccgagaggaaa

SEQ ID NO: 691147 - DNA, 1054 bp, Homo sapiens
aaattggataaagaaaatgtggtacatatacaccatggaatactatgcagccataaaaagaatgagatcatgtcctttgcaggaacatggatggagctggaggctattgtctttagcaaattaacagaggaacagaaaaccaaacaccacatgtcctcacttctaagtgggaactaaatgatgagaacacatggacacatacaggagaacagcacacactggggcctattggagggtcgagkgtgagaggagggagaggatcacgaaaaataactaatgggtactaggcttaataccatcatgatgaaataatctgtaaaacaaatccctatgacacaactttgcggatgtaacaaacctgcacatgtacccctgaattctatttaaaaaaatagaatttttaacagaattttaaaaatagaaattttaaatagaattagtcccaattctatttttaaaaaaccctctcctttagtgtgtatacagtcaggcatctcttttttttttttttttttttttttgagacgggagtctcgctgtcgcccaggctggagtgcagtggcgcaatctcggctcactgcaggctccgccccctggggttcacgccattctcctgcctcagcctcccgagtagctgggactacaggcgcccgccacctcgcccggctaattttttgtatttttagtagagacggggtttcaccgtgttagccacgatggtctctatctcctgacctcgtgatccgcccgcctcggcctcccaaagtgctgggattacaggcgtgagccaccgcgcccggccacagtcaggcatctcttaatgatggggatacattttgagaaatgcatggttagttgattttggtcagggatacatgtgcaggtttgttacacactaacctttaattatagttacctctggatatagcagtgggatcaattgagagggtagggtataaacaggaattttcacatattaacatctctattgattggattatactgctaaaagcatgtattactgttacaatttcaaataaagcaatacaaatta

SEQ ID NO: 691148 - DNA, 1054 bp, Homo sapiens
aaattggataaagaaaatgtggtacatatacaccatggaatactatgcagccataaaaagaatgagatcatgtcctttgcaggaacatggatggagctggaggctattgtctttagcaaattaacagaggaacagaaaaccaaacaccacatgtcctcacttctaagtgggaactaaatgatgagaacacatggacacatacaggagaacagcacacactggggcctattggagggtcgagggtgagaggagggagaggatcacgaaaaataactaatgggtactaggcttaataccatcatgatgaaataatctgtaaaacaaatccctatgacacaactttgcggatgtaacaaacctgcacatgtacccctgaattctatttaaaaaaatagaatttttaacagaattttaaaaatagaaattttaaatagaattagtcccaattctatttttaaaaaaccctctcctttagtgtgtatacagtcaggcatctcttttttttttttttttttttttttgagacgggagtctcgctgtcgcccaggctggagtgcagtggcgcaatctcggctcactgcaggctccgccccctggggttcacgccattctcctgcctcagcctcccgagtagctgggactacaggcgcccgccacctcgcccggctaattttttgtatttttagtagagacggggtttcaccgtgttagccacgatggtctctatctcctgacctcgtgatccgcccrcctcggcctcccaaagtgctgggattacaggcgtgagccaccgcgcccggccacagtcaggcatctcttaatgatggggatacattttgagaaatgcatggttagttgattttggtcagggatacatgtgcaggtttgttacacactaacctttaattatagttacctctggatatagcagtgggatcaattgagagggtagggtataaacaggaattttcacatattaacatctctattgattggattatactgctaaaagcatgtattactgttacaatttcaaataaagcaatacaaatta

SEQ ID NO: 691149 - DNA, 1230 bp, Homo sapiens
aaacaggtccaagcattcataatagtgacaagcaaataaaaacagttctttgaacctaaaactcaaagacatagataaagtgtagagtcaaaagaatgatctatgcacacatttatcacttactaggattttaatgcaaaaatgtccatcacctcctgtcactcctatcagaatcaaacgtgtctctgaggatgtgcttcagacagaaggttatcagaagttagcccagcacttatttgaaagtctgtgtaggttagtggtttaaagcagggatcagtacttttgttctgtaaatggccaagtagtaagtattttaggttttgtgggccatagatagtctcgatcacatattatcctttggtttttgtttgtttttacaagtctgtaaaaatgtaaaagccactcttagcttgtggctgtacaaaaacaaccatagtttgcctacccatggttttgagtgtgaactataaaccctgactacttaggttcaaatccctccacttctagctttgttacctttggttagatgcttactattttgagcctcgggaaaatgctgtgtgtggcgggggtcatattagtgcctccttcattagtcttgtgaggattcaatgatgaatgcatattaaatatttaagacagcaatgatataattagcaaaatgcaggccttaacttttatcagtagatttgggaagagggtccaagcctggttggtttccccagggttactcaggacctcaaactcccctggggagaatggccactgcaaaaggtcaaccgattttgcttttcttgtgacttattgtacacagggagggataaatactgtgtgcttagagttttaaaatagttcccatatgcaaagtgggataaaaatagctctcaccttacagggttgttttgcagaaaaaatggaatgatgaatatgaatttgctcattataatgtataacttcggttattattatggaagatacccgatgattataattaccaattagacaagagtttttggcagaatgtttttctgggtgatagtcatgatgtaatatattttaagtatgtttaattggttcatgtttctttctgtccttacttaggctgtgcacttccatagaatgagaaggtcagatttactcctcagtctcagcactgagcacaacgctgtggctggataaatatacacacacacacacayacacacatatatatatatatatatatatata

SEQ ID NO: 691150 - DNA, 1230 bp, Homo sapiens
aaacaggtccaagcattcataatagtgacaagcaaataaaaacagttctttgaacctaaaactcaaagacatagataaagtgtagagtcaaaagaatgatctatgcacacatttatcacttactaggattttaatgcaaaaatgtccatcacctcctgtcactcctatcagaatcaaacgtgtctctgaggatgtgcttcagacagaaggttatcagaagttagcccagcacttatttgaaagtctgtgtaggttagtggtttaaagcagggatcagtacttttgttctgtaaatggccaagtagtaagtattttaggttttgtgggccatagatagtctcgatcacatattatcctttggtttttgtttgtttttacaagtctgtaaaaatgtaaaagccactcttagcttgtggctgtacaaaaacaaccatagtttgcctacccatggttttgagtgtgaactataaaccctgactacttaggttcaaatccctccacttctagctttgttacctttggttagatgcttactattttgagcctcgggaaaatgctgtgtgtggcgggggtcatattagtgcctccttcattagtcttgtgaggattcaatgatgaatgcatattaaatatttaagacagcaatgatataattagcaaaatgcaggccttaacttttatcagtagatttgggaagagggtccaagcctggttggtttccccagggttactcaggacctcaaactcccctggggagaatggccactgcaaaaggtcaaccgattttgcttttcttgtgacttattgtacacagggagggataaatactgtgtgcttagagttttaaaatagttcccatatgcaaagtgggataaaaatagctctcaccttacagggttgttttgcagaaaaaatggaatgatgaatatgaatttgctcattataatgtataacttcggttattattatggaagatacccgatgattataattaccaattagacaagagtttttggcagaatgtttttctgggtgatagtcatgatgtaatatattttaagtatgtttaattggttcatgtttctttctgtccttacttaggctgtgcacttccatagaatgagaaggtcagatttactcctcagtctcagcactgagcacaacgctgtggctggataaatatacacacacacacacacayacacatatatatatatatatatatatata

SEQ ID NO: 691151 - DNA, 1230 bp, Homo sapiens
aaacaggtccaagcattcataatagtgacaagcaaataaaaacagttctttgaacctaaaactcaaagacatagataaagtgtagagtcaaaagaatgatctatgcacacatttatcacttactaggattttaatgcaaaaatgtccatcacctcctgtcactcctatcagaatcaaacgtgtctctgaggatgtgcttcagacagaaggttatcagaagttagcccagcacttatttgaaagtctgtgtaggttagtggtttaaagcagggatcagtacttttgttctgtaaatggccaagtagtaagtattttaggttttgtgggccatagatagtctcgatcacatattatcctttggtttttgtttgtttttacaagtctgtaaaaatgtaaaagccactcttagcttgtggctgtacaaaaacaaccatagtttgcctacccatggttttgagtgtgaactataaaccctgactacttaggttcaaatccctccacttctagctttgttacctttggttagatgcttactattttgagcctcgggaaaatgctgtgtgtggcgggggtcatattagtgcctccttcattagtcttgtgaggattcaatgatgaatgcatattaaatatttaagacagcaatgatataattagcaaaatgcaggccttaacttttatcagtagatttgggaagagggtccaagcctggttggtttccccagggttactcaggacctcaaactcccctggggagaatggccactgcaaaaggtcaaccgattttgcttttcttgtgacttattgtacacagggagggataaatactgtgtgcttagagttttaaaatagttcccatatgcaaagtgggataaaaatagctctcaccttacagggttgttttgcagaaaaaatggaatgatgaatatgaatttgctcattataatgtataacttcggttattattatggaagatacccgatgattataattaccaattagacaagagtttttggcagaatgtttttctgggtgatagtcatgatgtaatatattttaagtatgtttaattggttcatgtttctttctgtccttacttaggctgtgcacttccatagaatgagaaggtcagatttactcctcagtctcagcactgagcacaacgctgtggctggataaatatacacacacacacacacacayacatatatatatatatatatatatata

SEQ ID NO: 691152 - DNA, 1230 bp, Homo sapiens
aaacaggtccaagcattcataatagtgacaagcaaataaaaacagttctttgaacctaaaactcaaagacatagataaagtgtagagtcaaaagaatgatctatgcacacatttatcacttactaggattttaatgcaaaaatgtccatcacctcctgtcactcctatcagaatcaaacgtgtctctgaggatgtgcttcagacagaaggttatcagaagttagcccagcacttatttgaaagtctgtgtaggttagtggtttaaagcagggatcagtacttttgttctgtaaatggccaagtagtaagtattttaggttttgtgggccatagatagtctcgatcacatattatcctttggtttttgtttgtttttacaagtctgtaaaaatgtaaaagccactcttagcttgtggctgtacaaaaacaaccatagtttgcctacccatggttttgagtgtgaactataaaccctgactacttaggttcaaatccctccacttctagctttgttacctttggttagatgcttactattttgagcctcgggaaaatgctgtgtgtggcgggggtcatattagtgcctccttcattagtcttgtgaggattcaatgatgaatgcatattaaatatttaagacagcaatgatataattagcaaaatgcaggccttaacttttatcagtagatttgggaagagggtccaagcctggttggtttccccagggttactcaggacctcaaactcccctggggagaatggccactgcaaaaggtcaaccgattttgcttttcttgtgacttattgtacacagggagggataaatactgtgtgcttagagttttaaaatagttcccatatgcaaagtgggataaaaatagctctcaccttacagggttgttttgcagaaaaaatggaatgatgaatatgaatttgctcattataatgtataacttcggttattattatggaagatacccgatgattataattaccaattagacaagagtttttggcagaatgtttttctgggtgatagtcatgatgtaatatattttaagtatgtttaattggttcatgtttctttctgtccttacttaggctgtgcacttccatagaatgagaaggtcagatttactcctcagtctcagcactgagcacaacgctgtggctggataaatatacacacacacacacacacacayatatatatatatatatatatatata

SEQ ID NO: 691153 - DNA, 992 bp, Homo sapiens
tatctggctacctgaacccaaatctatctcttctaatttttctctaaaatggatatggagacagctgtcccctgactacaaggcagaagtccagagtgctgaccctactgaaccctgagagccctacttcctgcagaaggtgttgtattttccagcccagaagcaggaccacttcctaagaatgtaaatctcccaaaattttagacagagttagagattggtggtggcaaaatgcactaaggatggccatattgctgaggctggagaccacagcagccacagtttgagttaccgtgaacttcactgctccaggataaatgctccacttgcattatttcagaatttcttcatattacctcactgtataatggagayattattggcctgaatttaccaaagaagactctaagacagattaagcgagtttctcaaaataacatggataattggaggccagccttgaactcaggcatatgtgagactcgaagcaaagctacagcacaacttgcaaggcccagactccaaaattaacatactctagggaagagacaaaaagaaatgtgatccggatgttccaacttttgggaaaattagaagaccggacagtctggggagaagaaagtatccaccactagaaaccgtaagtttggctgggagtgccacacattaaccactgctgatctgagaaagaatgtggccactagatctgtgcacaggacactgggccagctccattcatcattgcgtctcttgactgacactgactcttgtgagatcttgctttgtttgaggataagaaacaattaaaaatgccacctggagccaataaaaaagaactacaaacaaggagaagatagcatctggagtagactcagagacagcacagatttatgaaatttgtgtacttgtatgttgcagcacaaaatttcatgaaactcaactctttaatgcatcacaatagaacatggcttgtataaaataggataatgtca

SEQ ID NO: 691154 - DNA, 992 bp, Homo sapiens
tatctggctacctgaacccaaatctatctcttctaatttttctctaaaatggatatggagacagctgtcccctgactacaaggcagaagtccagagtgctgaccctactgaaccctgagagccctacttcctgcagaaggtgttgtattttccagcccagaagcaggaccacttcctaagaatgtaaatctcccaaaattttagacagagttagagattggtggtggcaaaatgcactaaggatggccatattgctgaggctggagaccacagcagccacagtttgagttaccgtgaacttcactgctccaggataaatgctccacttgcattatttcagaatttcttcatattacctcactgtataatggagacattattggcctgaatttaccaaagaagactctaagacagattaagcgagtttctcaaaataacatggataattggaggccagccttgaactcaggcatatgtgagactcgaagcaaagctacagcacaacttgcaaggcccagactccaaaattaacatactctagggaagagacaaaaagaaatgtgatccggatgttccaacttttgggaaaattagaagaccggacagtctggggagaagaaagtatccaccactagaaaccgtaagtttggctgggagtgccacacattaaccactgctgatctgagaaagaatgtggccactagatctgtgcacaggacactgggccagctccattcatcattgcgtctcttgactgacactgactcttgtgagatcttgctwtgtttgaggataagaaacaattaaaaatgccacctggagccaataaaaaagaactacaaacaaggagaagatagcatctggagtagactcagagacagcacagatttatgaaatttgtgtacttgtatgttgcagcacaaaatttcatgaaactcaactctttaatgcatcacaatagaacatggcttgtataaaataggataatgtca

SEQ ID NO: 691155 - DNA, 655 bp, Homo sapiens
tcaccttccggctctccacagatgctgctggctacagtgattctgaggattatatataactcatttaccatcccaaagtcatgaaagtagactttgtattaaaggacaattgaacaaactctggtatactaagaagcattaggagaatattagacaattgttgagtaggatatttgatatatgttctaagtcatgatgcgcatctgcatcgatatcaatttgttttcattaacttagacaattaaaatcaagaactaagttattttaagcaaacagcttcattttacattcatttatttctgctttgcatgaagcacagctgcattataatgtgatcaagcacaataaattgtgctctgttgtttatagatggaagattgtaccactcaggtacatgtacaattttaccacaagtgttttgaaagtacaagtgtgtgagattttcttctcttctgaaaataattcttactcagactttagaaactatggattttctacctcctattaccaaaaataaatgcaatgttctgggccaatggcctgaagttacttaactgaagttatttaattggtagtatcttttccaatgtttttgaaaaatatattgrgtgaaatagctactgcatttaggatacttacagaatatagatatgga

SEQ ID NO: 691156 - DNA, 650 bp, Homo sapiens
tgttccatcccatggctggttttcgtggccctgggccctcgttccagacctacaggtacttgctgttcctcacctagggaacatgctgtgaaaggaaacgggattataggaaaatgaaagagaaggtagcgaagatgctggcaagtcaaaaatgtatcagtgtctgggatggcctgtggggatcagtgcctccctttgtcccggcagagtcgcagtagcagggctgaagcccaggcccgactttgcggctcacacgcccttagcttacgcatctgtgagcaaaagcatgctgggtctaggaggcactttctagcctggcctgtgtggtgcttagggtcccagccatggcatgctgaatgtttgcttctctttgctgatcctttactgacctgaatgaaacgaggagactataaaagttgtcaattacatcagcttctttttttcttttgtttttcttttttaagtttaattttggctcttctaggaacgttatgtacttgaaaaacagaatactatrgcattcctcagtgggaaaacaacttttctcagatccgaagctactaaaatgcctacttttgacgtagggtttttattttttttgtttttaaaaagaaaggtgcagtaaaatttattttttatttatttattta

SEQ ID NO: 691157 - DNA, 609 bp, Homo sapiens
cagttttaaattttctaggagccacattttaaacagcaaacagaaacaggcaacattaattctaataatatattttacttaatccagtstatctaaaatattattttgatatgtactcaatataaaaaattaatgagcaagtttatgtccttctttcatacgaagtctgggggctctggcgtgctgtttcatacttggcacatctccgttcagaccagctgtgtttccagggcttgagaaccccaggaggctggcggctgccttatggggcagcatgctggctaaagcctggcggagtggaatgaataggtcgttgtggcttaggaaagtccagtcctctatttcttcatagcagaataaacctttgatgttattttaactctgcacctatagagagattcataattgttcccttttccatattgaagaaatcccgtggagacagataggattaggttttggcaagataagggatagggctctggggacccgtggcagctacagctttagcagtccgtcttggctgtatagaagggacctggaaatatcatgatgtggagtagattacagttttcctgaagcacacatctgacttgtgcaggctgaaag

SEQ ID NO: 691158 - DNA, 597 bp, Homo sapiens
tactacgagcctcaaagatgacttccaagtcctatagcctcaaggcacaccctcacggaaaaccattttcctgcatgactgtattgtgtggtgacaacactgtcttgtggattaggtaactgtggtcccctccacttgtcgtctttttttattaacttataaacaaatccatttcaaattaattatgtcatctgcttaggctatctcgacctttgcttctaagttattctgaaaggactttgttttgcttacttgaagagctccttgaccctgggttccaatgmggtctagggcaaagagccttggacccagagtcaggccgcagtgctagatgagcctccgctgctcagagctaaatgtgcgctagttattttataggtttgttgcgaaaaagagttaatttttgtgaaagtgctctgtagcggaaaacattttgaaagcattctagaattggccaaataaaagtagttttctggattctgacatagatgaaggaacaatacattttttttttgtaatctcagaaagaaactattggacagaaaatctagagaatctttatttttttccctaagaaactacataaaagatgttgca

SEQ ID NO: 691159 - DNA, 597 bp, Homo sapiens
tactacgagcctcaaagatgacttccaagtcctatagcctcaaggcacaccctcacggaaaaccattttcctgcatgactgtattgtgtggtgacaacactgtcttgtggattaggtaactgtggtcccctccacttgtcgtctttttttattaacttataaacaaatccatttcaaattaattatgtcatctgcttaggctatctcgacctttgcttctaagttattctgaaaggactttgttttgcttacttgaagagctccttgaccctgggttccaatgcggtctagggcaaagagccttggacccagagtcaggccgcagtgctagatgagcctccgctgctcagagctaaatgtgcgctagttattttataggtttgttgcgaaaaagagttaatttttgtgaaagtgctctgtagcggaaaacattttgaaagyattctagaattggccaaataaaagtagttttctggattctgacatagatgaaggaacaatacattttttttttgtaatctcagaaagaaactattggacagaaaatctagagaatctttatttttttccctaagaaactacataaaagatgttgca

SEQ ID NO: 691160 - DNA, 597 bp, Homo sapiens
tactacgagcctcaaagatgacttccaagtcctatagcctcaaggcacaccctcacggaaaaccattttcctgcatgactgtattgtgtggtgacaacactgtcttgtggattaggtaactgtggtcccctccacttgtcgtctttttttattaacttataaacaaatccatttcaaattaattatgtcatctgcttaggctatctcgacctttgcttctaagttattctgaaaggactttgttttgcttacttgaagagctccttgaccctgggttccaatgcggtctagggcaaagagccttggacccagagtcaggccgcagtgctagatgagcctccgctgctcagagctaaatgtgcgctagttattttataggtttgttgcgaaaaagagttaatttttgtgaaagtgctctgtagcggaaaacattttgaaagcrttctagaattggccaaataaaagtagttttctggattctgacatagatgaaggaacaatacattttttttttgtaatctcagaaagaaactattggacagaaaatctagagaatctttatttttttccctaagaaactacataaaagatgttgca

SEQ ID NO: 691161 - DNA, 643 bp, Homo sapiens
tcttctctattcttaagcctccactccaattttatttccttcttaagaatgtcaaataccatccctattctgcccatgtaaggaaaagtatccttcttctactttgcagctgggaattcaatttaagaggaaattaaaatacatttggctaattgttacaaaatattattttgaatgaaatgtttaatggccatctgcaattcttctttgagtttcctaatggcatagttccctggttttctattattttatgtttttaccaatgtttttactccttttctgtgataygttttgaaaataatttcctcagactatctaaatcagtatttacctatttaatttttacatagccagttttctctatcttttcttttgtgccttcttgctttttaattttatttagggttttcatctctaagatttaaaagtttcttcctaaagttctgttttctagcatttggtttatgcactttaatttttaaacagactttatttattagcacacttgtagatcacagcagaattgggcagaaagaacagagagttaccctatgctccccttcccccacataagcattcaatttaatttttatatttaggcaagtaatcagtcaagttatccgggtatattaaattaggtatg

SEQ ID NO: 691162 - DNA, 608 bp, Homo sapiens
gatttcaatatatgttgacttgataaaataaaattttcattaatagaaaaaaaaagaaatgtaatcctaaaatgttccccagtaatgtgttgtgagtaamtataaaggagtatggtagaaagaaagaatgaggtagaggaaacagaggtaaatcagtacaggtaagaaaagtaaaggaagacatgcatcaaacaattcactcctattacatgcatgtattcctgcacagagttaggtctttggatcatattgaccattgtggaatttaatttcttggaagtctgacatcatagtttttaaagctgttttgtatttttattgatttattatttttctattttgttcattatcaggtctatatttacatatccaaatctagcagccaacatttttggatttcaggtaagttatataaggtctcaataaaatgtgaataataataaattacccagcaggggatatattataaataaataaaataacatatataaattcccagtaaatatacttagaaacatttaatacttatctattattattttaaaattagtatcatcattatcattatcatgctattattattgttatgaaacatttttaagaaacca

SEQ ID NO: 691163 - DNA, 608 bp, Homo sapiens
gatttcaatatatgttgacttgataaaataaaattttcattaatagaaaaaaaaagaaatgtaatcctaaaatgttccccagtaatgtgttgtgagtaaatataaaggagtatggtagaaagaaagaatgaggtagaggaaacagaggtaaatcagtacaggtaagaaaagtaaaggaagacatgcatcaaacaattcactcctattacatgcatgtattcctgcacagagttaggtctttggatcatattraccattgtggaatttaatttcttggaagtctgacatcatagtttttaaagctgttttgtatttttattgatttattatttttctattttgttcattatcaggtctatatttacatatccaaatctagcagccaacatttttggatttcaggtaagttatataaggtctcaataaaatgtgaataataataaattacccagcaggggatatattataaataaataaaataacatatataaattcccagtaaatatacttagaaacatttaatacttatctattattattttaaaattagtatcatcattatcattatcatgctattattattgttatgaaacatttttaagaaacca

SEQ ID NO: 691164 - DNA, 608 bp, Homo sapiens
gatttcaatatatgttgacttgataaaataaaattttcattaatagaaaaaaaaagaaatgtaatcctaaaatgttccccagtaatgtgttgtgagtaaatataaaggagtatggtagaaagaaagaatgaggtagaggaaacagaggtaaatcagtacaggtaagaaaagtaaaggaagacatgcatcaaacaattcactcctattacatgcatgtattcctgcacagagttaggtctttggatcatattgaccattgtggaatttaatttcttggaagtctgacatcatagtttttaaagctgttttgtatttttattgatttattatttttctattttgttcattatcaggtctatatttacatatccaaatctagcagccaacatttttggatttcaggtaagttatataaggtctcaataaaatgtgaataataataaattacccagcaggggatatattataaataaatraaataacatatataaattcccagtaaatatacttagaaacatttaatacttatctattattattttaaaattagtatcatcattatcattatcatgctattattattgttatgaaacatttttaagaaacca

SEQ ID NO: 691165 - DNA, 616 bp, Homo sapiens
atgatttttcttctttagtctgttgatttggtgaattacattaaatgatttgtgaatgttgaaccagtcttgcatacgtgaaataaatcccacttgaccatgaaatataattattttgatatattggtggatccaataagttagtatcttttgagaagttttgcatctaggttcatgagagatactggtttgtacttttcctttcttgtaatgtttgtgtytacttttggcattagggtaatttttgcctcatagaatgagtggaaagtcttcattctacttgtagtttctaggatggtttgtggagaattggtatcatttattctttaaatgtttggtaaaatttacctcttaaaatcatttgttcctgatgctttcttttcagaaagattattaattttggtttaatttatttaatagatattggtgttttcagattatatatttctcctacatgagtttggaagtttgtgttattcaataagttaatcaatttcatcaaagttttaaaattgtagtgtccatggaataaacagtgatggcctcatggaatcaaaaagataccctcttttttagttcttttgtttgtttgttttttgtttttgttttggctttg

SEQ ID NO: 691166 - DNA, 616 bp, Homo sapiens
atgatttttcttctttagtctgttgatttggtgaattacattaaatgatttgtgaatgttgaaccagtcttgcatacgtgaaataaatcccacttgaccatgaaatataattattttgatatattggtggatccaataagttagtatcttttgagaagttttgcatctaggttcatgagagatactggtttgtacttttcctttcttgtaatgtttgtgtctacttttggcattagggtaatttttgcctcatagaatgagtggaaagtcttcattctacttgtagtttctaggatggtttgtggagaattggtatcatttattctttaaatgtttggtaaaatttacctcttaaaatcatttgttmctgatgctttcttttcagaaagattattaattttggtttaatttatttaatagatattggtgttttcagattatatatttctcctacatgagtttggaagtttgtgttattcaataagttaatcaatttcatcaaagttttaaaattgtagtgtccatggaataaacagtgatggcctcatggaatcaaaaagataccctcttttttagttcttttgtttgtttgttttttgtttttgttttggctttg

SEQ ID NO: 691167 - DNA, 1744 bp, Homo sapiens
tagctgggaggcaagtgtttggtaggtggtgaaggagaaaaggtcagcacccggaggagcccagcacacactcttccccaggatcatctagaatagcagtcctctggtggagagagacaggagacgagagatcctcgggaggggtggggagcaacaaggtaatgaagggctggagaggacggccgcatgcagacagtctgagaccacagggccactctttccacaggacaatgtctgcatgcacctgaccaactatgctatcaacaaacacaatgagaattttgtccgggatggcgctgtgggcagtaagaggtactccctactctgttttctcctgcttcctctgccccttagccccacagtcccagtagcccatgaaaccaagctggctcttgggaggctaattgcccagggaaactcagcctttatagaccctgtcctgtgcctgcactttggagctctaagtgcagccccaaacctcaccctgataactagtccctgctccaaactgctagcagcccttcaaagcccgggcatgcaattagcgttagtgtgagggagcctcctgcctacagcctggcccagtggcctagaaactggccttcmtctgagcactgggcctcgcaggaagctgtcgacactcaacatctggctgcaagagcacagctacaaccctggagagctgtggggggacatcgaggacatcatcatcaaaaccatcatctcagcccattctgttctacgccacaactaccgaacctgttttccccagtatctgaatggaggtacatgtgcctgttttgaaatccttggttttgacatcttgctggaccacaagttgaagccctggctgctagaggtgaggattatctcctaggctttgcaaaaccaaggtccagaggcctccttgaataggacacctgggacaggggtacactcaggtggtggaacacagaatgggagatgtgaaagccctggggtgggcaggaatgagcagaaggcataagatctctacccttttgacctgctgagtcaaatcttggtggtttttggcctctaccgtaggaatgcaggtttgggatccccagtgccctaatgtaagtctttagggacacactatctagagaggcaggccagctgatttgctctcactggtctgtgaattggagatctctatggcagagttttgtggccttggaagccagagcatccagcctccccggctgaggccatgggagaggaatatcttagaccctctagttaatgcctgcaagaggccaccacctgctcaggtggtctgggaaaggggtgtataatgactcctcctggcaggtaaaccactctccaagctttaccacggactcatgccttgatcaagaagtaaaggatgcacttctctgtgatgctatgacccttgtcaacctccggggctgtgacaaaaggaaggtgatggaggaggataagcggcgagtcaaggaacggcttttccagtgctaccgacagccacgagaatctaggtgtgctaggtgtctggcatgtgtttagttcttcattattcctgagagtaaaagtcctcctttagatgaagaatgtggcctggggctgatttgctatcaaaaacaactttttgcatagataatatgttcatatttgcattaaaaaaatcacaggaccaggcttggtggctcatatctgtaatcccagcactttgggaggctgaggcaggaggattgcttgagcccta

SEQ ID NO: 691168 - DNA, 1744 bp, Homo sapiens
tagctgggaggcaagtgtttggtaggtggtgaaggagaaaaggtcagcacccggaggagcccagcacacactcttccccaggatcatctagaatagcagtcctctggtggagagagacaggagacgagagatcctcgggaggggtggggagcaacaaggtaatgaagggctggagaggacggccgcatgcagacagtctgagaccacagggccactctttccacaggacaatgtctgcatgcacctgaccaactatgctatcaacaaacacaatgagaattttgtccgggatggcgctgtgggcagtaagaggtactccctactctgttttctcctgcttcctctgccccttagccccacagtcccagtagcccatgaaaccaagctggctcttgggaggctaattgcccagggaaactcagcctttatagaccctgtcctgtgcctgcactttggagctctaagtgcagccccaaacctcaccctgataactagtccctgctccaaactgctagcagcccttcaaagcccgggcatgcaattagcgttagtgtgagggagcctcctgcctacagcctggcccagtggcctagaaactggccttcctctgagcactgggcctcgcaggaagctgtcgacactcaacatctggctgcaagagcacagctacaaccctggagagctgtggggggacatcgaggacatcatcatcaaaaccatcatctcagcccattctgttctacgccacaactaccgaacctgttttccccagtatctgaatggaggtacatgtgcctgttttgaaatccttggttttgacatcttgctggaccacaagttgaagccctggctgctagaggtgaggattatctcctaggctttgcaaaaccaaggtccagaggcctccttgaataggacacctgggacaggggtacactcagstggtggaacacagaatgggagatgtgaaagccctggggtgggcaggaatgagcagaaggcataagatctctacccttttgacctgctgagtcaaatcttggtggtttttggcctctaccgtaggaatgcaggtttgggatccccagtgccctaatgtaagtctttagggacacactatctagagaggcaggccagctgatttgctctcactggtctgtgaattggagatctctatggcagagttttgtggccttggaagccagagcatccagcctccccggctgaggccatgggagaggaatatcttagaccctctagttaatgcctgcaagaggccaccacctgctcaggtggtctgggaaaggggtgtataatgactcctcctggcaggtaaaccactctccaagctttaccacggactcatgccttgatcaagaagtaaaggatgcacttctctgtgatgctatgacccttgtcaacctccggggctgtgacaaaaggaaggtgatggaggaggataagcggcgagtcaaggaacggcttttccagtgctaccgacagccacgagaatctaggtgtgctaggtgtctggcatgtgtttagttcttcattattcctgagagtaaaagtcctcctttagatgaagaatgtggcctggggctgatttgctatcaaaaacaactttttgcatagataatatgttcatatttgcattaaaaaaatcacaggaccaggcttggtggctcatatctgtaatcccagcactttgggaggctgaggcaggaggattgcttgagcccta

SEQ ID NO: 691169 - DNA, 645 bp, Homo sapiens
cattttgttttctccctccctcctccctccttcacccttcatttctatgaccatctttccatttcttcttctcttttggggtccctcgcccccaagttccggttaacgttctctgtaaagccrtttgattcctcctgtgtttaaacatcttccttcaactatgtccttagcacctccccttcctcaacaaaagtggctatcaagatattttcctaaacaaaaaccggtctcaccctgctaaatgcattggaaacttaacacctggtgtatatattggcctcctgagcaattgattagtctgagtccacagctgggacctggctctcctctccaccagctgccaggcggagggcagacccagggccccaggggtgaatttgtcagggcaaaggcctctgtgggcagcctcttggcagcctgccagtagccccttctggcagcgtcccacctctcccggcatcacagatcaagcctcagaagagcagggcctaaggagaaaacccgagagtgacgatggcaaagagtgatcacaacaccccaggtgggtggactccgggggaacgcagaggtactcgggcccagagctggtgggagaggggaggtgatgggaaactggacacccagaaagtcccaccagcatggaaa

SEQ ID NO: 691170 - DNA, 610 bp, Homo sapiens
gagatcaaaaatatttaggaaaaaaaggatggtggtgactgtactgagcatgtacacttttttcttgtcattattccctaaaccatagagtctaagaactatttatgtatcatttacgttgtattaggtattataagtaacctagagattatttaaactatataggaggatgtgcataggttatgtgcaatactacaacattttatatcagggactctagcacctgcagattttggtatatgcaggggtcctggaaccaatccctcagggatactgaggggactgtacttgaaagctacttgcaagtcagttgagtggagatactgttatatggtatctcttaataacttcacttatagcaaaaaccattaaatgtccctgttaatgtttactttgcaattactaaaaragcttaaattaacctttgggaaaatgtgttaatagcatggtttcatggaccagatgcgctttgtcgtttgtgaactttcattttttatttacttacagtgcatgttcaaatatgtctgcctgatactcaaaaacatatgcatgtttaactgctaatttgtagccgttattaaactgaactcatggcattggacaaaccaga

SEQ ID NO: 691171 - DNA, 685 bp, Homo sapiens
cttttgcaaatacataactgttttttaattaatttaaacatctaagttatctgaaaggggagctaaaatctagttccactcattcttatccatccaaaaaaactacttattgagcataccctaggtgctagcaatatatcagtataaaagatatccctgccttcatggagattacattttacaaagaagaaaaccaaggttatacaggtatctactggggacagagccaggattacaagtagatctccacttctccaatccagtgtgctttctacaatgtcctgccctaatgagaaggaccgagcggtaagccatttctctcctaatcctgaataagagtaccacagtgctacagttctgattcttactacagttagaatatgtagtaaggattcttactacagttaggatatgtagtaaggattcttactacagttagattcttactacagttagaatgtgtagtaaggacaatcctgattcttactacagttagaatgtgtagtaaggatagacactgcctaaattacctccaataattataagtaaaaccaaactacctctgcaaaaaraaagtcttctaaggtctcattcagttttaatattgtaatttattccaattaacaacatggatcttaaacaggccagcctgataagctctctggttcctcattctggttagtat

SEQ ID NO: 691172 - DNA, 2617 bp, Homo sapiens
taaaaaaagaaaaaggaagaaataagagacttgaaggataaagagaaagatggaaagagaatgtcagttaaaggacatgaaaggaaaagaagtctagggaggtaaagaaagaccaccctctaactctagccattagtctcagtttcaccagtctgtgtaattcaatccaaaatcagaaaatggagatgcagcttctatttatgcagttgaaattattagccatgtagcccccctgcccacacagatgtaattaggatgtcagaatgcaggtatgtccaatctgcattttgtatggatgctgtagaagttgctttgatgtctctgttctttatttttatacttctctatttgatgaatatttagtaataaacctaaagtttaaaaacttatttgctttctgttttgtagtaattgtgagtcgtgtatttttataatgttaaacgtatgtccaagactttccaagaatattgattagaaatctgagatatacaaatactattttaattctaaaaggagcaaaaattttaaaagctgataacaatttaaatcagttgcagatctcactttttcaagaaatgaaaaaaccaaagcattgttatattaaatctttttaacagctatgaaagcacagaacaaaattggtcatttaacatgtgtaattattatatatttatattcttagctctagtgctattttgagaacaagcattattttcctctcaattcaacgaatatttcttcctcactaatgttataaaagatgctaatgtgaggattttggatttggactgcagatcacatctcttttacagtttgaatccattcagaattaatggtccagttgtcaagaaaacatttctatttcaatttcagcgatgaagaacgatacagatacagggaatatgcagaaagaggttatgagcgtcacagagcaagtcgagaaaaagaagaacgacatagagaaagacgacacagggagaaagaggaaaccagacataagtcttctcgaaggtttgctctttaataaaatagtgaaccaatagtatgtgagagattttgacttactacattgtcgcattggaagaggggaaattttggcctatgaaccagtcttgcttggtttcattaaagaaaaattcagggccttgtctcaaatttttttaaaaaagcattaaacaaaatacctattgtttgccaaaaatcaaccctatacagtatttccggttttgagttaatgcctgtttctaatttgttactgtatattataatatgcatttcagaagctgtgtataggcactgggaatctgagataatatcagtgaagatggccctataaaataaatacaatccctgcataaaagtcacataaaactgattattcctcacattatatttatgagaaaatgcattagattattttaaacccagtgttatattgagaatttccttagagtgattggatttttgtcactgattgtgtatttaaacagaacacaccttttttttttttttttttttccagtaatagtagacgtcgccatgaaagtgaagaaggagatagtcacaggagacacaaacacaaaaaatctaaaagaagcaaagaaggaaaagaagcgggcagtgagcctgcccctgaacaggagagcaccgaagctacacctgcagaataggcatggttttggccttttgtgtatattagtaccagaagtagatactataaatcttgttatttttctggataatgtttaagaaatttaccttaaatcttgttctgtttgttagtatgaaaagttaactttttttccaaaataaaagagtgaatttttcatgttaagttaaaaatctttgtcttgtactatttcaaaaataaaaagacagcaatgactttatatccaagaaaggaatgtgaatgagtcacttaacagggaatctaaagagctgtgttagctgtgtacatacacagattatctgagaaaaggtcaagggttccacttgggccacagtttttttgttaatcaaacaccactctcttaagaggctgcatcacaaaaggcaacaaagggcccctctaaggcttgagattaaaactagtctttatcattactgctgtgacactcttgcttagtatattaagagactcatacatttttgatatcacaactttttgatggcttttcaatattctaaatttgggttcctggtgaaaccaaatggggtacactttcatatccaaattaataaaacctataaggcatctgggtggcctctatgaaataaattaattaattacccatagtgtagtttctaggaggcatgtgtacacacactcttcattgtggcacaaatttaaatcgcctcatgaccatgtctgtgagccagggtcaagctggtttggccttcttgatgcattttccaaggcccactggtggagcagcatgagtttttatayagttactaacgattgtggaaaaaaagagctttagccatttcttactaaaaacaaaacaagtttataattaattctctgagcgagcatttttagggataagcctaggaggtattcatcggtgatggtaacaaataacatggtatttgaaagaataaattactaggatct

SEQ ID NO: 691173 - DNA, 652 bp, Homo sapiens
ccagcactttgagagtctgaggctggcagattgcttgagctcaggagtttgagaccagtctagacaacatggcaaaaccctgtctctaaaaaaaaatacaaaaattagccaggcatgggggcgtgcacctgtagtcccagccactcggggggcttaggagagaggatggcttgagcccgagtggttgaggctgcagtaagtcatgactccgccactgcactccagcctgagtgagagtgagaccctgtccccgcctccccagaaaagatagtgaggctttacttgagtgtgctccaactcaacctcaaggtgccatgccaccttgtaagaaagcttrttaaaaataagtgttattagcctggctgacatggtgaaaccccgtctctactgaaaatacaaaaaattagctgggcatggtggtgggtgcctgtaatcccagctactcgggaggctgagacagaagaattgcttgaacccaggagggggaggttgcagcgagccgagattgcgccactgcactccagcctgggcaacaagcaaagctctgtctcaaaaaacaaaaaacaaaaaacaaaaaaacccccctgttattattataaacagagctacagactgtgtagacatcgacacagtgctgatttaagtatcctca

SEQ ID NO: 691174 - DNA, 602 bp, Homo sapiens
caacctggtactgccagagaatgacaccctaacgtgtaaagatggtagttctcaatgggggagacaacactgcccgccaggggacttggacaatgtcaggaaacattttttggttgtcacaacttggggatggtgctgctggcatttagttggtagaggccaggggtgctgccaaacatcctacaatgcacaggacagcccccgcaataaagawttctccagcccaaaagtcagtagtaaggaccctgcccgggccaggcgcagagactcacacctgtaatcccatcactttgggtggctgaggcaggaggatcgcttgagtccaggagttcaagaccagcctgggcaacatagcaagaccccatctctaccaaaaattaaaaaataaaaaattagccatgcatggttaggttcaccggtagtcccagctacttgggagtttgagatgggaggatttcttgagcccaggagttggaagtcgtagggagctatgatcacaccactgcactccagctccagcctgggggacagagtaagactttgtctctaaaagaataaaaattaaaacaaacaaacaaaaccacctaccctaaggcatgtaa

SEQ ID NO: 691175 - DNA, 1835 bp, Homo sapiens
  misc_feature 326, 337, 338, 339, 340, 341, 342, 343, 344, 345, 346, 347,348, 349, 350, 351, 352, 353, 354, 355, 356, 357, 358, 359,360, 361, 362, 363, 364, 365, 366, 367, 368, 369, 370, 371,372, 373, 374, 375, 376, 377, 378, 379, 380, 381, 382: n = A,T,C or G
  misc_feature 383, 384, 385, 386, 387, 388, 389, 390, 391, 392, 393, 394,395, 396, 397, 398, 399, 400, 401, 402, 403, 404, 405, 406,407, 408, 409, 410, 411, 412, 413, 414, 415, 416, 417, 418,419, 420, 421, 422, 423, 424, 425, 426, 427, 428, 429: n = A,T,C or G
  misc_feature 430, 431, 432, 433, 434, 435, 436: n = A,T,C or G
atctggtgtggcacaggcagggatgctatttgtgaccatgggacagggtgaggctgttctaagcagctgagagaactggtcagaccagggtcggaatcccatgaatggtaattgtcccaggtgacccaagtctgctgtgagacagagcaagaacaatgctgatggggccacatggctcccccacccctctgacttaaggctacagagtcattatgtcaatatatttttgtacagattttgtagtttatgacacattctggcaacgtttagatgcaatttcaatgagccagaatgtgtacgtaaacccaaactggatatcccttaangatgtagatannnnnnnnnnnnnnnnnnnnnnnnnnnnnnnnnnnnnnnnnnnnnnnnnnnnnnnnnnnnnnnnnnnnnnnnnnnnnnnnnnnnnnnnnnnnnnnnnnnnatctttaaaatactcactctttgcaatgttttgtttctgtaactgttctgctcgggtaaaaggattacaaataaagggttaaacgttttagtgagaattgtattaattgggccagaggttgaatgtaggcctatatttgtgctaacgctgaaaaacgttttgcaaagccatatcatgtatttgaggtagcaagggaaaggcttagcctactcaagatgactgtgttttgtttttttgtttttttgtttttgagacagagtctccctctgtcacccaggctggagtgcagtggcctgatccyggatcgctgcaacctccacccccagggttcaagcaattctcctgcctcaggctcctgattagctgggactacaggcatgcgccaccacgcccagctaatttgtttttgtatttatggtagagatggggtttcaccatgttggccaggctggtcttgaactcctggcctcaggtgatccacccgcctcgacctcccaaagtgctgggattaaatgcgtgagccaccgcgcccagccaagatgactgttttcaagcaagttgacaaccactttgccagagctcctttaatgagctaattacaaagggctcttaggtgtcctctgaagccagttctggaggagctccacttaagagacactgaatgagtcattagcacctgaaatactgtacacactgttggctcttggaacatataatggaattaatgtttttgccacttcagactgatcttctgtagtagtcaggacgttttcagttgtaagcaacagaaaaccaattcaaattggcttacacagagaggagtgttttcgagcattaggcatggctgaaactctgtgcttaaaggctatcagcaggaatctgactgtgtccatttcttggcttttcttcctttgtgtttgttccattcttaagcaggctttctctaaatggtgttaaaactgtttctagcagtttcagcctcgtacaccatcacctagcgccccagtggaaagagagcatctacttgtcaataactctagcaagaatcccagggctaagattccttgactctgattgccttagcttgggttacatgcccaccctcgagccaatcctggtggccagaacaatgtaatagtcttattggtcagaactgagtcaaaccaagacatgggtgggccccattgaatcacgcttctagatggaaggaggtagtttcccagataaatatccaggttcagatgccagatgatgggattgggaggtgagggggattggagactgggccggcaaaaccaatgaatgtccctggaaccttccctctaaataatttccaacaagcaaggtgttaccaaactgagggacttcatatggtttataagcaaaacttagatatttg

SEQ ID NO: 691176 - DNA, 664 bp, Homo sapiens
tctcctgccactccaccttaagattaaacactactttcaattcaaggaaaaacccaggctctcagaaaaaagttgaaagctgaaaaaaattttcttttgtttaraaaatgcaactttcctttataggctgacagaactcaaagtctacagtaattaatcagcaaacaaagtggtatataggtgaggtatttctattttgaactttgatagttacttacatttaaaaggtataactctccttatatgggtgcctataagtatttcatttccagctaaggtaatgagtatattagaaaggaaatgtatataaaattattataatttagttgctttaaaagggcaaatttggaaaatacaacaaatgagcagttagttctcttaataggtgagtgaatgagctgcaagaaacaacatgcacttaaggtttactgcagtttcttactaagatcactcccattcctttgattagagttaaactaccttgaagtccataatacattcatcactatagaagtgaacactgaacgacgtaggggaacaaggggacaaaatataagaggctgtcaaaagaaagcagttccagccaccaccacactttggaaagcacgaaagagtgatctcttttttaagcagctgcttcttatttttattatttttatcagtt

SEQ ID NO: 691177 - DNA, 640 bp, Homo sapiens
agcacccaactaaaagtgttcatagtagttcgtttagaattagtattcctttataataaagctgtggcccatcttttcattttcatccattttcaaattaattctatattctctataaattgatatatacttctgctcattggcatcctaatgctatggttttaatgtgtcccctccaaaattcaggtgtcacaaatgtgataatattaacagatgaggactttaagaggtgattaggccataagaactcctctctcatgaatggcattaaggaccttataaaagaggcttcagtcagcgttcttctttcttgcccatctgacttccaccacatgaggacacagcttcctccctccagaggacaaaacaataggataccatcttggaaacagagagtggtcctcaccaaaccaccatatctgccagagctttgatcttagactttctggcctccagacctgtgaaaaaataaatttatgttctttataaatttcccagtctcagatattttttataacagcaaaaacaaaccaaagcacctactttaagtcaaaattgtatattgctttctttaagatgattttctttattctgctccagacaaatttaatatattgctmctttttgaaatgtattgacc

SEQ ID NO: 691178 - DNA, 636 bp, Homo sapiens
tacccatgagaaaggtggatacatcatattacagtgttaagacttctaaaggcattaacctggccctcatgagctaaatgccaacctgctattaagataaaagtaaatgaggtgctttgtacttatgccgaatcccaggctgtaatcagcagaaacaaatagaaaatctgctccaatgtgctcttgtcctaagctcctcagtagaaggaaactggaagatagaaaagccacactctatttatgaagtcttataataagagctgttaagttgagtagggtcagggttgctgcttacagtacaaattatgtattgcacaacctctgtggcttcgtttacctggtagtcattgttgatgtgtagagttgtaatgtagtttataggcagaatggaataacatgacttgaggaagtagtgcttytgtataattggcacaaaattgccatactggctactcattgtaggttgggtagggagaaaactcatgctaaagttgaccaggtgacattttttggctaaaaaaaataataataaagtcaagaaaaataaagaaaatattagcaagagggcaaaaaatagaaagaaatgatcagcgttctgtaggcactgcttcctctccacaatgctaggacatgccc

SEQ ID NO: 691179 - DNA, 594 bp, Homo sapiens
gggggtggccagctgccatgttgtgaggaagccctgtgcagacgcctgcttggcaagggaccaaaacctgccaacagtcatttgagtgagcttgcagcagatctctcattgtgtcttaacccttttatttgctaattgtggctgggagttaacaataatctytctgtgcctcggtttcttcatctgtgaaatggggacgcttttagtaaccacctcatatggtgatgtaaaattaaaggagacaatacatgacaatcatttagaacagtgcctggcacatagcaagcattccacacatgctttattactagttgtctttctgtgaccttggcttacttgatgctcagctatgggtcactcttcctcatcagcctcatcctaaagatgatgatttggtttttctctctctcactttgtattccaccagccctgaacttgttttgatctctgaccacctcttctttcatgctgtcaactactgtaattctctctgtgctggcccctgtcttacttacttcctccagttgtttctgatgcacagtcatgaaagaatagagtcctggactgggtgcagtggagcatttaagatacaat

SEQ ID NO: 691180 - DNA, 661 bp, Homo sapiens
ctatggttacaatcacatacctgcagcaattatgcatctttttttttttttttttttttttgaaacaaagtttcgtttgctctgtcacccaggctggagtgcagtggggccatgtcaactcactgcaacctctgcctcccgggttcaagcaattctcctgcctcagcctcctgagtagctgggcttacagatgcctgggcttacagtagccaccacgcctggctaattcttggttttttagtagagacgggggctcaccatctcaccatgttggccaggctagtctcgaactccaaacctcaagtgaaccgcccgccttgacctcccaaagtgctgggatttcaggcgtgagctaccgcgcccaacctgtatcatgtttttaatggaatactgtattaaacattttcygtatttccatacagtcaccaagattattgtttttaaaccaaatcaagtcccacccagttaaaaagatcattatgaatatattttaagggggtggaaaaatacaatggacagtcttttcttttaaaatgtctttgtaatattttacaagaaagtgattttagtccttaaaaagtagaaagaagaataaacagcagtacagatatatgctgacccatgaggcctggtcaattacttccatcacaataccagagct

SEQ ID NO: 691181 - DNA, 603 bp, Homo sapiens
tagttgaaatgacgtgaagttccttggttcatgtcattgtttgtaaaatcctttgaatggcatgcacaacaacatgacaattgtacttcagctttttcacttacgccctcatctgctggtttccctaaaaatgaaagaacatctrtttataatatatctaattaaataaacatcaatcattctctacagcccagttcacccaggattgggaggtttcctaagataaaagatttttagggctaacaccaggaaggtacctggcaaacctggacaagctggtcactttatctgcagcatcaaattaggacaggagagaaataagccaaaaacatttggttggacacagtggctcacgcctgttatcctagcactttgggaggccgaggcaggcacatcaattgaagtcaggagtttgagaccagcctggccaatatggtaaaaccctgtctctactaaaaatacaaaaattagccaggcgtggtagtgcacgcctgtaataccacctactcaggaggctgaggcaggagaatcgcttgaacctgggaggcagaggtagcaatgagcagaggtcatgccactgcactccagcctaggcgacagagc

SEQ ID NO: 691182 - DNA, 2522 bp, Homo sapiens
aagccctttccgtggacttccctccgacttgcctgtctggagggaaaccgaagcaacgctctgagctccgattcactgaagaaaaggaaaggaaaccgacttctgagagcaaataaagcggagccctggaagagaagaaagggcacgagcccttcctcctccctcttcctgggggtgctgctacttccccggccttgtgtgcaggaytggggccgccgttacctttcctcgacccaccagacccctcaaccacacaacccgagacgaattcccgcctcccgccccctcgactcccagcgcccaatagcccagcgagctcgaccaatcacccgccaaggccaggaatcaaccagtcccggtgcgaggtgagggggcgagaacttcggcatccaatggaagtctccgaaaaaaaaaaaaaaaaacaagggctcaaggtacgcggcggaaggttgtcgccactccagcaaatccctagtgtttgtttaaagtagaaagtcgtctcagtttgacttttgaaaccggcgatagagtctatgcagcaaattccttggaaactggaagtctcattcttcacgtccgtagaccagcggaaaggaagtatctttaagctttgccaagttctttgagcatttatcagtgccactcaatttaaattacccagctttgcagtagccaggatagcgaagactcaggcgggaattgccagactgctgagccaaacttaagtaagaaggctctgtgacatcgggctacaatctatctttcataatattcaaggctttcccggatgctaaaataagccagagacaagctctcagggtctccagtatcagatcacttctacttccattaaggcttatccgccttccatccctcctaagaccagtttattatttgccagtagtactttaatttactcaaagaaaaggaggttcatcatgatcttgccaaatcatgttatttttttaaaaaatctgtataacctaaacttggctcaaataataatgtctccaaaaggcaaaacctcatactgtttctcaaattcaagtaactagtttggggaaggagtttgctgggaagaaagagcaggagggggctagttgatttgtttgcctcattgtcaattgtgatatatcttaccaaaaatgacaaaacttgtagtcataaaaataaactctaccctttgacctagtaatctgagctccagatatttatcctaaagacgtaatctaaacgaaagaaaatgtgataccgcaattgacaataatatctattggtaatactgaaaaaaattatgaacttcccagtctagtaatatggaggtggttatgacagatgaattcaatacattatgaagccaataaacttataaaaattaaacttgcaagaaaaaatcccatataaggttaagtgaaaaaaggcaaagcaaaccccaaactgggtgttagggattcagtaatgtgaaaatacatatgaatgagcaaagatgaagtaatttactgttaagacaatgaaaggaaggataatgtttaaaaataaatccttaaaaataccttcaaattgtcatttctcttttataatttttaaaacatcaactcttggccgggcgcagtggctcacgcctgtaatcccagcactttgggaggccgaggcaggcggatcaccaggtcaggagaccaagaccatcctggctaacacggtgaaaccccgtctctactaaaaatacaaaaaattagccgggcgtggtggcgggcgcctgtagtcccagctactcgggagactgaggcaggagaatggcgtgaacccaggaggcggagcttgcagtgagccgagatggcgccactgcactccagcctgggagacagagcgagactccgtctcaaaaaaaaaaaaaatcaactcttttgagtaactgctctagtataactactctcattttcctctcctaaattactaagagtttcaactggctctcaccttgcattgccatttaatgtatgtggcataacagaaagggatacacgtaggccctggagccatacagacctcgaatacagtcccttgaaccgttcccttcaggttaactctagtggaatgaaacacaaaaactacaggttcgtttgataaagaatatgaatgtttataaaccaatattcaaaatagctgcacacatctgttttcacttgaataaaaaaacacattgtgacaaattttataaccttaacttaaaatacatgaatattaacatttactaatatatttacacattttatttacatcatcaacaaatctgatgaaaaagagcatatgtgattattttaacacagcaggttatgaccagtctttgaatattgatccaggaatgtgcactgcatttaattagaaaacatacttttaactttttctgaactcctagggcatatctattcacacaaaatatcgcaaggcctcagtttaaaaaaaaaaggagcagttgtatttaatcttaagggactacaaaactgccttgtttaaaaatatga

SEQ ID NO: 691183 - DNA, 640 bp, Homo sapiens
tgaggaatcgccacactgtcttccacaatggttgaactatttcttacttattttcttaacagcattgcccaagacctactttgctgaagaatagtggtgatagtgggaaactttgtcttgtytcacatcttgaagggaataagtatgatgcttcatcattaagtacaatgtctactgtaggttctttgtatcttatcaaattaaggaagtccttttttattcttggtgtttgaaaagttgtaatgataactaaatcttatcaatattttcaatgcattaattgagatatgcaattttttcttagttgataatgtgttgagtaaggttaatagaatttatgttgctatttaattcatacttgctttattaatttttaaatactgaaagattcagtcagtataatttaaaggattttttcatctgtgttcattagtaaaattaacctgtattttttgttatttttattgttttatctcattgtgtaagtttataatcgtttgataaaatgagctagatagcttttactcttgctttttttctgaaaaaacttttacaaaatagaactacatcttccttacaagtttgaacaaaattacctgcaaaatcatctgggacagaatcttttttgggagttgagatt

SEQ ID NO: 691184 - DNA, 640 bp, Homo sapiens
tgaggaatcgccacactgtcttccacaatggttgaactatttcttacttattttcttaacagcattgcccaagacctactttgctgaagaatagtggtgatagtgggaaactttgtcttgtttcacatcktgaagggaataagtatgatgcttcatcattaagtacaatgtctactgtaggttctttgtatcttatcaaattaaggaagtccttttttattcttggtgtttgaaaagttgtaatgataactaaatcttatcaatattttcaatgcattaattgagatatgcaattttttcttagttgataatgtgttgagtaaggttaatagaatttatgttgctatttaattcatacttgctttattaatttttaaatactgaaagattcagtcagtataatttaaaggattttttcatctgtgttcattagtaaaattaacctgtattttttgttatttttattgttttatctcattgtgtaagtttataatcgtttgataaaatgagctagatagcttttactcttgctttttttctgaaaaaacttttacaaaatagaactacatcttccttacaagtttgaacaaaattacctgcaaaatcatctgggacagaatcttttttgggagttgagatt

SEQ ID NO: 691185 - DNA, 615 bp, Homo sapiens
cccatggtttcactgaaagtcagctgtgaaacctttgttgtttctttgaagataagttccaaaaattatttataaatgtaatacaattccaatcagaatcccaataggatttttaaaaatagaaatgaacaggctgtcctgaattttacaaggaggtataaacgatcaakaatggccaggatgagtgtggtgaagaccacagcagatgccaggatttattatcaaccatttattaagacagcattacattggctcaggaatgggcaaacaaccttatatccttcttcaaacaaaaaatatgggttgcttgtctttttcatattgatttacagagttttgtttttctggatacaattttttgtaagttctatgactggcaaatgccttctagtcaagatctttttttctctcatttttacagtatgctttcttaaagagaagtgttgaaaactggaaactatttcactgttagacctatcctttcagtttttaacttttattgatggtatttttcagcgattcctcctcccctggagactacgtgggtgatatttagttattgtcttagcaaacttgtatgcttttagtcagcgaattataagctattgggtaatc

SEQ ID NO: 691186 - DNA, 1337 bp, Homo sapiens
tgcagtctccgggctgtcacgattgtgtcacaatttgtttagttaggtgcctgcttgctcgtgtggttggatctaggaaaaatcagtgctagctcccattctaagtgctacgtgcttcgtagttgcttcattgttataaaaacactgttctaggttaaagaagctgtgggtgggagaaacaacctgaccaggcttacgtaagagttgaatggtggagccggaatgtgaatgcaggtctggctggcttcagaaccaacgcagaccacctgcctctgtgcagaacgtgaaggaagacgctctggataggaacgtaccagtcaccgtcccgcagagccttcatctgcttcccaatgagacaggcaaacaggggccctgtccgagccctggggaggaagttttcagctaagcctcccagccagacatcgatgttgtcaggatgcttgtacaagtccaggatcttgtcggccacgctcctgctggcgatggctgtgctcaggtcagcgggggtctccaggcgaggcaggccgcagaactccctccactcattgtaacctgcacaggggagaggctgcagggtttctctcacagaactgaacttttgttcagcccatctcactcatgccatggtccccgagactggaagcgcagcagggcagagtcctgtcccaccctgtgacactgcctggcagtttgccaggctaggatattccagctccgacgcccggcagagtcctgtcccaccctgtgacactgcccggcagtttgccaggctaggatattccagctcggatgccgggcagagtcctgtcccaccctgtgacactgcccagcagtttgccaggctaggatattccagctcagatgccgggcagagtcctgtcccaccctgtgacactgcccggcagtttgccaggctagaatgttccagctcggacgccagagctctttttgcaggtttgttcataaaggagctggagacagcaagaatgctgagtccrtgacatctaagtgcattcctgttattgcccagcctgcacttagttcttgcctctacagggcaactgacacagctctgcatcctcttcagagtttgcctcccacaatgacatcaggagcacacacagaagccagcacccccccccccacccactcacacacacacacacaaatatctttatctgtctggccactcatctccatattgaagactggagatcttttcttcctgggagccctggtgaatccctggcctctcttctcactcctcctcctgctcactgacccacgcctcagctgctccctgcccaggcccccgtccatggtctgactctgtggct

SEQ ID NO: 691187 - DNA, 646 bp, Homo sapiens
atacaaaaattagctgggcgtgatggcgggtgcctgttatcccagctactcgggaggctggggcaggagaattgcttgaacctgggagacggaggttgccgtgagccgagatcaccccattgctctccagcctgggtgacaagagtgagacttcgtctcaaaaaaacaaaaaacaaaaaaaatcctgagcttttagaaaactgctgtcaggtgccattgagtccatttcttagcaggtggctccctggttcaccctcaggaggaacaagtgtgtgtctgactcttgtgctcctagagtcaccygccttggctggccccgtagccctggtgcttccacatctggcaagggttcccccgagcccccgtgagaagctgcgctgcctcagcctgactcctgctgtccacagtgggctctgccgccctgtgatctgcagaaaccactctcgttttctgtctccagatgggccatcccagccctctcatcaaagccaccgggaagtgctttgccccgtcaagaggctctgtgtctctccatctcagcacctccaacaaaatttcatctttatcacccaatctactgtagcctagaccatcccaaacataccccacaaatttctcagctccaggaataggtaacctgtagaca

SEQ ID NO: 691188 - DNA, 1781 bp, Homo sapiens
cctggcatctagaacaatgactgcatagaaggagctcagacttttgaggatatgaaatgatcaaactcatctctgtatcccggcatctagaacgatgactttacagaaggagtacggacttctgaggatatgaaatgatctaacgcatctctgtatcccggtatctagaacaatgactttacagaaggggcacggacttctgagaatatgaaatgatctaacgcatctctgtatcccgacatctagaaaaatgactgcacagaacgggcatggacttctgagaatatgaaatgatctaactcatctctgtatcccggcatctagaacaatgagtttacaggaggagcatagacttctgagaatatgaaatgatcgaactcatctctgtatcctggcatctagaacatgactttacagaaggagcatggacttctgagaatatgaaataatctaactcatctctgtatcccggcatctagaacaatgactgcatagaaggagctcagacttttgaggatatgaaataatcaaactcatctctgtatcccagcatccagaacaatgactttacagaaggggcacggacttctgaggatatgaaatgatcaaactcatctctgtatcccggcatctagaacaatgactttatagagggagcatggacttctgaggatatgaaatgatcaaactcatctctgtatcccaacatctagaaaaatgactttacagaaggagcatagacttctgaggatatgaaatgatctaacgcatctctgtatcccggcatctagaacaatgactttacagaaggagcacggacttctgaggatatgaaatgatcgaactcatctctgtatcccggcatctagaacaatgactgttccacagtagaaacagtatttcttaaggaaagaaacatagttggaataggtgtatagtatagtgtatttttttgagagctatcaaaaggcaaatctttccaatagtctccccagttgatgcctctcctggtcttccctcactctaatgcatccttaggatcaaggcattgatttcaaaagggttctgttaacatgcaatttgtaaaccaaaaataaaattctaatgtcctcgcctaaccacctgagtggatcccacctctcggccaagagcattccaaagttagcctgaaaagctgggtcaggtcacgatggaaggtggtgggtcagacacacctccttctacccctccagcatcaacatcaacacagaccttaagtctgataagaaacattcaccatctcttctctgtgaagctmataaaaccttggtgtccacaaccccttaacataacccagacattccgtcctactgataataattccttcagctgattgtcagtcagaaaactgttacatctacttatgacctggaagctccccaccatgtaaatctgacacgtattgattgatgtcttatgtctctctaagatgtgtaaaagcaagctgtgccccagccatcttgggcacatgtcctcaggacctcctgacactgcgtcacaggtgcatccttatccttgttaaaataaacgttctaaattgactgagatctgtcttagatacttgggttcacaaattgttactaagagagcagcacacacttcttactacgcacttggtatccacccccactgccatgtcttccccaggaattcctgcccattttagacatattaaagtgtgcgtgagtttatgagaaatagtgtttctctttcttttccctttgattcaatttttagaaaat

SEQ ID NO: 691189 - DNA, 1781 bp, Homo sapiens
cctggcatctagaacaatgactgcatagaaggagctcagacttttgaggatatgaaatgatcaaactcatctctgtatcccggcatctagaacgatgactttacagaaggagtacggacttctgaggatatgaaatgatctaacgcatctctgtatcccggtatctagaacaatgactttacagaaggggcacggacttctgagaatatgaaatgatctaacgcatctctgtatcccgacatctagaaaaatgactgcacagaacgggcatggacttctgagaatatgaaatgatctaactcatctctgtatcccggcatctagaacaatgagtttacaggaggagcatagacttctgagaatatgaaatgatcgaactcatctctgtatcctggcatctagaacatgactttacagaaggagcatggacttctgagaatatgaaataatctaactcatctctgtatcccggcatctagaacaatgactgcatagaaggagctcagacttttgaggatatgaaataatcaaactcatctctgtatcccagcatccagaacaatgactttacagaaggggcacggacttctgaggatatgaaatgatcaaactcatctctgtatcccggcatctagaacaatgactttatagagggagcatggacttctgaggatatgaaatgatcaaactcatctctgtatcccaacatctagaaaaatgactttacagaaggagcatagacttctgaggatatgaaatgatctaacgcatctctgtatcccggcatctagaacaatgactttacagaaggagcacggacttctgaggatatgaaatgatcgaactcatctctgtatcccggcatctagaacaatgactgttccacagtagaaacagtatttcttaaggaaagaaacatagttggaataggtgtatagtatagtgtatttttttgagagctatcaaaaggcaaatctttccaatagtctccccagttgatgcctctcctggtcttccctcactctaatgcatccttaggatcaaggcattgatttcaaaagggttctgttaacatgcaatttgtaaaccaaaaataaaattctaatgtcctcgcctaaccacctgagtggatcccacctctcggccaagagcattccaaagttagcctgaaaagctgggtcaggtcacgatggaaggtggtgggtcagacacacctccttctacccctccagcatcaacatcaacacagaccttaagtctgataagaaacattcaccatctcttctctgtgaagctcataaaaccttggtgtccayaaccccttaacataacccagacattccgtcctactgataataattccttcagctgattgtcagtcagaaaactgttacatctacttatgacctggaagctccccaccatgtaaatctgacacgtattgattgatgtcttatgtctctctaagatgtgtaaaagcaagctgtgccccagccatcttgggcacatgtcctcaggacctcctgacactgcgtcacaggtgcatccttatccttgttaaaataaacgttctaaattgactgagatctgtcttagatacttgggttcacaaattgttactaagagagcagcacacacttcttactacgcacttggtatccacccccactgccatgtcttccccaggaattcctgcccattttagacatattaaagtgtgcgtgagtttatgagaaatagtgtttctctttcttttccctttgattcaatttttagaaaat

SEQ ID NO: 691190 - DNA, 1413 bp, Homo sapiens
tccgcaaggctcacctctgcatcgtggcgtacatggcggtgtccaccaggcgcttgctttcctccaagacgctagagacacgagactcctcaggctttcctacggaacagaatgtcacacagtcaaagcgcaatgacagttcagcgattcactgacagtgttgctttgttcctcaagcccatcttgctgcggtgatgcccacgtggcttccgggacaggcaggcagccaggtcccggggtcgcttccctccacaggccttcacttccccgctacagaggggcgtccacccccactgcacggagctgcctggaggatgggatcagagctactcaccttaatttcgcacttgcccaaaccacttcaaatgattccgaataacttttgttctgaacattcatcactggttacctgagccagtggtaaagttgataagatttgcctatcttgtgtayttaataaaagataaaataattccactataccagtagtttccaatgaaagcactcctgtgttatttgttttagcacctggaatgtgtaagaggttaagatcccatttctgggtatcaccgtgaagttccggacgcggtaacaggaagacggcaagtgtttccggccatgttcacacgtcagtcctgttactaaattcacctgcgtagcatcaatacttcaccaaaggaatgaattggctcctaaaagcaaatagaagtccctgaggggcacaccaggctctcgctctccccatggcccagcgcggcgcctgcacgaggtcggtccagcgcggcgcctgcacgaggtcggtccaggagaggcgcctgcacgaggtctgtccaggagaggcgcctgcggggtcttcaaggcttcagtcccacgcgccttccatgctcgtccccacccaaggagcacacaaattccccagcatcatttcttcctgctcactctgccctgctccgtctgttccattggccacccagtttcttacagtgtgatacagcaaagttaagaaaacctccgtgctggatctctcttgggttctgggatgagtaaccagtggttaagcacttggggcagagggtgacccctcagggttgggcagagagcaatgaacagagccccccggtgtggggctccctggggcaagggcaggagggagggaggaacacctagcacgggctcacagctcgccggggacccccagcacagccgtcagagctgcaggctctgggtgtggaatctgaagaggggacctggctttacgccaatgtgtgcgtgctggggacagtgcaatgtgggacgatgccaccaagagtgagtaggagccgagaggggaggggcggcctgggcgtcgcaggatcggtggcaggtgtggacctcaaggaccagcattccgggctttatggagatttctttcag

SEQ ID NO: 691191 - DNA, 1413 bp, Homo sapiens
tccgcaaggctcacctctgcatcgtggcgtacatggcggtgtccaccaggcgcttgctttcctccaagacgctagagacacgagactcctcaggctttcctacggaacagaatgtcacacagtcaaagcgcaatgacagttcagcgattcactgacagtgttgctttgttcctcaagcccatcttgctgcggtgatgcccacgtggcttccgggacaggcaggcagccaggtcccggggtcgcttccctccacaggccttcacttccccgctacagaggggcgtccacccccactgcacggagctgcctggaggatgggatcagagctactcaccttaatttcgcacttgcccaaaccacttcaaatgattccgaataacttttgttctgaacattcatcactggttacctgagccagtggtaaagttgataagatttgcctatcttgtgtatttaataaaagataaaataattccactataccagtagtttccaatgaaagcactcctgtgttatttgttttagcacctggaatgtgtaagaggttaagatcccatttctgggtatcamcgtgaagttccggacgcggtaacaggaagacggcaagtgtttccggccatgttcacacgtcagtcctgttactaaattcacctgcgtagcatcaatacttcaccaaaggaatgaattggctcctaaaagcaaatagaagtccctgaggggcacaccaggctctcgctctccccatggcccagcgcggcgcctgcacgaggtcggtccagcgcggcgcctgcacgaggtcggtccaggagaggcgcctgcacgaggtctgtccaggagaggcgcctgcggggtcttcaaggcttcagtcccacgcgccttccatgctcgtccccacccaaggagcacacaaattccccagcatcatttcttcctgctcactctgccctgctccgtctgttccattggccacccagtttcttacagtgtgatacagcaaagttaagaaaacctccgtgctggatctctcttgggttctgggatgagtaaccagtggttaagcacttggggcagagggtgacccctcagggttgggcagagagcaatgaacagagccccccggtgtggggctccctggggcaagggcaggagggagggaggaacacctagcacgggctcacagctcgccggggacccccagcacagccgtcagagctgcaggctctgggtgtggaatctgaagaggggacctggctttacgccaatgtgtgcgtgctggggacagtgcaatgtgggacgatgccaccaagagtgagtaggagccgagaggggaggggcggcctgggcgtcgcaggatcggtggcaggtgtggacctcaaggaccagcattccgggctttatggagatttctttcag

SEQ ID NO: 691192 - DNA, 582 bp, Homo sapiens
taaaaactttaataactaataattaaaaccctcagctaaccatgaaatagactaagcaataaaaattgaataggctgtaagcaaataacttcaaattagctggttctgtaattagaactatgaaatgtataattgtaacaaaaactgatacgactataatttcctattcataaacaattttgtatttgcaaacatccctataaacatctatcacattatcattataataaatattagtgtctgtagcccacactcacaagaaaaatagcaattttctttaagattgacagccatagatgaaatgaatacctttccaagggaacttgggagagaaatatttggctatagttgattttagactctggagttctaaaaatacrctaccaagcaccaatttagtttgcaaaatgccacttagctgaaagatatgaaaaagtggatgttaatgtgccatcacacgcttgagaacacaggcagttacagagtcagagaccataacagggaagaccctggggctccagggcagaaacatcctggaccaaaaccacagcacccccagacctgtgattaggtgagctcaga

SEQ ID NO: 691193 - DNA, 1163 bp, Homo sapiens
ttttgtattttttagtaaagacagggttttatcatgttggccaggttggtctcgaactcctgacctcaggtgatacacctgcctcagcctccccaagtcttgggattacaggcrtgagccactgcgcctggcctaaacaaacatttagtaagctcctaccatgtgccagtgggaacctgtggtgaataagacagtccctgccctcccagggcttacagtctgtgaggagcatagtgggtaacccaagcgggtctcacacaatgtggtaaatgctaggactaaggagcagggggacagagggactgttatgggtgtttagggatggaccctcaccctgatttaggggccagggaaaacttctccaaaagtggcatttaagctgagacctgaaggaggagtgggagccagccaggtgaaggggcagtgcaggaagaggcaagtgctccaggaaatgtgaatgagcaaaggcctagacaaatgtgaatatcatgtggtcgggaacctaaatcagtcctgtagagcaggaatgccctgtgagggtagggtgcacgctcagtgaatgtgtgttggatggatggggccatgttaaacttctccatgtacccttagggcttcacttatgatagggcatcaagaaacatttattacatgaataaatgggttttgtttcatatgtttctaagacctttcttctcccacgggtaggaattgtattggtttcctctccactcagcacaggtcaatccatgtttagtaaacaataggatgagaaactttccctcttgggctgctcttattttctttccctaaagtttctgcaccagatttcctttctgacatcactgactggcctggtacagggtggagcagtggacttggtatactggtggctctagagtttactaaccaagccagaactaaatgagaggaggacagccgaggaaggcgccaccaattcggcctgctgagctgacaggccagaggctgctgaagctctggggattcttgtaaattgcatttgctaaattgtttgagaatactcaattctgctatagaagaaaagaaaaccaatggaatggatgaaacttatgcgttaagtataggctagttactttagtgacacgttgaacaagtaaagttagtagagcatgtgtgggtgaaca

SEQ ID NO: 691194 - DNA, 1163 bp, Homo sapiens
ttttgtattttttagtaaagacagggttttatcatgttggccaggttggtctcgaactcctgacctcaggtgatacacctgcctcagcctccccaagtcttgggattacaggcgtgagccactgcgcctggcctaaacaaacatttagtaagctcctaccatgtgccagtgggaacctgtggtgaataagacagtccctgccctcccagggcttacagtctgtgaggagcayagtgggtaacccaagcgggtctcacacaatgtggtaaatgctaggactaaggagcagggggacagagggactgttatgggtgtttagggatggaccctcaccctgatttaggggccagggaaaacttctccaaaagtggcatttaagctgagacctgaaggaggagtgggagccagccaggtgaaggggcagtgcaggaagaggcaagtgctccaggaaatgtgaatgagcaaaggcctagacaaatgtgaatatcatgtggtcgggaacctaaatcagtcctgtagagcaggaatgccctgtgagggtagggtgcacgctcagtgaatgtgtgttggatggatggggccatgttaaacttctccatgtacccttagggcttcacttatgatagggcatcaagaaacatttattacatgaataaatgggttttgtttcatatgtttctaagacctttcttctcccacgggtaggaattgtattggtttcctctccactcagcacaggtcaatccatgtttagtaaacaataggatgagaaactttccctcttgggctgctcttattttctttccctaaagtttctgcaccagatttcctttctgacatcactgactggcctggtacagggtggagcagtggacttggtatactggtggctctagagtttactaaccaagccagaactaaatgagaggaggacagccgaggaaggcgccaccaattcggcctgctgagctgacaggccagaggctgctgaagctctggggattcttgtaaattgcatttgctaaattgtttgagaatactcaattctgctatagaagaaaagaaaaccaatggaatggatgaaacttatgcgttaagtataggctagttactttagtgacacgttgaacaagtaaagttagtagagcatgtgtgggtgaaca

SEQ ID NO: 691195 - DNA, 321 bp, Homo sapiens
tcagtccacctgcactcaggtgattaaaagctttattgctcacacaaagcctgtttggtggtctcttcacacggacgcgcatgaaaagaggarcttcgtattttttttaaatctactccgcttctcctctgtgtttctagtttaaagaatggaaacctgggtgtcatccttgatttttccctctctcacgtcccctatagcccatcagacatcaagtcttgtaaattccacctcctacctctgtctatcctcactgccattctcccatcagacatcaagtcttgtaaattccacctcctacctctgtctgtcctcactgcc

SEQ ID NO: 691196 - DNA, 1162 bp, Homo sapiens
tttcttcttttttttgggggacagagtttcgctcctgttgccaaggctggagtgcaatgggagatcttggctcacgacaacctctgcctctcgggttcaagcaattcttctaccacagcctccaagtagctggggttacaggcatgcaccaccatacccagctaattttgtatttttagtacagacagagtttctccatgttggtcaggctggtctcgaactcccaacctcaggtgatccacccatcttggcctcccaaagtgctgggattacaggcatgagccactgcgcccggacttccagatttattttcaatcaatgtttcattttccacttccttcctatgctggcttgtaggttttccaggctatttacctttatttagtgtcaaaaattcttttgggaacttttgagttgtcaaccaatagttgtaagcatattggatattgctgtttttctcccagtgctctggttataatctctcctattaataccttgtagtcttattgttgtagttttttttctattaatttctgagatataagaattagaattgtcaaattgtggatttatgcatttatcmttttaattcaataacttttgcttcatgtattttgttatttttcttaggtgtatgcatgcttatgcttattaggttttctaagcaaatggacttattagtataaaacatccttctttatccctggtgatgcttgtctttcttgtagtctgtcttatctgccattaatacactggctgcagtttttgataacaaagatttgcatagtgtatatttgtccatcttttcagttcaaatctatttatatctttatctcataagtgtatttcgttttaaaagtggttattgaggtttcctttttacttattttgacagtctctgttccgccttcctcatcttcttctggattatggtagttttggtttgtttgtttgttttatggggttttctttttgtttttttttagtatggattttgtaccttgttttttttttaactatgactctttgtttcatttatttatttttggtgagttgttcagaaattaaaatataaatacttaatgtatattaaatatcataacactgtatataaaatataaaaaccttaccttaccatcctctcatcttttgtgccatgttg

SEQ ID NO: 691197 - DNA, 1162 bp, Homo sapiens
tttcttcttttttttgggggacagagtttcgctcctgttgccaaggctggagtgcaatgggagatcttggctcacgacaacctctgcctctcgggttcaagcaattcttctaccacagcctccaagtagctggggttacaggcatgcaccaccatacccagctaattttgtatttttagtacagacagagtttctccatgttggtcaggctggtctcgaactcccaacctcaggtgatccacccatcttggcctcccaaagtgctgggattacaggcatgagccactgcgcccggacttccagatttattttcaatcaatgtttcattttccacttccttcctatgctggcttgtaggttttccaggctatttacctttatttagtgtcaaaaattcttttgggaacttttgagttgtcaaccaatagttgtaagcatattggatattgctgtttttctcccagtgctctggttataatctctcctattaataccttgtagtcttattgttgtagttttttttctattaatttctgagatataagaattagaattgtcaaattgtggatttatgcatttatcattttaattcaataacttttgcttcatgtattttgttatttttcttaggtgtatgcatgcttatgcttattaggttttctaagcaaatggacttattagyataaaacatccttctttatccctggtgatgcttgtctttcttgtagtctgtcttatctgccattaatacactggctgcagtttttgataacaaagatttgcatagtgtatatttgtccatcttttcagttcaaatctatttatatctttatctcataagtgtatttcgttttaaaagtggttattgaggtttcctttttacttattttgacagtctctgttccgccttcctcatcttcttctggattatggtagttttggtttgtttgtttgttttatggggttttctttttgtttttttttagtatggattttgtaccttgttttttttttaactatgactctttgtttcatttatttatttttggtgagttgttcagaaattaaaatataaatacttaatgtatattaaatatcataacactgtatataaaatataaaaaccttaccttaccatcctctcatcttttgtgccatgttg

SEQ ID NO: 691198 - DNA, 3122 bp, Homo sapiens
  misc_feature 299, 300, 301, 302, 303, 304, 305, 306, 307, 308, 309, 310,311, 312, 313, 314, 315, 316, 317, 318, 319, 320, 321, 322,323, 324, 325, 326, 327, 328, 329, 330, 331, 332, 333, 334,335, 336, 337, 338, 339, 340, 341, 342, 343, 344, 345: n = A,T,C or G
  misc_feature 346, 347, 348, 349, 350, 351, 352, 353, 354, 355, 356, 357,358, 359, 360, 361, 362, 363, 364, 365, 366, 367, 368, 369,370, 371, 372, 373, 374, 375, 376, 377, 378, 379, 380, 381,382, 383, 384, 385, 386, 387, 388, 389, 390, 391, 392: n = A,T,C or G
  misc_feature 393, 394, 395, 396, 397, 398: n = A,T,C or G
aaaacacatcactgtgacatctttctatcctcatattttcaagcttgcctcttttctgttctttgtggatataacttaagtgattgtgttattcataaagatttagaaatttcaatattcccaacactctgactatgtttctgattttataacagtagccatttttgaatgtcagatgtttggcctgttttatatgaataaagtttatttataaaatattataaaaataagtaaatagaacattaataataaaaaaagattttctgtatcttaagattatttttcagaaaacagaaacnnnnnnnnnnnnnnnnnnnnnnnnnnnnnnnnnnnnnnnnnnnnnnnnnnnnnnnnnnnnnnnnnnnnnnnnnnnnnnnnnnnnnnnnnnnnnnnnnnnngcaaactaatgcaggaacagaaaatcaaatgccacatattcttactcatttgtgggaactaaacaatgaaaactcatggacacaaagaggagaataacagacaccagggtctacttgagggtggagtgtggcaggagggagatgaccaaaaaactacctctcgagtattttgcttattatgtggctgatgaagtaatctgtagtccaaacctccatgacacagtttacctatataataaacctacacatgaacttctgaagctaaaataaaagttcattaaaaagaaaaggaaatgccttttccctcacatttgccaatgccggttatttttcaaataaattaatgactggaaaaaacggtaactcattgtttactgattttcatttttctgattaacaggcaaggctgaatattctagtaaaagtataaaatttgttcatcatgaaagcccaaattaggattagtttgacagcatatagttatctcctataggcttacctgtgatactcttcattctcagtgtcaggaaattgctgattttcaggttttctgctcttcctttgtggaattaatccatcatcaccattgccagcactggcaccattagtcaggttttctggtaatcccacaggattacttccatgcttctttatttcttcttcaaccttgagtggaagtttgatattaaggatggttatcactttattgaataaaaataacctttttaattgattttatcaattgactcagtttgccattattttagtcattaaaaatatttcacacttaaatttgatcatatatacagaactataaccgtataattttaagatgtaattatcatgtcattagtatatcactgaaatttttgtagtttgcttgattccagctgtttgactgaataaaacagaattttccaaaattcaaaaagggccctccttcattttgtgcttttattcccaaaaactcttcagaatcttatatatgaatttaccccatttgactcgtgggaacacaaaaataaaacgacatagacacaaaatgtgtcttctgtctttaccacctagattttacattaaacactcagatgtagaggatgagacactggggggcttcaggaatagaaaggaagatggcccttttctgcactaagatattctcctctcccactgcctttgatcgttcttttttcatttggttcctggatatcaaaaacatgatggtgctcactgaaacatgaaaaccaaagtttgccacaacacaaggagcagagtgaaactgctgaggtgcaagcatggaattccagaaaattagatgctccccaaatttcacattcaatagctatacaattttccagctggaaattacaaagaataagtaattatcttctttagccacattatctagtgataatcagactaaaaccaagaaagataaaaggattggtccaaatctcctaaagaggcattacctagcattttatggcaccattcaggattgttccataataatgaaagaatctctctagggtttgtatctcttgaaaactcaatgtacagaattctttctgagttaaatattaaatttttcactggtgatttatgctacttacatgataggatcatgtatgcgtacacttactacactttgttaaacagcataacataaaaatctaattccacagaaacatttgaacataaaggtatacctctctatcacagtccttatttatttctggttcttgagacattttctgcagatgcaaaaatagaaggttaatttgcttgttgtatttccgtgtatgtctcctcttttggaatgcatgttaaaataattttattcttaagtaatcaagtatggacatgaaaaattagaaaataaaataaaatttaacttaaaataattaaataaataaataattaaaattaagaattaactttttaatctatgtttagctactgccacatcattggcttctgactaacatgggaaaataattcaccttagacaaagggagaataaaaacatgaaccagcaaacttaactttgtcaccatttgtttggactaaacttaatttgttatgtgttaaatctaccaaaaatgaattagcagatgatttgtagtgttccaagggcttcctcacttgaaaagagtatatctcatgaaaccctaactagtgagcccctatagtgcactgaagtgctttttaaaaagattcctaattggattgtaggcacgctttaaattattaggagctgaaatcaacaccaaagaggaagaaatgcaaattcttaaattttaattgaaattatatgctgtaatatgatagtgttatgtatctagatgatctgcttaagtccagttctaatatattctaaggtgtactaattacagtggataaaaattttttaataatctgtactgattttctgcaactgaaataaggtagaaggttattgtgtttgtgcactaacaccaaatgtcccattctgcaagatatgattcttgtaataggcagttgggttgcttttatgacctggttccctccctgaacagaaatgctgaggtcagtgagagaccacaaggcagaatatgtctttaaccttggtatcwgtgactgacaatataaaactgcagattttcaatcactggccgtgattattctttaaccatgaatccagctcagggaccttcagtgttacattgttcacagttctattgc

SEQ ID NO: 691199 - DNA, 606 bp, Homo sapiens
tatagctggacacattgttcataggagcccagctggtaaagtaaaaatattccaagactgtgctgataagctacttcttccctgcatcctgggctggtgagaagctaaagaggaatgaatgctctgcctgtgaagaggccgcactgcagagaagaggaggcagagatgcagtcgtcacggccctaagaccctgcctggacccggttttgcaagtcgagggaagagttttgcacaaattctcactgggagcattgtcagggctgcagccacatcacttttttttgatctgagtccttttaacattagctatgatgtcaaaaaagatgaaattgaagttgycaacatctggtggaaggcaaaaaccagtgaatttctacccagggagagttcctctgcagggtccccgcttctggtggcctggagttggggaggcctctggagcaagtcaggggattaaattctgggttttcttccattttattattttcctattttgacatctttgaaaaatggctcagcctcatagtgtatgggtcttctgattgcttttgtcttgattttattctgactgaggggcaatggccactgtgggctcctcatccagga

SEQ ID NO: 691200 - DNA, 606 bp, Homo sapiens
tatagctggacacattgttcataggagcccagctggtaaagtaaaaatattccaagactgtgctgataagctacttcttccctgcatcctgggctggtgagaagctaaagaggaatgaatgctctgcctgtgaagaggccgcactgcagagaagaggaggcagagatgcagtcgtcacggccctaagaccctgcctggacccggttttgcaagtcgagggaagagttttgcacaaattctcactgggagcattgtcagggctgcagccacatcacttttttttgatctgagtccttttaacattagctatgatgtcaaaaaagatgaaattgaagttgtcaacatctggtggaaggcaaaaaccagtgaatttctacccagggagagttcctctgcagggtccccgcttctggtggcctggagttggggaggcctctggagcaagtcaggggattaaattctgggttttcttccattttwttattttcctattttgacatctttgaaaaatggctcagcctcatagtgtatgggtcttctgattgcttttgtcttgattttattctgactgaggggcaatggccactgtgggctcctcatccagga

SEQ ID NO: 691201 - DNA, 1275 bp, Homo sapiens
ggccaacatggtgaaacctcatctctaccaacaatacaaaaattagctgggtgtggtggcacgcacctgtaaccagctacttgagaagctcaggtaagagaatctcttgaacctgggaggcggtgcttgcagtaagccgagattgcgctactgcactccagcctgggtgacagagtgagacgccacctcagtcaaaaaaaaaaaagaaaaatgaatatagaaaaaaacgacagacgctaaaagctaagaaaatagtgtgttcattttggaatctaattcaaaattcattataatgaattttaacgggccaccaaaggtatgtgttgaagttcactgaatattattcaatgtttgagaattactgacagcacatatatttcatttgtagcaatgtttgatttgttttgcatccatatatttgcatttatttaaaacaaaaaacatcaaagtatatttcatctgttatttggaaaaaacattgagtaactaattgtccaaatatagctattttctaatttttaattaaaaatgcttcctgtttaaaaaaataacttatttcaaaataactgacatttaatgtatttacattttttaaagtgttcacgcacatctatttaatttctagatgtcttgaaggaatcgtcactgtatctggaagccagatgccaaagatgttcagttattatcaatgcatctatgcataaaggattgaaaatgattcttcatgccataatttatctaaatgttcattcctttggaaaactgttttccaccaatagtaacaagacttggaacaaaataaaatagcaatatcatatgcattttctatttctgcacttttccacttctggaaatagtcatagaatcatcttgtgacagattaatatcatccatgatcctaagccactaagaataagtgttagattctttgggttaaattgtcataaggactaaatttatttttttaaccaattccctaaagaatcaactgatatttctgacatagttttacagcatatgtatcacctctccatccattttgccttaattctatttctttttatccttcactggtgaggatgagaaaacctggatgcatatgggtatggttgatttgaaaagtactttttaaacatttggaagtttttcaaaaccaaaaacatatttgccaagtgatctttttcccctatattttaaatccatrtgcaacttaaaagaaacttagaccatatgctagttcagattcacttatattaaaatcatgaaaattttatt

SEQ ID NO: 691202 - DNA, 3118 bp, Homo sapiens
aatagtttggcccatctgtggtgatgactgttctggaagatctttctgatgttgaataactaatattgtgtttcaatgttactattaggttggtgcaaaaataattgcgatttttgccattaatcacaactacatttgtgcgaacctaatagtaatttaacattctgtatctaacatttgtggacactgatcgaatatgcaatattctggggagaagttggtggaagagatgtgtgttgttttgtgaaagatagtattctgagggaaggcagaaaagggatatacatataagaaaatagtggatcttgatcagatgcacacttgttcctatttacaagaagtctactctgtgttactgaacaaatcaacttacatgaagtcaactaattccaaagaatttaccgtctagagaaattcacatttgtaataataaatacttttcttaatgacagaaattttataatatgtcttttttactttatagctataaccgtagagttataaaatctaaatacagacaagcctacccagtgtttgattatattcaatgatgtttaaaagtaatggcctctcttttgttcttwctgggaaaattatcattagcacagtgcttcatgcaggctcttattacttctatctcccattgttatgattggcaaagcacaaagccatactcaaattggaatgcttgggcacattgcagtatttatcacagggtggactggatactgagtttcttaatttataaatatttctttccaatgcaaaattcatgaaggcttaatgttgggaaatgtctgaatggctataaattcccttcctaattccctcccctcaatgcatacccatttttttttggctcattcttagaactgtagctgttcttgaatctttgatgagttgaagctaatccacattcggattttacaatctcatataattgccaaaattctacccttcaaaacacttgtttctttcttttttttctcttacatttcctcaaagaaaattagtgaaaaaacaattttttatttggtctgaaactttatggtggaaatctgaggacaggaagaaatttagggacttgttcatgcacttttgatttggcgaatgcctggaatatatttttttctctctgcacaatgcaaagtagttgcactcacaaagtatcaattagaaaaagaaattctttccacatttcatcagagttttaagtggttacaccacaataatccccagctatttgggaaatggtaaaaaaaaaaaaaaacaactttgaagatcaagccatcattattattttcactaaaacctaaaaattcagccacaatatgtcaaaccagttgggacaggacttccttccactaatttagtttttactgctggatacctgatgggctacttactatatcaggtgtctcatagggcaaattgtacctggagataaaaaaaagaagaaaaaaacaggctccaccccctagcagcagaatacagcagaacatttaggtacccacagaacataaaccaaaatggactgtatcctggattttaacaaacattaagaattttttaaaaactgaaatcctgtagaatgtatcctccagccaaaatggcatcaaattaaaaatataaaagtaaaataacagcagaatcttaaatacttgaaaaataaacagcatacttttttagttcttttttttacatttttatttattttaagttctggggtaggtgtgaaggatgtgcaggtttgttacataggtaaatttgtgccatggtggttttccctacctatcaacccatcacctcggtttaagcccagcatgcattagagatttttcccaatgctcttcctctccctcccccatccacaggccccagtgtgtgttgcttacttccctgtgtccatgtgttctcattgttcagctcctacttataagtgagaacattagatgtttggctttctgtttctgcattagtttcctgaggataatggcttcctgttccatccatgtccctgcaatggacatgatctccttcatttttatgggtgcatagtattccatgttgtatgggtactgcattttcttcatccagtctattaccaatgggcatttaggttgattccatgtctttgctattgtgaatagtgctaaacagcaagcacacttctaaggagaacgtctcaagggaaacaattaaatatattaaactgaataaaaataaaaatacaacatatcaaacttgatttaacacagttgacgtcagtgctgagaggaaaatgtatttcactaaatatatataatagaaaagtagaaatctctcaaataaaaattcaagctatcacatcaagaaagtagaaaatagtagcaaaataaaatcaaaacaaatataagaaagaatataataaggataagagcagaaataaatgaaacagccaaaagaaaacaacaaagaaaagcaaagaaataaagctggttctttgaaaatatctataaaattgacaaaccttaactaataatgataaagaaaaaagggatgtcataaattaccagtttcatgaatgcaatgggctaacattagcagtagaactcagcaatgtacacaaagaattacacagcatgtcccagtgacgtttactccagtgactgcacacctagacattcatcccactgaaataaaaactttttttttgcacttgcaattggcttcccctctgcttttgttggcaagagcaggtcggtgtcccaggcttagaatccatttttctctctctccgtctgtctctctgtctccgtctctgtctttgtctctgtctctctctctctctctttctttttttgacagagtcttgctttgtcacccaggttgcagtgatgcgatctcgggctcactgcaagctccgcctcccaggttcacgccattctcctgcctcccgagtagctgggactacaggcgcccaccaccatgcccgctagtattttgtatttttagtagagatgaggtttcaccgtgttagccaggatggtctttatctcctgaccttatgatccgcccgcctcagcctcccaaagtgctgggattacacgcgtgagccacagtgcccggccagaatgca

SEQ ID NO: 691203 - DNA, 1640 bp, Homo sapiens
atttttaatgtacacattttaaaacaatgttctatacactatagaaaggtgtatattgagaactaagtcccataatatatcaacttctgggctaaatatttttcaaataaaatccaatatggattttatatcgatgtgtaccctatgtaaacacgttctttactgagtaaccttaaaaggaaactgaaatgggaagtatggttcatatctttgaataggaaggttcgtttttcttaagatgtgagctttttctgtgtttatcacttttacataagccaaataaaaatagcaaagtcttagtgtctttaaattgcacatgatgtattttatcattgtgataaattgattttttgtaacagaatggaaaaagacttgcttttscagatatcaaaatgtgcgtgtgttatttccacaaattgtttactaacagctgaaaagacataagtgaacagaacagaataggaaatccagaaatacccaaatatatgtaagaatttagcacttgataatggtgatgtttcatattggtaaaacaaggtgaattattcataaattaaatgcatgctgtttggagaaaactacctagatttttatgtcacaaaaataagttcctggagtatagattaaaaattttaaagatacaaaaggagaaaagtaccagaagaaaacacaaatgcctatttatatgtgcaaatatttatttatttttatgagacagactctcactccatagcccaggctggagtgcagtggtgcaatatcagctcactacaacctctggttcctggttcaagtaattctttgcctcagcctaccaagtagctgggattacaggcacccaccaccatgcctggctaattttttgtgttcttaatcaagacgggatttcaccatctttgccaggctggtcttgaactcctgtccttgtgatccacccacctcagcctcccaaagtgctgagattacagtcatgagccactgaaaccggcatatatatgcagatataataaaataagctcaatttaaaattgggcaaggtacttttttgcatgtctaccagtgacctgtgtacataggaaaacatagcattcctgctaagagaaggaatttaagttagaagaggaatgaaagactattttctgtttaagttagaagaggaatgaaaggccagccatggtggctcatgcctgtaatcccagcactttgggaggccaaggcagttggatcacgaggtcaggagtttgatactagcctggccagcatggtgaaacccatttctactaaaaatacaaagaattagctgggcatggtggcatgcacctgtaatcctagctactcaggaggctgaggcaggagaattgcttgaaccagggagatggaggttgcagtgagctgagattgcaccactacactccagcctgggtgatggagtgagactccatctcaaaaaaataaataaataaaaataaataaataaatataaaggaatgaaatactgttttgtgtccacaaagtttgtgagggtgaagaacagtggtacttatatacctgctgaaagtttaagttgctgcgacttttcaaatagacactttgatggtaagaaccacatttttaaaatgtgtatgccttttacccatctg

SEQ ID NO: 691204 - DNA, 1640 bp, Homo sapiens
atttttaatgtacacattttaaaacaatgttctatacactatagaaaggtgtatattgagaactaagtcccataatatatcaacttctgggctaaatatttttcaaataaaatccaatatggattttatatcgatgtgtaccctatgtaaacacgttctttactgagtaaccttaaaaggaaactgaaatgggaagtatggttcatatctttgaataggaaggttcgtttttcttaagatgtgagctttttctgtgtttatcacttttacataagccaaataaaaatagcaaagtcttagtgtctttaaattgcacatgatgtattttatcattgtgataaattgattttttgtaacagaatggaaaaagacttgcttttccagatatcaaaatgtgcgtgtgttatttccacaaattgtttactaacagctgaaaagacataagtgaacagaacagaataggaaatccagaaatacccaaatatatgtaagaatttagcacttgataatggtgatgtttcatattggtaaaacaaggtgaattattcataaattaaatgcatgctgtttggagaaaactacctagatttttatgtcacaaaaataagttcctggagtatagattaaaaattttaaagatacaaaaggagaaaagtaccagaagaaaacacaaatgcctatttatatgtgcaaatatttatttatttttatgagacagactctcactccatagcccaggctggagtgcagtggtgcaatatcagctcactacaacctctggttcctggttcaagtaattctttgcctcagcctaccaagtagctgggattacaggcacccaccaccatgcctggctaattttttgtgttcttaatcaagacgggatttcaccatctttgccaggctggtcttgaactcctgtccttgtgatccacccacctcagcctcccaaagtgctgagattacagtcatgagccactgaaaccggcatatatatgcagatataataaaataagctcaatttaaaattgggcaaggtacttttttgcatgtctaccagtgacctgtgtacataggaaaacatagcattcctgctaagagaaggaatttaagttagaagaggaatgaaagactattttctgtttaagttagaagaggaatgaaaggccagccatggtggctcatgcctgtaatcccagcactttgggaggccaaggcagktggatcacgaggtcaggagtttgatactagcctggccagcatggtgaaacccatttctactaaaaatacaaagaattagctgggcatggtggcatgcacctgtaatcctagctactcaggaggctgaggcaggagaattgcttgaaccagggagatggaggttgcagtgagctgagattgcaccactacactccagcctgggtgatggagtgagactccatctcaaaaaaataaataaataaaaataaataaataaatataaaggaatgaaatactgttttgtgtccacaaagtttgtgagggtgaagaacagtggtacttatatacctgctgaaagtttaagttgctgcgacttttcaaatagacactttgatggtaagaaccacatttttaaaatgtgtatgccttttacccatctg

SEQ ID NO: 691205 - DNA, 1640 bp, Homo sapiens
atttttaatgtacacattttaaaacaatgttctatacactatagaaaggtgtatattgagaactaagtcccataatatatcaacttctgggctaaatatttttcaaataaaatccaatatggattttatatcgatgtgtaccctatgtaaacacgttctttactgagtaaccttaaaaggaaactgaaatgggaagtatggttcatatctttgaataggaaggttcgtttttcttaagatgtgagctttttctgtgtttatcacttttacataagccaaataaaaatagcaaagtcttagtgtctttaaattgcacatgatgtattttatcattgtgataaattgattttttgtaacagaatggaaaaagacttgcttttccagatatcaaaatgtgcgtgtgttatttccacaaattgtttactaacagctgaaaagacataagtgaacagaacagaataggaaatccagaaatacccaaatatatgtaagaatttagcacttgataatggtgatgtttcatattggtaaaacaaggtgaattattcataaattaaatgcatgctgtttggagaaaactacctagatttttatgtcacaaaaataagttcctggagtatagattaaaaattttaaagatacaaaaggagaaaagtaccagaagaaaacacaaatgcctatttatatgtgcaaatatttatttatttttatgagacagactctcactccatagcccaggctggagtgcagtggtgcaatatcagctcactacaacctctggttcctggttcaagtaattctttgcctcagcctaccaagtagctgggattacaggcacccaccaccatgcctggctaattttttgtgttcttaatcaagacgggatttcaccatctttgccaggctggtcttgaactcctgtccttgtgatccacccacctcagcctcccaaagtgctgagattacagtcatgagccactgaaaccggcatatatatgcagatataataaaataagctcaatttaaaattgggcaaggtacttttttgcatgtctaccagtgacctgtgtacataggaaaacatagcattcctgctaagagaaggaatttaagttagaagaggaatgaaagactattttctgtttaagttagaagaggaatgaaaggccagccatggtggctcatgcctgtaatcccagcactttgggaggccaaggcagttggatcacgaggtcaggagtttgatactagcctggccagcatggtgaaacccrtttctactaaaaatacaaagaattagctgggcatggtggcatgcacctgtaatcctagctactcaggaggctgaggcaggagaattgcttgaaccagggagatggaggttgcagtgagctgagattgcaccactacactccagcctgggtgatggagtgagactccatctcaaaaaaataaataaataaaaataaataaataaatataaaggaatgaaatactgttttgtgtccacaaagtttgtgagggtgaagaacagtggtacttatatacctgctgaaagtttaagttgctgcgacttttcaaatagacactttgatggtaagaaccacatttttaaaatgtgtatgccttttacccatctg

SEQ ID NO: 691206 - DNA, 1165 bp, Homo sapiens
aaaaaaaactacaacaataagactacaaggtattaataggagagattataaccagagcactgggaaaaaaaacagcaatatccaatatgcttacaactattggttgacaactcaaaagttcccaaaagaatttttgacacyaaataaaggtaaatagcctggaaaacctacaagccagcataggaaggaagtggaaaatgaaacattgattgaaaataaatctggaagtccgggcgcagtggctcatgcctgtaatcccagcactttgggaggccaagatgggtggatcacctgaggttgggagttcgagaccagcctgaccaacatggagaaactctgtctgtactaaaaatacaaaattagctgggtatggtggtgcatgcctgtaaccccagctacttggaggctgtggtagaagaattgcttgaacccgagaggcagaggttgtcgtgagccaagatctcccattgcactccagccttggcaacaggagcgaaactctgtcccccaaaaaaaagaagaaaagaaaagaaatctgaaaaaaggaaaagagaattgaggataaagctttgcaaatacaaaatccaaaaatcaaatgatagaaataagttcaaatatatcactttttcctaccaaacatagagggattaacctcatatattaaaatacaaaattatcaataactaagcagcactttcaaattaaagaaattaaaaattaaatattttataaaaattttaagtaaatattcacagaaagcaagctgctatcacaaaattaattttagtttaaataaaatttaaggaagaaataataaacaacaagattgacactgcacatggagggaccatagaaccgggtaggtgaaccaacgtcaagtccaatgctggcctcacctccaggacatacaaagaaactaacaggatagagcaggtctagagagggacactggaactcgtacttctgaatttaaatgggaaatagacaaagatgttatgtgtttataaaaggttttaaatcacaacaaatgctgaatgtacatcactttctagtatatgtaatacttaccaaatgggacccatattaggttgcaaaagaaattacaaaaacccggagatagggaccaaaggactgaaagaagtcagaacaaaaaacacgccccata

SEQ ID NO: 691207 - DNA, 1165 bp, Homo sapiens
aaaaaaaactacaacaataagactacaaggtattaataggagagattataaccagagcactgggaaaaaaaacagcaatatccaatatgcttacaactattggttgacaactcaaaagttcccaaaagaatttttgacactaaataaaggtaaatagcctggaaaacctacaagccagcataggaaggaagtggaaaatgaaacattgattgaaaataaatctggaagtccgggcgcagtggctcatgcctgtaatcccagcactttgggaggccaagatgggtggatcacctgaggttgggagttcgagaccagcctgaccaacatggagaaactctgtctgtactaaaaatacaaaattagctgggtatggtggtgcatgcctgtaaccccagctacttggaggctgtsgtagaagaattgcttgaacccgagaggcagaggttgtcgtgagccaagatctcccattgcactccagccttggcaacaggagcgaaactctgtcccccaaaaaaaagaagaaaagaaaagaaatctgaaaaaaggaaaagagaattgaggataaagctttgcaaatacaaaatccaaaaatcaaatgatagaaataagttcaaatatatcactttttcctaccaaacatagagggattaacctcatatattaaaatacaaaattatcaataactaagcagcactttcaaattaaagaaattaaaaattaaatattttataaaaattttaagtaaatattcacagaaagcaagctgctatcacaaaattaattttagtttaaataaaatttaaggaagaaataataaacaacaagattgacactgcacatggagggaccatagaaccgggtaggtgaaccaacgtcaagtccaatgctggcctcacctccaggacatacaaagaaactaacaggatagagcaggtctagagagggacactggaactcgtacttctgaatttaaatgggaaatagacaaagatgttatgtgtttataaaaggttttaaatcacaacaaatgctgaatgtacatcactttctagtatatgtaatacttaccaaatgggacccatattaggttgcaaaagaaattacaaaaacccggagatagggaccaaaggactgaaagaagtcagaacaaaaaacacgccccata

SEQ ID NO: 691208 - DNA, 1165 bp, Homo sapiens
aaaaaaaactacaacaataagactacaaggtattaataggagagattataaccagagcactgggaaaaaaaacagcaatatccaatatgcttacaactattggttgacaactcaaaagttcccaaaagaatttttgacactaaataaaggtaaatagcctggaaaacctacaagccagcataggaaggaagtggaaaatgaaacattgattgaaaataaatctggaagtccgggcgcagtggctcatgcctgtaatcccagcactttgggaggccaagatgggtggatcacctgaggttgggagttcgagaccagcctgaccaacatggagaaactctgtctgtactaaaaatacaaaattagctgggtatggtggtgcatgcctgtaaccccagctacttggaggctgtggtagaagaattgcttgaacccgagaggcagaggttgtcgtgagccaagatctcccattgcactccagccttggcaacaggagcgaaactctgtcccccaaaaaaaagaagaaaagaaaagaaatctgaaaaaaggaaaagagaattgaggataaagctttgcaaatacaaaatccaaaaatcaaatgatagaaataagttcaaatatatcactttttcctaccaaacatagagggattaacctcatatattaaaatacaaaattatcaataactaagcagcactttcaaattaaagaaattaaaaattaaataktttataaaaattttaagtaaatattcacagaaagcaagctgctatcacaaaattaattttagtttaaataaaatttaaggaagaaataataaacaacaagattgacactgcacatggagggaccatagaaccgggtaggtgaaccaacgtcaagtccaatgctggcctcacctccaggacatacaaagaaactaacaggatagagcaggtctagagagggacactggaactcgtacttctgaatttaaatgggaaatagacaaagatgttatgtgtttataaaaggttttaaatcacaacaaatgctgaatgtacatcactttctagtatatgtaatacttaccaaatgggacccatattaggttgcaaaagaaattacaaaaacccggagatagggaccaaaggactgaaagaagtcagaacaaaaaacacgccccata

SEQ ID NO: 691209 - DNA, 1165 bp, Homo sapiens
aaaaaaaactacaacaataagactacaaggtattaataggagagattataaccagagcactgggaaaaaaaacagcaatatccaatatgcttacaactattggttgacaactcaaaagttcccaaaagaatttttgacactaaataaaggtaaatagcctggaaaacctacaagccagcataggaaggaagtggaaaatgaaacattgattgaaaataaatctggaagtccgggcgcagtggctcatgcctgtaatcccagcactttgggaggccaagatgggtggatcacctgaggttgggagttcgagaccagcctgaccaacatggagaaactctgtctgtactaaaaatacaaaattagctgggtatggtggtgcatgcctgtaaccccagctacttggaggctgtggtagaagaattgcttgaacccgagaggcagaggttgtcgtgagccaagatctcccattgcactccagccttggcaacaggagcgaaactctgtcccccaaaaaaaagaagaaaagaaaagaaatctgaaaaaaggaaaagagaattgaggataaagctttgcaaatacaaaatccaaaaatcaaatgatagaaataagttcaaatatatcactttttcctaccaaacatagagggattaacctcatatattaaaatacaaaattatcaataactaagcagcactttcaaattaaagaaattaaaaattaaatattttataaaaattttaagtaaatattcacagaaagcaagctgctatcacaaaattaattttagtttaaataaaatttaaggaagaaataataaacaacaagattgacactgcacatggagggaccatagaaccgggtaggtgaaccaacgtcaagtccaatgctggcctcacctccaggacatacaaagaaactaacaggatagagcaggtctagagagggacactggaactcrtacttctgaatttaaatgggaaatagacaaagatgttatgtgtttataaaaggttttaaatcacaacaaatgctgaatgtacatcactttctagtatatgtaatacttaccaaatgggacccatattaggttgcaaaagaaattacaaaaacccggagatagggaccaaaggactgaaagaagtcagaacaaaaaacacgccccata

SEQ ID NO: 691210 - DNA, 1165 bp, Homo sapiens
aaaaaaaactacaacaataagactacaaggtattaataggagagattataaccagagcactgggaaaaaaaacagcaatatccaatatgcttacaactattggttgacaactcaaaagttcccaaaagaatttttgacactaaataaaggtaaatagcctggaaaacctacaagccagcataggaaggaagtggaaaatgaaacattgattgaaaataaatctggaagtccgggcgcagtggctcatgcctgtaatcccagcactttgggaggccaagatgggtggatcacctgaggttgggagttcgagaccagcctgaccaacatggagaaactctgtctgtactaaaaatacaaaattagctgggtatggtggtgcatgcctgtaaccccagctacttggaggctgtggtagaagaattgcttgaacccgagaggcagaggttgtcgtgagccaagatctcccattgcactccagccttggcaacaggagcgaaactctgtcccccaaaaaaaagaagaaaagaaaagaaatctgaaaaaaggaaaagagaattgaggataaagctttgcaaatacaaaatccaaaaatcaaatgatagaaataagttcaaatatatcactttttcctaccaaacatagagggattaacctcatatattaaaatacaaaattatcaataactaagcagcactttcaaattaaagaaattaaaaattaaatattttataaaaattttaagtaaatattcacagaaagcaagctgctatcacaaaattaattttagtttaaataaaatttaaggaagaaataataaacaacaagattgacactgcacatggagggaccatagaaccgggtaggtgaaccaacgtcaagtccaatgctggcctcacctccaggacatacaaagaaactaacaggatagagcaggtctagagagggacactggaactcgtacttctgaatttaaatgggaaatagacaaagatgttatgtgtttataaaaggttttaaatcacaacaaatgctgaatgtacatcactttctagtatatgtaatacttaccaaatgggacccatattaggttgcaaaagaaattacaaaaacccggagatagggaccaaaggactraaagaagtcagaacaaaaaacacgccccata

SEQ ID NO: 691211 - DNA, 882 bp, Homo sapiens
taaccaggataaatgaccagaaagagagtaatggctattgcagtatgtaaagaagactagagtaggagttggaagatttggaacaaatcccaattttgttgtatcatccttatttagtgaaaatgttaataattattaagcatctgtcatgaattaggtaccttgctaactaactactttatatattttaataatccacaattgtagtgtgccagagttggagccttcaagttttagtgattaattgaaaagcacaacttatttcttcttgtgctatggactttttaatgagtcctcatattcagaaagccgtagaagtcaagtgggtagttacttaatgttggctaggcagttgatttaytgagtctgcaatagatgctaactttccctggttgattgggagaaaaagtcaatggaaagtaacaaagaaagcttcattacatttctttgctattcatacaagctttcagtgctagtgaatgttttgtgcaattgctcaaagtattatattatttgggagcatggaaaatgttttcgtgtttacttgttgttttcctcaagaaaatttccagagctaggtataactcacaaaatcttttttcagtcttataaagaatgagaacacttgttaaatgtgccaacctccctttagcagaaacagctccattaagccagtatatttggcactttctcaatgcacgatgtgtgtgtggggtgtgtgtgtgtgtgtgtgtgtgtgtgtgttttagtttatgaaaccaatttaaatgctgcattcctaaaaagctggctatgatcctcaattttacagagaagaaaagacgttttgaaatcgtttaatataccaccaaatctgaatgccaatgagctacaatttaccag

SEQ ID NO: 691212 - DNA, 882 bp, Homo sapiens
taaccaggataaatgaccagaaagagagtaatggctattgcagtatgtaaagaagactagagtaggagttggaagatttggaacaaatcccaattttgttgtatcatccttatttagtgaaaatgttaataattattaagcatctgtcatgaattaggtaccttgctaactaactactttatatattttaataatccacaattgtagtgtgccagagttggagccttcaagttttagtgattaattgaaaagcacaacttatttcttcttgtgctatggactttttaatgagtcctcatattcagaaagccgtagaagtcaagtgggtagttacttaatgttggctaggcagttgatttactgagtctgcaatagatgctaactttccctggttgattgggagaaaaagtcaatggaaagtaacaaagaaagcttcattacatttctttgctattcatacaagctttcagtgctagtgaatgttttgtgcaattgctcaaagtattatattatttgggagcatggaaaatgttttcgtgtttacttgttgttttcctcaagaaaatttccagagctaggtataactcacaaaatcttttttcagtcttataaagaatgagaacacttgttaaatgtgccaacctccctttagcrgaaacagctccattaagccagtatatttggcactttctcaatgcacgatgtgtgtgtggggtgtgtgtgtgtgtgtgtgtgtgtgtgtgttttagtttatgaaaccaatttaaatgctgcattcctaaaaagctggctatgatcctcaattttacagagaagaaaagacgttttgaaatcgtttaatataccaccaaatctgaatgccaatgagctacaatttaccag

SEQ ID NO: 691213 - DNA, 1476 bp, Homo sapiens
aggggcagggcccgctcaccattggctgaactgccgaggagggttaaacagattcggagtcgcgggctggtgggaagctgcagccccactcagcccctcggccgtggccgctaccttcactgatacttggccggggagtgagcgcgccgagcctgggaggatacagcacccactgtggcctgggagctccaaggggctccagctgcttgtctgcttcctgctgctgaacagctgcccggggggctgcagcgacactagtgcccacggtcaggaggaaccctggggggtgcgggcagggccaagaragcgatcctgagaagtgggggtctgcagggggcctcaaggctaggaaacttggaagtaaaagaatgtgcttaaggacgtgagaagagaaaaaggtagacagcgtctagcggaaagaggcataggcttcagataggctgggcatatggggtctggactcacgagaagtgggttcaggtgaaaattggggatttgggaagaggtcagaaagacaaatgaacagagagaggtaaaactggcctatgtggccacaggagaagcaagaaaggccagaaaaagagttgaccagggctgcgggtatcggggtcttggctccagggagaaggctgggccaggagacgagccagggcttcctcgtgctgtgatccggtttccaataaggggaccgctgagggaaagcaggatggagggggaatgggaccatccttctccccttcccccgcaccaatccgcgtagaccccgcgctgactcacgtgccagactgcgcacactcgagaactcctgcgcagagcgcatggggaagagagcgcaaactcctagtctgtcgccccctctccctgatttttggttttagaggccaatgcagcggattcaggaacaactgtgggaggaggcctggtggcaatgagaggatgagggacgtggggaaggaccgccaagccttgcggagatgtctcgcccacattccgcccagcgccgccgccacgctggcctccccacctctcagcaccacggacagcgccaggcgcgctccgggtccacgccgagcccgagcgggtcaccactccttcccaccagtcctgggaacgctgcctcagagaatcagctccccttcccgaagctctttcccttctcctcagggtgttggaggttccactacttccttaaggaggctttctcatccccaaatgtctctacttaaaactttgtcacgcttacccccaggaaatcattagacatccatttgactgggtaggagaattccctttttctaaagacctgtccagaatggctcatggtaactacactatagcaaaaaacagactgtcctccagccctatctcactgatctggaagaaggaaggtgtgcatagcattaggggttctcttccccaacccgtccttcctctcatgcacagttgggcaaactgtgggcttcaggaaaaggatcc

SEQ ID NO: 691214 - DNA, 641 bp, Homo sapiens
ttagctacacctgctagaaagggacaaataggaatttttaaatgatgctgctgtgagaatcaaataaggttgaagatagaaagtgtgcttccaggccaggcttggtggcttatgcctgtaatcccagcactttgggaggctggggcgggtagatcacttgaggtcaggagatcgagaccagcctggccaacatgataaaaccctatctctactaaaaatacaaaagttagcccggtgtggttgtgcatgcctgtagtcgtagctgcttgggagggtgaggtatgagaatcacttgaacccgggaagcggaggttgcagtgagccaagatagtgccactgcactccagcctgggtgacagagcragaccctgtctcaaaaaaaaagagtacttctagaaccctaggacattacacattgtatactatgattattagtagtaatttgaactcaaagcggatctcccttctgaagcctgaagccacacactctgctttcagggaagggtcagatacttttccccaggaaaaatatccttccaccctccactctggcctttcatgtcttccacttgtcatactctctgaactgcccacctccttaattcagagtctgaagtatgtgtgtgggggtgggagggacc

SEQ ID NO: 691215 - DNA, 665 bp, Homo sapiens
ccaccctcttcatattctgggtctcatgcactcttggtacagacttctaggtaagaacagagtcttcaggcaaagaggcaggctgtggagggacacttgaacagagtctcagatggctacaaaaactgaatggacagacaggtgggcaggctagataatgggggaagttcagttgcttcctgggaggagttctggaatccttggaagactacagcatggaacctagcttcagacagggctggcgagtccagatcattttcctggaagccacggtatacccaactcacaatgaggggatgacctttctatgatacagaccctcctcctggatacggatcatctccatccaggcagatggggccagttggaagagaagccaggcttttcccatcctaatttttctcctcctccagttcacaagtagatcctaataatgatgccaaaaaaggcgagggccccatgcaaaaagacaaataacccaatttaaaaatgggggcaaatctgaacagacattcttaaaaaggataaacaactggccaataagcacatggaargatgctgaactccatgagccatcagggaaatgcagatcaaaaccacaattaggctgggcgtggtgacttatgcccgtaatcctagcactttgggaggccgaggcaagtgga

SEQ ID NO: 691216 - DNA, 669 bp, Homo sapiens
tcagctcttcgttttcaggtagctcacttgcggttgcattatttgtaatatttttattcaatcgacgttctttttaagccactagttcatttctgaaggcttaggtargtggaatctcggaaaaaaaaatccataagcccatctaaatgagtccaatgaactcctgtgtgttctaataatactgaaatgaaagctttactgacaaccctttctccaagttgaaggcccatccttcccttccatgtggactcaatgtgagagccagtgtatgagtaaatcttaatgcctttcttagttttcagattaaaaaaaactttaaaaagatttctagaaatttcttcctccaacttcagtagatgtcttgaacatctcactttgatgactgtttgtgatcatgttcacctggtgatattttataaactttcaaactactgggtcatccagacctactgattctgagtagctggggcaatgataagaattgtcaaacaaacttcacaggtgattattttacaccacaaagtcataatatgcttcaaattagtggttctcaaacaaagtagaggaacatgcttgcatctgaatcaacttgggatgctggttaaaaatatccaggcactgagttccatccaagaccagctaaaaccaaatctctagagatgaaacctg

SEQ ID NO: 691217 - DNA, 669 bp, Homo sapiens
tcagctcttcgttttcaggtagctcacttgcggttgcattatttgtaatatttttattcaatcgacgttctttttaagccactagttcatttctgaaggcttaggtaggtggaatctcggaaaaaaaaatccataagcccayctaaatgagtccaatgaactcctgtgtgttctaataatactgaaatgaaagctttactgacaaccctttctccaagttgaaggcccatccttcccttccatgtggactcaatgtgagagccagtgtatgagtaaatcttaatgcctttcttagttttcagattaaaaaaaactttaaaaagatttctagaaatttcttcctccaacttcagtagatgtcttgaacatctcactttgatgactgtttgtgatcatgttcacctggtgatattttataaactttcaaactactgggtcatccagacctactgattctgagtagctggggcaatgataagaattgtcaaacaaacttcacaggtgattattttacaccacaaagtcataatatgcttcaaattagtggttctcaaacaaagtagaggaacatgcttgcatctgaatcaacttgggatgctggttaaaaatatccaggcactgagttccatccaagaccagctaaaaccaaatctctagagatgaaacctg

SEQ ID NO: 691218 - DNA, 2517 bp, Homo sapiens
ttatctcagatgagagttctcaatttttcctaacccaccactattaacagaaaaacagtacactaccatactcttaaagtttaacattatctcacatgattattatttaaattttagaagaatatttttaagctaataaacaaacttgttatgccattggaattacattaaatatgtagattaatttaggcaacacattagatatctttttgtatttaactattattttatgcacagcagaattttatgtttttctttttgcaatgcctattccctgctaagtttttaacaattgttgtgtctactatgaaagggattttgtaattatatgttctgaaaggctttttgggtactagaaagggtatagtgctttaaaaatggaaatgcctccaccatttcacctttaatttagtcataggatatactttgtcctaagttaaggagatattcttccattaattctttctaattaataatgaatgtaaagttgtatcagaatcttaatagtacatagcaaggtaatcctattttgacctattaatatgataaaatgaaaaatattcttcctaatataaaactataattgcctttgactctatttcattgtaaattaatttatttaatttcacatgagtatctaattaatctggcaatgtatgtgcattaagagacctttaaaaatgttcaagattatcttaaaatacattttaaaaatacatttcaaattcacataaaaaagagataataagatgaaagttacacaagacagcactaccaataaccctcttgcgtctgatccttcattttaatgctgaatgtttttgaaacatatcatttaatcctcacaaaacaacataagaggtgagtaggaatggtagtcctagcacagtttattcttgtgtgaaagataaggaaactgagatgcaaaggggataagtagcttatctaagtccacacagcttataaacgctggcattaaaaacttaaaaccggctcaaactccagtgcccgcactgttaaccactatagtatgctatactttctataagaaaataaaaataattttttcacttccatgccatgtaacaaaactgttttcaaaatctttaatttaaaaaattctgcattaaatacaagcagtcctttagttcttatctatagtattattaattagaataaaatgacggtaccactggaagtgctagagattgcaattctgatcgtttaaccaactatgctgattaccattaaaattagttttgtaaaatgctaaaactctcatgtccctgcttttggtccctcacatgactgaagaaatacaaattctttacatatctcaagagtttgttaaaattctatttatgcaagggctaatggagcacaccacatgttaaagaccacactgaagacgtattgctgcatatgagcagactgaaaaggatgtttctgtcctaaggaacttatactctacttgagaagttcagactaatagacatgacatgttttagcatgcaaccatgctaaaaaatataatcgtcaactagtacattgtatggattagagaaaaattaactctcattttcagaaaacttcaacctggagacagtacatcattaaatggaagtaaattttatgggattggggttataaattcattcttcaaacaaaatgtttcttgacaagtaagatctgattctcagttttgggaagtcaaaaygaaaaaacaagcaagcaaaaactactaaccaactttgggtttccagtgatttctgtcctataaaggaaaacccatttatttctgtctattttccacttaattggagaataataaaaagataaaggcattgcttgaagtggaagaagaaaaaactcaaaacattaggtttcaggaggcaaatagatacagaagttgactgggcctcctgtaccttttttttgcaaatgggttaaacaataaattattcactttatttaaaaaaatcttcaattattgaagtaggataaaatagaacaacactgctctgtttagcatctcatattctatagctgcagatgaacttcagattcatttttgcttctttgtagtgaatttttgttttgatagccttcatctggcattaatctgcattctttttgtctgattaccagacatgaatcaaggaatacaactggcttctctatcttaaaaggctgcgaggaattacttttctaacttccggaggtttttttaatttaaattatttatttaagataaaagggagagaattcattcagtattgtggcaacaaggcttgtcaacataaccacattcatttaatttatcttactggtaatacaaaaccacaagcattctttaatttcatttcttttactggtaatacatgacatttgtcctagcatttctttaaaatagtcaaagttaatgattacggttatattagtcaagactttttattgcaagtgacgaaagccctatactatctatcttagataaaacagagatatcctagctcatgt

SEQ ID NO: 691219 - DNA, 621 bp, Homo sapiens
ccttgactttttcwcataaaaaatggaggtgctagtaaaaaatgaagacattttactgttaaagtaaaattctataaatactataggtagataggtagctaagttcctggcagaaacttggtatgcaatacaaggaacttattgctagtactaaacttagcatatagtatgaaggattagggcattgagaaatgaatacaatttcattactatcatcagcataaaatatagggtaacaggcttaaaatcttgtcttcttgatgggaaaaggataatatcatttaacatattaacagcaatatttattattattatcatatcttttgtatctgttttggttataaaattatttctcatattgtctcttaagatcaaactatttttcatattgtctcttaagatcatttgcctcttgagccaaactctcagttccagacacaatgcagtagcttgcagcagatgatgtatctatctcctgagaataaccaggaagaaacagtttttaaaaatttcttttttattttttttagttctgaggaaattggagagctgtcaaggcagccaggacttgtggaaccagatcctggagaaaagaggagactgaattgagctgcaattgag

SEQ ID NO: 691220 - DNA, 621 bp, Homo sapiens
ccttgactttttcacataaaaaatggaggtgctagtaaaaaatgaagacattttactgttaaagtaaaattctataaatactataggtagataggtagctaagttcctggcagaaacttggtatgcaatacaaggaacttattgctagtactaaacttagcatatagtatgaaggattagggcattgagaaatgaatacaatttcattactatcatcagcataaaatatagggtaacaggcttaaaatcttgtcttcttgatgggaaaaggataatatcatttaacatattaacagcaatatttattattattatcatatcttttgtatctgttttggttataaaattatttctcatattgtctcttaagatcaaactatttttcatattgtctcttaagatcattygcctcttgagccaaactctcagttccagacacaatgcagtagcttgcagcagatgatgtatctatctcctgagaataaccaggaagaaacagtttttaaaaatttcttttttattttttttagttctgaggaaattggagagctgtcaaggcagccaggacttgtggaaccagatcctggagaaaagaggagactgaattgagctgcaattgag

SEQ ID NO: 691221 - DNA, 621 bp, Homo sapiens
ccttgactttttcacataaaaaatggaggtgctagtaaaaaatgaagacattttactgttaaagtaaaattctataaatactataggtagataggtagctaagttcctggcagaaacttggtatgcaatacaaggaacttattgctagtactaaacttagcatatagtatgaaggattagggcattgagaaatgaatacaatttcattactatcatcagcataaaatatagggtaacaggcttaaaatcttgtcttcttgatgggaaaaggataatatcatttaacatattaacagcaatatttattattattatcatatcttttgtatctgttttggttataaaattatttctcatattgtctcttaagatcaaactatttttcatattgtctcttaagatcatttgcctcttgagccaaactctcagttccagacacaatgcagtagcttgcagcagatgatktatctatctcctgagaataaccaggaagaaacagtttttaaaaatttcttttttattttttttagttctgaggaaattggagagctgtcaaggcagccaggacttgtggaaccagatcctggagaaaagaggagactgaattgagctgcaattgag

SEQ ID NO: 691222 - DNA, 657 bp, Homo sapiens
gtttttaacttagctcttcctaattcgagtccctggctctttctagatgaacacacttttctatcatcagccacaagtatttaggtagaacttactatgtatgcagatctgttaagacatrtgaagtttaggtttgtcacagccatggcttcgtcgattgattagtcttgaagctgaaatggcaaaaatgcccccgagagaaaatacattgaagcaatcaattatttcttttgtacctcctacgacaatgtaaaacaggcaaggcttcttagagtaagaattccagagagcagcatgtatggccttccaatctcatcctctgtacattgtaatgtcatttgttcatagtgctgggacattctacttgctgtggcttttcctagcactcatgaactagcaccgagaaatgtgatctctaggcttcagaccccaagatcattccccttgtctccagaacctccctgatatttttcattactacttaactctcagaattgtctgagctctggttttcctatctggtctgcgtctcaggagaaaaaattgcaactcaagtttattgaccttgtcaatttatacaaggaactcaaaaaatgtttttattggacattatataactgaacacttattggagcaaaagtgtggaagtccagaccc

SEQ ID NO: 691223 - DNA, 1696 bp, Homo sapiens
ccatcccccacccccatgtagtcatctattttgttgccatactcagtgactttattaagcagctcaatgaaagttctgcaaaaccaaawaaataaataaataaataaataaataaaacaaaaaataaataaatgaaagaaaaatcaaggaagtgagcatctctattcctaatttcctttttattgctcaaaagccttcatatttgaaagagaaaatattacatttactacatggctacaaagtcaaccaggggaagccagagagaagaggggaaagtatcttagcagtgaaaagtgttgatgatttctagtttatatttaaatatataattctgaaaaatggatgaaacaaactatttggaatgtttgaaccgtgtaggcctccagagaacctcaactataaaaggcagatctccctgcctggagcaagtttcaacaccctggccttgagaaggaagcaacagatgcagcagtcttaaaaataaccccacttttccagacagtgatttcaggaatttctggtgaggtctggaacccagaatttcatttttcaatattctcccagtcttaagactaatgatccttactaatttggagcaatacgaagaaagatccgaatgaattctcagtcagatagacttttccatcgtgcttgaaaatcaggaactgtgaataagaatggatttgaaaaataaaatgataattttggaattagcaaatgtgtgggttaaagggattctcatgaaatgtcttttaaataaaagtggtgatttttatgtattttttttggctgtagatgtggtaactgtatctttctccttgcaggtatgagtccccgctgctgcaagtgtctgagcctgtgaatccagagctcagtgcagggcccatcactggactgctggacaggctcagtggattcagaggtgagcgtcagcccattggcagaattcccacagtgtattacttcttgttagaatcatgggggtaatattttacccttcatcaaatctttatttcatttcagcaggaagtgaaccatatgactatgcaacccttttatatctgtgtttctatttatagaccaatttataacatgaagagtaaaacatagtgaaaaacaaatatgttctgggatcacatgtatagagttatatattgggtaaatggaatgacataagaaataaaaaattgaataaatggaacaatgctcagaaggaagcgtaataatccaaggttacataaaaattttggcacatgttctcaggatctcctgagggctgtgtcacagaccatggtcactcatatttggctcagaataaatttctttaaatattttacagctctccctctccctctccctctccctctccccacggtctccctctccctctctttccacggtctccctctgatccctagccgaagctggactgtactgctgccatctcggctcactgcaacccccctgcctgattttcctgcctcagcctgccgagtgctgcgattgcagcgcgcgccgccacgcctgactggttttcgtatttttttggtggagacggggtttcgctgtgttggccgggctggtctccagctcctaaccgcgagtgatccgccagcctcggcctcccgaggtgccgggattgcagaaggagcctcgttcactcagtgctcaatggtgcccaggctggagtgcagtg

SEQ ID NO: 691224 - DNA, 1696 bp, Homo sapiens
ccatcccccacccccatgtagtcatctattttgttgccatactcagtgactttattaagcagctcaatgaaagttctgcaaaaccaaataaataaataaataaataaataaataaaacaaaaaataaataaatgaaagaaaaatcaaggaagtgagcatctctattcctaatttcctttttattgctcaaaagccttcatatttgaaagagaaaatattacatttactacatggctacaaagtcaaccaggggaagccagagagaagaggggaaagtatcttagcagtgaaaagtgttgatgatttctagtttatatttaaatatataattctgaaaaatggatgaaacaaactatttggaatgtttgaaccgtgtaggcctccagagaacctcaactataaaaggcagatctccctgcctggagcaagtttcaacaccctggccttgagaaggaagcaacagatgcagcagtcttaaaaataaccccacttttccagacagtgatttcaggaatttctggtgaggtctggaacccagaatttcatttttcaatattctcccagtcttaagactaatgatccttactaatttggagcaatacgaagaaagatccgaatgaattctcagtcagatagacttttccatcgtgcttgaaaatcaggaactgtgaataagaatggatttgaaaaataaaatgataattttggaattagcaaatgtgtgggttaaagggattctcatgaaatgtcttttaaataaaagtggtgatttttatgtattttttttggctgtagatgtggtaactgtatctttctccttgcaggtatgagtccccgctgctgcaagtgtctgagcctgtgaatccagagctcagtgcagggcccatcactggactgctggacaggctcagtggattcagaggtgagcgtcagcccattggcagaattcccacagtgtattacttcttgttagaatcatgggggtaatattttacccttcatcaaatctttatttcatttcagcaggaagtgaaccatatgactatgcaacccttttatatctgtgtttctatttatagaccaatttataacatgaagagtaaaacatagtgaaaaacaaatatgttctgggatcacatgtatagagttatatattgggtaaatggaatgacataagaaataaaaaattgaataaatggaacaatgctcagaaggaagcgtaataatccaaggttacataaaaattttggcacatgttctcaggatctcctgagggctgtgtcacagaccatggtcactcatatttggctcagaataaatttctttaaatattttacagctctccctctccctctccctctccctctccccacggtctccctctccctctctttccacggtctccctctgatccctagccgaagctggactgtactgctgccatctcrgctcactgcaacccccctgcctgattttcctgcctcagcctgccgagtgctgcgattgcagcgcgcgccgccacgcctgactggttttcgtatttttttggtggagacggggtttcgctgtgttggccgggctggtctccagctcctaaccgcgagtgatccgccagcctcggcctcccgaggtgccgggattgcagaaggagcctcgttcactcagtgctcaatggtgcccaggctggagtgcagtg

SEQ ID NO: 691225 - DNA, 872 bp, Homo sapiens
ccagtcgctcctggcaggggcgctccaggagcctctgcatgagacggacgtgtaagtggccactcctytggcgacctcccacggcgggggccctcgcgtggacacccgcccctgctagctcagggctcggatgcgatcggttcgaccctgcatggcggctttcaacccgaacgcgtccatccttcaaggtcaagacccaggacatagttcagcaagtagttggtgatgatagcgtgccctgactgggccagaacagcctctttagtaaaacagcgcaggaaagtcatgaaacagatgctcagctcctttcttcattttcactttaattccgtgatgcctctgtgtccgtctgacgacatctctcctggggtctgggactctgctggtcttcaatgcctactgagaagggttcctggccatcatcaggcatgaaaacctcaaagccctccttcctcaacgtgggatccctgggccagcggcatcagcctcaccaggaaacctgttcttctgctcattcttgggccccaccccaggcctattcaaagaaagactccagggcagggcttggcagcctgtgtttccaccagatctgtgttaaagctcaaatgaaccagcccaggtgatgctgacgcaggaagcgcaaggctgagagccagcgtctaaggcaactgtgcccatggggccaggggcagctcctgcctgtgcagctatgattagggttgcgttcccctccctgtcctgccagttgacttcaatgtgggggcactcagctaaggccaccacggtatatccacaaagccgtggtagcaggcgacattaaggccgctctggccattgtggtcagtctcctgagccttctcaacgctcacccc

SEQ ID NO: 691226 - DNA, 872 bp, Homo sapiens
ccagtcgctcctggcaggggcgctccaggagcctctgcatgagacggacgtgtaagtggccactcctttggcgacctcccacggcgggggccctcgcgtggacacccgcccctgctagctcagggctcggatgcgatcggttcgaccctgcatggcggctttcaacccgaacgcgtccatccttcaaggtcaagacccaggacatagttcagcaagyagttggtgatgatagcgtgccctgactgggccagaacagcctctttagtaaaacagcgcaggaaagtcatgaaacagatgctcagctcctttcttcattttcactttaattccgtgatgcctctgtgtccgtctgacgacatctctcctggggtctgggactctgctggtcttcaatgcctactgagaagggttcctggccatcatcaggcatgaaaacctcaaagccctccttcctcaacgtgggatccctgggccagcggcatcagcctcaccaggaaacctgttcttctgctcattcttgggccccaccccaggcctattcaaagaaagactccagggcagggcttggcagcctgtgtttccaccagatctgtgttaaagctcaaatgaaccagcccaggtgatgctgacgcaggaagcgcaaggctgagagccagcgtctaaggcaactgtgcccatggggccaggggcagctcctgcctgtgcagctatgattagggttgcgttcccctccctgtcctgccagttgacttcaatgtgggggcactcagctaaggccaccacggtatatccacaaagccgtggtagcaggcgacattaaggccgctctggccattgtggtcagtctcctgagccttctcaacgctcacccc

SEQ ID NO: 691227 - DNA, 1353 bp, Homo sapiens
tgcctgcatggtaccatgttcatttgtagcttcgcagatgtatttctccacatgctcctgcatcacagcctgagtatggagagagctcaagccagcttgggacatgatgaaataggcagggtctaggtccaagattccaggtcttgataagtgtgacttttgggatttagatctaaggacttaagacagatggctggttatcaatccgtggatgtcataccaacaaatgaccggacccagcagcctggtagcattgtaggacagagtaaacaaagtctccatctaccacttttatgcttgctggtgccataawtataactcgcttgaatccattgcctttttctatttcaagtcttccagtagactgcataaatccagcctcattatctgctaaacactgatgtagcctagtatcttgcataataaccccactgaatttcagtcaatttcctgcagttcgatgtcttgaggaaggatgattaggctgtgaattatgaaaccagttatggttggcagctgggttcctacaaacatcagagataaagtgtactgtggaaaatagagacactatctgatcctgtagtcccttagagtaggagcgtgttcaagtacattaaccatgtatgccacatattttacatctccagagttgtttcccaccatgctggaattgtttccagagtccactgggtcaatgctatctatggcaagatgagaacacaaccttctccagttgcttcccagggcaatatcctgcctgttcttcagccaacacacttgaggagccaggaccccactaaacacacactccaaagttacagggctatgtgaatgaacagctaatacctgtgaacgagcaggggaagaatgccaaaatcctctgaagaaaggtgactcacaaggagcttttggccaatgggttcaactcttaattcatgtgtggccggattataagctgcacatttgtgtgatcccttgtcctctgaggatacgttcaaaatctaaagatgttcttgtggagggattaagtaattctttgtggaatgcttcagccacttcccctggattttagcgcacacctcagctttggggttactctctggtaccctgcagccaatgaaaccagcacctttattattttgctgtaataaaatgctttgtggatgaatcaaaatcaccaagaactgctgtggatactgttacagggccacttacaacaacaccgacctattgttgagaatgcactggtagtaacccaaaagggaggagttaagagaaaaaaattgtcaaagtcccctgatgaatcttaatatattccatgtttctattctattttttccattatgcgacctt

SEQ ID NO: 691228 - DNA, 1353 bp, Homo sapiens
tgcctgcatggtaccatgttcatttgtagcttcgcagatgtatttctccacatgctcctgcatcacagcctgagtatggagagagctcaagccagcttgggacatgatgaaataggcagggtctaggtccaagattccaggtcttgataagtgtgacttttgggatttagatctaaggacttaagacagatggctggttatcaatccgtggatgtcataccaacaaatgaccggacccagcagcctggtagcattgtaggacagagtaaacaaagtctccatctaccacttttatgcttgctggtgccataaatataactcgcttgaatccattgcctttttctatttcaagtcttccagtagactgcataaatccagcctcrttatctgctaaacactgatgtagcctagtatcttgcataataaccccactgaatttcagtcaatttcctgcagttcgatgtcttgaggaaggatgattaggctgtgaattatgaaaccagttatggttggcagctgggttcctacaaacatcagagataaagtgtactgtggaaaatagagacactatctgatcctgtagtcccttagagtaggagcgtgttcaagtacattaaccatgtatgccacatattttacatctccagagttgtttcccaccatgctggaattgtttccagagtccactgggtcaatgctatctatggcaagatgagaacacaaccttctccagttgcttcccagggcaatatcctgcctgttcttcagccaacacacttgaggagccaggaccccactaaacacacactccaaagttacagggctatgtgaatgaacagctaatacctgtgaacgagcaggggaagaatgccaaaatcctctgaagaaaggtgactcacaaggagcttttggccaatgggttcaactcttaattcatgtgtggccggattataagctgcacatttgtgtgatcccttgtcctctgaggatacgttcaaaatctaaagatgttcttgtggagggattaagtaattctttgtggaatgcttcagccacttcccctggattttagcgcacacctcagctttggggttactctctggtaccctgcagccaatgaaaccagcacctttattattttgctgtaataaaatgctttgtggatgaatcaaaatcaccaagaactgctgtggatactgttacagggccacttacaacaacaccgacctattgttgagaatgcactggtagtaacccaaaagggaggagttaagagaaaaaaattgtcaaagtcccctgatgaatcttaatatattccatgtttctattctattttttccattatgcgacctt

SEQ ID NO: 691229 - DNA, 1353 bp, Homo sapiens
tgcctgcatggtaccatgttcatttgtagcttcgcagatgtatttctccacatgctcctgcatcacagcctgagtatggagagagctcaagccagcttgggacatgatgaaataggcagggtctaggtccaagattccaggtcttgataagtgtgacttttgggatttagatctaaggacttaagacagatggctggttatcaatccgtggatgtcataccaacaaatgaccggacccagcagcctggtagcattgtaggacagagtaaacaaagtctccatctaccacttttatgcttgctggtgccataaatataactcgcttgaatccattgcctttttctatttcaagtcttccagtagactgcataaatccagcctcattatctgctaaacactgatgtagcctagtatcttgcataataaccccactgaatttcagtcaatttcctgcagttcgatgtcttgaggaaggatgattaggctgtgaattatgaaaccagttatggttggcagctgggttcctacaaacatcagagataaagtgtactgtggaaaatagagacactatctgatcctgtagtcccttagagtaggagcgtgttcaagtacattaaccatgtatgccacatattttacatctccagagttgtttcccaccatgctggaattgtttccagagtccactgggtcaatgctatctatggcaagatgagaacacaaccttctccagttgcttcccagggcaatatcctgcctgttcttcagccaacacacttgaggagccaggaccccactaaacacacactccaaagttacagggctatgtgaatgaacagctaatacctgtgaacgagcaggggaagaatgccaaaatcctctgaagaaaggtgactcacaaggagcttttggccaatgggttcaactcttaattcatgtgtggccggattataagctgcacatttgtgtgatcccttgtcctctgaggatacrttcaaaatctaaagatgttcttgtggagggattaagtaattctttgtggaatgcttcagccacttcccctggattttagcgcacacctcagctttggggttactctctggtaccctgcagccaatgaaaccagcacctttattattttgctgtaataaaatgctttgtggatgaatcaaaatcaccaagaactgctgtggatactgttacagggccacttacaacaacaccgacctattgttgagaatgcactggtagtaacccaaaagggaggagttaagagaaaaaaattgtcaaagtcccctgatgaatcttaatatattccatgtttctattctattttttccattatgcgacctt

SEQ ID NO: 691230 - DNA, 1353 bp, Homo sapiens
tgcctgcatggtaccatgttcatttgtagcttcgcagatgtatttctccacatgctcctgcatcacagcctgagtatggagagagctcaagccagcttgggacatgatgaaataggcagggtctaggtccaagattccaggtcttgataagtgtgacttttgggatttagatctaaggacttaagacagatggctggttatcaatccgtggatgtcataccaacaaatgaccggacccagcagcctggtagcattgtaggacagagtaaacaaagtctccatctaccacttttatgcttgctggtgccataaatataactcgcttgaatccattgcctttttctatttcaagtcttccagtagactgcataaatccagcctcattatctgctaaacactgatgtagcctagtatcttgcataataaccccactgaatttcagtcaatttcctgcagttcgatgtcttgaggaaggatgattaggctgtgaattatgaaaccagttatggttggcagctgggttcctacaaacatcagagataaagtgtactgtggaaaatagagacactatctgatcctgtagtcccttagagtaggagcgtgttcaagtacattaaccatgtatgccacatattttacatctccagagttgtttcccaccatgctggaattgtttccagagtccactgggtcaatgctatctatggcaagatgagaacacaaccttctccagttgcttcccagggcaatatcctgcctgttcttcagccaacacacttgaggagccaggaccccactaaacacacactccaaagttacagggctatgtgaatgaacagctaatacctgtgaacgagcaggggaagaatgccaaaatcctctgaagaaaggtgactcacaaggagcttttggccaatgggttcaactcttaattcatgtgtggccggattataagctgcacatttgtgtgatcccttgtcctctgaggatacgttcaaaatctaaagatgttcttgtggagggattaagtaattctttgtggaatgcttcagccacttcccctggattttagcgcacacctcagctttggggttactctctggtaccctgcagccaatgaaaccagcacctttattattttgctgtaataaaatgctttgtggatgaatcaaaatcaccaagaactgctgtggatactgttacagggccacttacaacaacaccgacctattgttgagaatgcactggtagtracccaaaagggaggagttaagagaaaaaaattgtcaaagtcccctgatgaatcttaatatattccatgtttctattctattttttccattatgcgacctt

SEQ ID NO: 691231 - DNA, 1121 bp, Homo sapiens
cagataaaaccaatatgttccacactcattataagaagaaaggagctttcagcggtagagaaagctttgcttttccacaggtctcccatcgtttgtgaggaagagctagttctcattttctctaaatagggaggcttaagactgtggagaaaaatgaaatgagaagagagtagatactgatatttctatgtggggcagaggatgtacaaacacctatgccctgccttttgtctggagattccaacaaaaatgaggatatgggatgagacaatggcacaggcatagaaattaaacaggggaggtttcaaagactcccatgcttatcaaggcagtccgttgttaaagaccaaaatcattaaggctttgttaaccacattttttgttgttttaggggctcgtgtttctctcaagcctagtgtgctctctgttcatcttatacattaaaaaataataagcaataggaaaattgtgtccttaaagatagtacagaccgggcacagtggctcacgcctgtaatcccagcttttcgggaggctgaggctggcggatcacctgaggtcaggagttcaagaccagcctggccaacatggtgaaaccctgtctctactaaaagtaaaaaattagccaggcatggtggcacacacctgtaatcccacctactcgggaggctgaggcaagagaattgcttgaactcaggagacggaggctgcagtgagccgagatcatgccactgcactccagcctgggcaagagagcgagactctctctcaaaaaaaaaraaaagaaaagttagtacatatttatttttccttgaataattctatctttatagcttatacctctagctcatagtagccatcaacgtagtaatgctattttttcttagacattaatatgacttataagcatcttttattggataataacaacaaaaaaacttgtttgtgaagtgtcttatagtttacaaaacactttcacctacattatctcatttgattaatgactctggcaggtggcctgggcagccatatttatctttgctttgtagaaaccaagacttaaagacgttatgaaacacctaaggcatcacagtgatttacaagtagagctgagatttaaac

SEQ ID NO: 691232 - DNA, 637 bp, Homo sapiens
atgatcaccttatgaaaagcaagctaccaacaaatgaaataatataatacaaattatactagtcactgacattattgaacactcattacacatcaggtacctttctaaacacgtaacatgaaataatgcacttaatcttcacaacatcccgttagcccagttttcaaataaatcagctgagttactgagaggttagaaagattctccaaggtcacaaggtaagtgtcagagacaaggtgcaaatccaagaagttgacctccagaagctcgtccttaaatgtgtgtgtgtatatacgcacgtgtgtgtgtgtctttttatataygattccagatgaaatatatggaataatatgtaataggctgatgtgcattctctggagtagagacaggagtgccaatgtggctgaaaggaaaaagaaaggcagggtgggaatcagggaaaaaaagaagagagccagaagcataaatggaatggccatatttgtgcatttatgtaatatcacatatgtgtaagaggaaacatcaaaactcaagaaaagaacaatgaaaaatgtattcccaggaataactgtactttggctttttgaaactttggtaatgctatttcggaaagtgaaatttgaaattctcaggcaat

SEQ ID NO: 691233 - DNA, 637 bp, Homo sapiens
atgatcaccttatgaaaagcaagctaccaacaaatgaaataatataatacaaattatactagtcactgacattattgaacactcattacacatcaggtacctttctaaacacgtaacatgaaataatgcacttaatcttcacaacatcccgttagcccagttttcaaataaatcagctgagttactgagaggttagaaagattctccaaggtcacaaggtaagtgtcagagacaaggtgcaaatccaagaagttgacctccagaagctcgtccttaaatgtgtgtgtgtatatacgcacgtgtgtgtgtgtctttttatatatgattccagatgaaatatatggaataatatgtaataggctgatgtgcattctctggagtagagacaggagtgccaatgtggctgaaaggaaaaagaaaggcagggtgggaatcagggaaaaaaagaagagagccagaagcataaatggaatggccatatttgtgcatttatgtaatatcacatatgtgtaagaggaaacatcraaactcaagaaaagaacaatgaaaaatgtattcccaggaataactgtactttggctttttgaaactttggtaatgctatttcggaaagtgaaatttgaaattctcaggcaat

SEQ ID NO: 691234 - DNA, 812 bp, Homo sapiens
atttattatttttattaagcatttctaactgaatttgaactgaagagaagcaaaattcatatagctcatttataaaaaagattcagtatcatttttagagtgacttacaaagcaatcctttgacagctcaaatatttctaaaatctaattaataataagcagcaaagaaagagttcatacctccatggttaaggaggcttttgttttttgtttgtgttcaatgtcaatcttgactcaaatttttcatagttcagttactcttaatgtgtatataaaaacattttcaatttatcaatgatagcttctactttgatccataaaaagtattaatgcaacctttttggatctgatatgaattatgtgttaaaatttgtgaaccttaagtttttatactacgaaaattacttttactaggacaacgaaagttattttcttatgagcactacaaaataaataagttaatctttaatattgaatttattatctgaattcacactaatgtctgatatttaacattcaagagtgaactttcaaaaccagtctggtttcataaattggatttaaaaacaatgaattattaagactaattttgtatttgaagcttctgatgacattggattaaaactagtatcatttaactttttatgaagttctattaatgtaaccaacatattattgcttatggctttacttttcctagttacrcaaagctactttcacttataactgagcgaagttaattttaaatagtcatttgatatagtgaaaatacaggtgatatggtttggatttgtgtttttgcccaaatttca

SEQ ID NO: 691235 - DNA, 657 bp, Homo sapiens
aggtcttaaaattctgtagactggtagctatatggatatgattttaatagacgagtttcaggaagactctctcaaactgttttttgttgttgttgtttaaaaacttacttgaaatatattggaaaccacatatacataatctctcacacacactacataaagaagtaaaaattcctttccctacttctttcatcctatccaatttgtagagtcataaccattcttaataatttgatgggtattcatttcttccctaaatttatatgtctagaactagagctagagtgtatgcctacatacacacacacacacacccatacatatatattcaaacataatatatgtatatccacatgtattcaaacacagaattatgtttagatarttatggttatatgctggtatgccagagccagactgcctggcttcggttccaggccctagttggatagctttgggctactcagcctctttatgcctggacttcttcatctttgaaatgggataataataatacttatcccataaagttattgtgagaattaaatgaaataatatatgaaaagcccttagaacaggcattgacacattgtgaaggtaatgtattagctattttgatgattatgcattttgtctgcaacttgatttttatttaac

SEQ ID NO: 691236 - DNA, 624 bp, Homo sapiens
gcactgttgttaccaggctgtggtagtgagcaagacctctaggatatactgaagggctaaaccagccatgttcagaagaccatggctattccctgctcaaaaccaccagatttaatattgactccaatcttctccttttcaagaaaaatttaattactttatgaaaagttgaacaaccttaaccagcaatgctgaaaatgcctatttattcatcattcatttattaatgtttgagattgatatggtttggttctgtgtccccactgaaatctcatgttgaattgtaattcccagtgttggaagaggggcctggtgggaggtgattgaatcatggggcagacttcccccttgctgttttcttgatagagttctcacaagattggttgtttggaagtgtgtagcacctcctccttcrctctctctctcccttgctccgccatgtaaggacggggcttgcttcctcttcgccttctgccatgattgtaagtttcctgaggcctcctcagccatgcttcctgtgcagcctgcagaactgtgagtcaattaaacctctttttttttcataaactacccagtctcaggtatgtctttatagcagtgtgagaacagactagtatagagatc

SEQ ID NO: 691237 - DNA, 1103 bp, Homo sapiens
tgccaggaggtggagctcaggcgggaatgctggcaggcctgctgctcacctgctgtgtggcctggtccatggctctgggggttggggacccctgttataatctatataaaaatattttaaagacaatacagagctatgtacatgtaagagataatactaacagtagcaaaagcagcacttctgaatactgtaatttcaactcagttttccattttacactttcattccattagtctttgaaacattaaaaattactccctttcacataaaaattacataatatctggaattatttactagaaactcctagaagagtcatttaaggatgattcctcctacagcccattcaagtaatattggttataaaaccattaaaaagaagttatccaccctaaaattagaaatctaagagctaaattattacataaaccttactataaaaatttacattgcattcagagcatattaaactatttacctgtcttctggagaggagttcctctgatatgaattaaggttttcccttctgtcatgaccagaagaaggctttaaaagaggaaaaggggaaaacatttcaaaaattatttatgttaataacacagactgaaatacatggcttagaaagttggaagtactttagaaattgtatcaaaacattttttaaatcattaagaataattcatgtaacctaaacagtctataagataaaacaaaatcttcagaccatcccagataggcctgtctgtggcaggcacctgttttcattatggaccaaaaacttctttttttttctgtttatttttattttttatttctttttattttattttttatttcaatarttttatgtggaacaggtggtgtttggttacatggataagttctttagtggtgatttctgagactgtgctgcacccatcacatgaataatgaacactgtaccccaatgtgtagtcttttatccctaaccacccccctactctccctgaccctttccgctgagtccctaaaacccattgtatcattcttacggctttgcagaaccaaatacttctttctagccaaaaaaattcaaggtagaaaaagataattctcaaattttt

SEQ ID NO: 691238 - DNA, 1499 bp, Homo sapiens
taagaaagaaagaaacatttaataggaactaacaaacagaagcaatatctctggtggccaagagacggttgattcctatacttgccctccagaaagtagtctttatatagcaagctgcttttggtaaaacatgtacagttggtcacgtctcagaccctcccacaaagtgtgtgaccactgggaaagttagataagcatctttataaggggttatctatgctacaggaattgtttcttggcctgactgcaggaacaccttggtattcaggagtcaaacatcgatcctgatggtgatttcacttcaggtggcattactcttgccttgcaacaggctgttttcttacactctttcctccgcaaccctctaagacttgtctttcatcaacatatattaatagtttttcccattggtttgtttccctttataactttgctgtttytttttccattaacaggagaccgttcctcttgagcctcccctgggcaacatgaggatcttgctattccttcctcaccctacccttctccccatctttgcccgactgctattaatgctactgttactttcacagcacccatattataatgtttgcattctgttttgtaaattaattaggtctttggtgctctgccagaagttgattctaaaaattgcaaccgaagaaacaatatttacattattttaattatataaatattagtcattgcagaactaagtagtgtgattggagaaataaatataattcactggtactaaatcagttccaagcatcaaagtcacatgggttcttttttcttatactccagtaaatactcaaaatcatgtcacgtttcaattttcagtctaaccaataatcttcaagaactcttgttctctgcacctttactgggtcaacctactgttgtttcttggaagcaatgtgctgacatggcgctctgagacgtccacatcttgaatcgtctctcctttccctgggaaccaaccttgggttgcttatcttggttcttctctttgaagctgttagttttcctaaaggttatcttgaggaaagcttcagttcttcatattctaggaggtattcaaaagaacgtcattaatccattaggctgaactgttttctcctttctccctgtgtattggtatgattgatattttaacagcctgggaagctaagagtgacgtcaacaacctcagctgcactgagagtgaggtgaatcattccagagagttctgagcccaaacacacactggcttgagtggtcctgggcttggtgttcccaacaaaggctcttagaactctctttaagcctcagtcagtatttggtgatccagtgggtgttttccaagccaggctgtcagcttgaagagttctcccttggggcaaagtccttttagcatctcaatttaggtaatgagttccctttaaaatgctgaaaggacctgatgtggtggctcacatctgtaatcccagcactctgggaggatgaggcgggcggat

SEQ ID NO: 691239 - DNA, 1265 bp, Homo sapiens
gtgatggggtttgagaaaatttttaaagtggaatcaaacacagatattccactatgtgttgcagtgttaaggaaattacctgctccaatctattgatgtaatattttattcacactaacataatctaagaatgaggtaactcaggtaaatctaataggcacacagttaaacattgattattgacttaacaaacatttttcaattgtctaattttaagtgcaaagaatgagatgagtaagacacagtccctgcatctaagagtttacaatctagtgggaaagatggacaagtaaactggcaattaaatatggcaattaaaataatggacaatttggagctgtaaaatccataagcctagatataaattagagttcataagacagctacatgacagacaatcactcttgggtgattttagggctggcttgttgaaaaacaggtcttagagctgagacttcaatgatgagcaaaaattagtatgatgagagtagaacattacagataggagagcatgctcaaaggcccgaggtttgagatcagggcatatctggataccacgcatagttaaatattcaaacccatgcattgtactcattttctaaattatttctaggccccagtcgttactgaagatttactgaaaaatagtttaattctgttccaactgtgtctagaagaatgggtgataatgtttatatacttaaagttaccataatctttcaactcatctactacaagaacctccttaactagcctccctgcttccaattctgccccccttacagtgtattctccataaagcacccaacatggtttccttttcttaactaaaaatcaaagcatytccttccccagcttaaaagcccacaggggctcccactacactggaaatgaaatgtattctggttgccacagccccctaattcctctacctcatatcctacttctctcctctttactcaccccattccagccagatatgcctcctttggccccttaaagatgccaagccccctagcctttgtactgactattccttctgcctgaatcctcttccccctgatattctcattactggctccttcccattatttatccctccatacaaatgtcacctccttaaagaaatattccccaacaaatttatctaaaacagcaatgcaccccatgtttcttgcacatacattgtttactttttgatttcctatctttatagtagattgtcagttccataagaacaggaatttttctgtcttgtttactta

SEQ ID NO: 691240 - DNA, 1352 bp, Homo sapiens
tttattaaactgttacaaactgaatgggagaccaaatgcagatatttaaatcctgggcatatactgaacattaacttaatcaccatgcctcctccatgacatcattagtaacaacttccaccagttttaaaaatccatttcaaattaagttgcagtaagcattgctacccatttaatgctcagggattttgtaattgagtttttcccctttaaatgtataaatataccagaggataatctttctgacactggcgcccttagtaaataatttaactgattccagatctgaaaaactaacctctrtgtagtttaagttgctctccctccccaatttataaataacaatgcaacaatgtttttcatttgaagtataattacaaccagtatgaaagcagttgcactgaggacagctgtttaaacaggaaccatgtgactccaaaggaaagcataatgcttatggaaacacactagacacagccttaattctagaaacacgtatgatatcagagcattgaagagccatagacctatttttcttttgagcttttatctggagataggtgtgataaattcactatacatgtcctacctcacacagatgctgtgatagtgaaaagatgtgaaacctttgatattattagagaacagaaagaacttctgtttttaactgtctttctctttgcgattcattacacacaaaatttagaaatggtaacttaaacagatctcagttgtattagctgaatgtgtttcagtgaaggaaaagttatcatctgaccttattaatcttgatttgggataagtgcttgataaattattttccaggaagggaggcaccatggctcattacactttgttttcatcttagatctgctgtggactcactgtgcaaccttggcaaagtcatttaacctccccttacctcagatttttcatttataagaagtgtagataatcctggcctacctagcttggcaaaaataaacactagcagaatacattaaataggtatgtacatggaagtttattgatataaaggataaacatgatggcataagagtattactgtgtctttcacataagcctttaaacaaattgctttcatttgaacttcagaactgttttgacaactaggtattttggattcgtttaagcaaatagggagcgattatatttacttcggtccattagaccgaaatattctggctgcatatcttttttatatgaatatgtttaatgcataaacttttatttttctggctatttaggctctgattcttctagtttaaatcattagcaaagtagtaagtgatacagacatcaacaatatgaatcagataaaacaaattgtc

SEQ ID NO: 691241 - DNA, 602 bp, Homo sapiens
agttgcataacatgtttatctatcctattttcagagaaataagagaactattgaagcagtgagaagtagaagggcaaagagtttgcataggggagaatcaaaaagaagtattctaaatttttttcagccatttattttcatgggaatttctcaaatctcagaaaacacatgagattaaaaattgtgttcttcaccctttgccacagggtcgctactgaaggacagtcaaactgacaaaacttttggttatattgtagtgtcacagtaaaaaaagaattatcattgcataggtgctaaatccatgatcgctttctcctgaataaatctgctaaattgtgaagacaagaaggttagaagctaaggcaaaaccagtgaaactagactgaatgtattatcaagcttgtgggaatgagaagacaatgcagacagaaaaataattgctaacggagcccagaaaagaggatatcattttaaatatacaattttrtacataagataacataaagatgatgtatgtatgtaaacctgaattaagagagtatttttcaaactataatccaaatgacgtatttctatttctgatttttataaagcaataaggg

SEQ ID NO: 691242 - DNA, 618 bp, Homo sapiens
atgacatcagcaactaaaggaagtattggaattaaatttgaaaaatttaaatgagtgtattaacttcagtatgctaaatataattcctgttgtaaccacaaagaaaataggtaagtaacatatacaacaggaaatcaagtaggaatttgaacgtttcactacaaacacacacacacacacaaatgaacatatttgccacagtgcctcctttatctatagcttcgaaatatctcctgtagaaatggcaagaaaatggctttgaaggtgcctccttctccataacgaaggcagaaaatcaaaattgttcttgttttccgaggagaatagcaaagatttgtaccattcttaacaacctaaaggatacagggatggtgagatactattatatcacacttaactcaccagtctgttttwtatgaaaaacctgagagatcattgggtatgacagtagattatcacaaatacaattcatttgttcccaaattgcagctgctgtaccagatgtgctctctttgctaaagcatgtaactacagcctcaagtacacataatgcatttattaccctgaaaaattcattattaacgacctctatcaaggaaataaattaaaaacagttca

SEQ ID NO: 691243 - DNA, 278 bp, Homo sapiens
taagggttttggggcttgagtatcctttgctttatttcaaggtggcagtctccacttttttattgtttggacttgtataataaacctttgtcattttctattatcattgcttatttaattttatttatcactttgctttatagatttttctatctacaggacatatctagaatttgtatatcagagttcagttaacaaagtaaaaccgctaggactgatatgaaacaaagtatttattatagaaattagatcttayggatttatgagatccagtgaca

SEQ ID NO: 691244 - DNA, 1242 bp, Homo sapiens
gaactttgctatgtgctgaacacttcttatatactagctcattaaattctcacaataacactataatgtaccattactattcctttttacagatgggaaatggaagattaacagaagttaaataacatgcctaatgtcataagccagatgttaaaattaggtttctttaactctaaaatctatgttcttagctagtatacactgcctggcacttacatattcacagcagacttattaaaatttcatttgtatatctgcaggtaatctgtgagaacatataaaataaaattaaaattttacagcaagttagttatctgcaactaccacccccaatcctagtcttgtctggattaacttgagaatatctttccggatatatattcacatatttatattcatttatttacatatatttgtataaatagaatatgagacttttaaaaacayacaaatacaatgggcccttaagcaatgcaggggctggggtgccaactccacccccctaaccccctgcctacagttgaaaatccatgtataagtcgattaacacattttgtatgtttatatgtattatatactgtattcttaaagtaagccagagaaaataaaatgttattaagaaaaattataaggaagagaaaatagactgtttgtaagtggatcatcataaaggtcttcatcctcattgtcttcatattgagtaggctgaggaggaagagaaaggaggggtggcagaggcgaaagtggtggaggaggtggaaggagaggcaggcacactcaatataatttctattgaaaaaaattcacatataagtggacccatgcaattcaaacctgtgttgttcaagggtcaactgtatacatatacagaaggagaacctatttgactgtcatcttaaagtcacagattaatgtgtcaaattaatgtatttgtgttggttaatataaatgcttctatgtggcatgtttagtcaagactctttccagtgaaacttagtttaaactggcttaagcgaaaaagggaactcttaaaggctcataactgaaaaatcttgagctacagctgacttcaggccctgttggaattcaggttgtgagatgatcttccatgccaggaatctgactctcctctgctccgctttcctgtgttctgccttcattttcaaacaggatttccccaagtgtttgcaaagatggagccagcagtccaggcctacattctattaccataacaatccttct

SEQ ID NO: 691245 - DNA, 641 bp, Homo sapiens
caagactgccttgcttttatatggatctcttgttcacataattagtgtattagtcagggttctctagagggacagatctaataggatatatatatatagagagatagatttatatagatatatatttatctcttcatatacgtgtgtgtgtatatatatatacatatatctcctatttttacaatgagttttctcattgtttttgtttaccacatgatatctggtctggactcctagatatcatgtggtaagggaaaactgcccagtcagagtcattactgtctaatggatgttagccacagaccagtgaatgtagattgggaagagaagaaagtgttcctttccttgcagttcccaccatccaaacttctgtttttggccataaagaaccctgacattcaacctccctcttcttcccagttctctactcacttattcccactctttatatcttcaaaatatatatatatatatatatatatatatatatacatatacacactatatatatacacacactacatatatacatagtttgaagatataaagatatatatatakagagagagagagagagagagaaagactcattctgtcacctggactggagtgcagtggcacaatcatggctcactgcagcc

SEQ ID NO: 691246 - DNA, 1276 bp, Homo sapiens
tttggtgctcaacgaatcccttactttctttttcttttattacccgccattgttccactgttaattttctgtgtagctagataaattcccatggataatgacttgttttccttgacataaatcaatctcacagctcccggcagctcgttaagcacatggtgtgatctccacagtccacaggcctgggccatgtcacttccccacttaaaaaacagctgctcccactgatgccgatggctgtctgctgcctgtggacayggggctgggcccttggcaggaaaaagcgcggtacagggacagtcccagctggtacgcacagggactgggccagtgttcagatgaggcctttctctgttctgggtggccctgtagcacagctgagctacagagtctggccacctccgagttggagtggcagctctctctccacggggcctgcagaggctgggccacctctgagttggagcgacagctctctctctatggggccagcagagcctgggccaggtgtacatcaggtccagcttctgtcctggcctctgccaggtgttacatccaacaaaccttgtgcacccctaactgcctagtgtctgctccccagcacagtcacgcggctgccatggtggaggctgagtaactcaagcatgtttaccttcctggtgctattttctgttcctccccatctttctatttcaccaaatacatcgctttccagccatgtcagacttgtcattctcaaacatcctgtgtgctctgctcagaccaccctcctgtcttcttggcttaggggacacctatggatcctttatcatttggctcaagtccggcctcctctcaggacactcccctggggtctctcccacaccaacccaggggttccctgcttggggctgctcctttgatgcctgcccagagagctgtgaatgtctctgagacactgttgcctaggctgtgtctaagctgaggcttggagcgctctgaaagtgaggactacattctttcttcatcttgctgttacgatgcttagcgtgaaagtcgaatacagaacagatgccgcgtacatatttgatggcatgaaacgttgaatacagaacaggtgccgcatacatacgatgagccaatgggtgaatccccactgaatgattgtcaaactgtatgtaaacaaaatgttaaatgaaaaactacggtttccaagaaataggacaaactcactaaaagtactcaaatgatgataaaaaagaaaacaagataatacaaatcatcccaaattccatca

SEQ ID NO: 691247 - DNA, 597 bp, Homo sapiens
tgaatttgtgtctcacgactccgggccccttacggtccttggcgagttcttgggtcttagtctgttcatgctgctgtaacagaattcggagactgggtaatttatgaacaatggacatttctttcttgcagttctggaggctgagaagtccaaggtcaaggtgctggattcccgtgcctggggagggcggctctctgcttccacgatggcgccttgagctctgtgtccccccatggcgggaggcaggacagcaaaagggagctgaggtgtgaagcctcttacacaggccttaatcccrctcacaggggaggcgccctcatgacccaattacccggaagggccccacctcttaatacgctagactggggattcggtgccaataggggttttggagggacacgatgttcagaccacaacagtgggcaccctccctctcaggttgcactcttaacactcttaagagacttctgtttctcacagcaaatcctctcgcttgaacctggagggaccaaaggcatgaccggagccgcattctctggcgtcagtttgtatttttgtcaatgaaaaagaatggaagtggaattcatataacctgca

SEQ ID NO: 691248 - DNA, 1398 bp, Homo sapiens
gaatcaattatcttatttttatcccaattacatgttggaatgatctcttttaaagtggctgccacacaatttagaatgacacatgtggcctcaatccgtggctcccaccgtcattctgctgaactgcgctgtgcaggagaaagaggctccaaaacgggcacatggaggcgggaagaacaagggcctggcttcatggcgaggccgcccatgagccaggctttgtaggaagaagaatgttccagagcaaaggtgtgacgtgagactgcaaggaagcatgaagggagtgggaacggcggcggggtgggaagcgtgtggtcgcctggcgtgtgctctggtccacactgccgagtttggtcttcgttccctaaggccygggcagcctaggtcagataagtcacttgctcaaaccctctatgtgactgcaaagaccctggaggcacgggagctactggaaggatgagaaccaggaaggactctacttccacagggtggaagggagactcaccagatgcatctgaagacatgactaacgacttcgtggccaaaaggttgacggcactggagtcaatccttgagccacacagaatcaaaccacttgtgttgaaattggaccgtgaagggcagagtctcagatggtaacacagagtgggagaggcagagggagcgagttccgattcagccctgtggcctctgaggcacagtgaggcacagcagaaacacctgccccacgggaggtgcagagcatgccggctgtggaagcgctgtccaaggtggagggaggtgccacacagccccttgtgagagaagccaaaggggccggacattggcgtctggtggcgcggaatggaaagaaaggtggccctggggcctggtgaccctgaaggtaaatggccaggaggctgacctggagggcgagaaggacacagcaccaatggctgggttcccacgccctgcctgcctgagcctgaccctctcatggcagagaaggggcacaggggcactttcccctacccgctgtcatccttcctcaggtgccctgggacgatctccgctacctttttggtgaaatcatgtatggcggccacatcacagatgactgggaccgtcggctgtgcaggacctacctggctgaatacatccggacggagatgctggagggagacgtcctgctggcccccggctttcagatcccccccaacctggactacaaggtaaggatgacaagttaaacaggagctcaacgtaatgaaggctcgtgcctcccggtgagagcctgccagcacaaatggagtgtcaataattgagcaagaacccaggcagccaaaataagagaggatgagaaatgcgtctcacttggaagaagcacaaggctaatacaaacaaccttttttttttttt

SEQ ID NO: 691249 - DNA, 1421 bp, Homo sapiens
cgcatgttctcacttataggtgggaattgaacaatgagaacacatggacacaggaaggggaacatcacacactgggaactgttgtggggtggggggagaggggagggatagcattaggagatatacctaatgctaaatgatgagttaatgggtgcmacacaccaacatgacacaggtatacatatgtaacaaacctgcatgttgtgcacatgtaccctaaaacttaaagtataataataacaataaaaataaaaaaataaaaaaaacagatccaggccaatcagtgcatcaaatctccagtctaggagatttggctacagagattggtccagggttgaacatacgacatgatcagacccaacgagtcacgatgagactttagaataaggaattttcatgcttttccatgagagatgaagctgaaaaaatgcaagatctacacctgctataggcatctcttactaccacagggaagagcctaagaatgaatcatgatgaaagagaagaacctagtgatggtgaatcaaaaagaacataagtcctgatcaagcatctacatcaaaccttcccaggcttttcagtcacatgagaacccccatgttgctgtggctggttttggtaacattttcagttgtggaaatctaaagagctttaacagcacaacgtatctgtaaatgctgataatcttggaaggaaggggatctggttcagaagcaggacacatgagtaaggtcagagccagggctcacaccagcggtggggccaatgggatgggagccaggcaaacacacctgggggcacctgacatgctagaggtgtgccaggcccttcttatcacagacaccggggcaggctgagcaaaggcggggagatctgtcggcttgtttgcaagcccttgaaaccactgggtctgggcttcaagacaattagggaatctgggcagaaaggcaggagtaaggttccaagcaagagtgtggacaggtgctgaatgtgtggcacaaggttaggatttgggcacagagaatacaacaggagcctggggcttctgcaccctaggaatgcagcccgaatcagtgtggcactgacagtaattttttttccttaccttcatcctctctgaaatcccagagtctacgggaagactgaacctcctgtggtatgaattaaatacattcatctatgacgagtggagcaagttgggtgggtgagaagatcaaccaacactagtcacaggagtcccctaaagctaggctgagagctccttgaggataaaagccacatcttgttcagggcagtcactagccccacaaggaaaggcaggaggagcaggacatgtgcccattctgcagacacggctttcagcccaggaagagaaaggatcacaagcacagcatgggtagcaggagacaccggacttcaaa

SEQ ID NO: 691250 - DNA, 1421 bp, Homo sapiens
cgcatgttctcacttataggtgggaattgaacaatgagaacacatggacacaggaaggggaacatcacacactgggaactgttgtggggtggggggagaggggagggatagcattaggagatatacctaatgctaaatgatgagttaatgggtgcaacacaccaacatgacacaggtatacatatgtaacaaacctgcatgttgtgcacatgtaccctaaaacttaaagtataataataacaataaaaataaaaaaataaaaaaaacagatccaggccaatcagtgcatcaaatctccagtctaggagatttggctacagagattggtccagggttgaacatacgacatgatcagacccaacgagtcacgatgagactttagaataaggaattttcatgcttttccatgagagatgaagctgaaaaaatgcaagatctacacctgctataggcatctcttactaccacagggaagagcctaagaatgaatcatgatgaaagagaagaacctagtgatggygaatcaaaaagaacataagtcctgatcaagcatctacatcaaaccttcccaggcttttcagtcacatgagaacccccatgttgctgtggctggttttggtaacattttcagttgtggaaatctaaagagctttaacagcacaacgtatctgtaaatgctgataatcttggaaggaaggggatctggttcagaagcaggacacatgagtaaggtcagagccagggctcacaccagcggtggggccaatgggatgggagccaggcaaacacacctgggggcacctgacatgctagaggtgtgccaggcccttcttatcacagacaccggggcaggctgagcaaaggcggggagatctgtcggcttgtttgcaagcccttgaaaccactgggtctgggcttcaagacaattagggaatctgggcagaaaggcaggagtaaggttccaagcaagagtgtggacaggtgctgaatgtgtggcacaaggttaggatttgggcacagagaatacaacaggagcctggggcttctgcaccctaggaatgcagcccgaatcagtgtggcactgacagtaattttttttccttaccttcatcctctctgaaatcccagagtctacgggaagactgaacctcctgtggtatgaattaaatacattcatctatgacgagtggagcaagttgggtgggtgagaagatcaaccaacactagtcacaggagtcccctaaagctaggctgagagctccttgaggataaaagccacatcttgttcagggcagtcactagccccacaaggaaaggcaggaggagcaggacatgtgcccattctgcagacacggctttcagcccaggaagagaaaggatcacaagcacagcatgggtagcaggagacaccggacttcaaa

SEQ ID NO: 691251 - DNA, 1854 bp, Homo sapiens
attatgatagatgaagaacagagcaaacacttatatttttaaagagctcatagtttattaggaaaagcatgattaaacagttccagaaaatgaacattcaaatagaagtattttgatgtaccagacaggcatccaaatttgggaatccttaattcttccctggaaaagaagagctcaggaaactactgtagaggtggcacaaaacaacatataacttaagatgccaggttaatagattagcttaattatgtgagtttgttctttttttgtttgtttatttttgcttctttgttttagatggagtcttgctctgtcacccagggtggagtccaatggcacgacctctgctcaccacaatctctgcctcctgggtttaagagattctcctgcctcagcctcccaattagctaggattacagatgcccagcaccacgatcagccaatttttgtatttttagtagagacagggcttcaccatattggccaggctggtcttgagctactgacttcatgatctgcccaccttggtctcccgaagtgctggcattacaggtgtgagcaaccatgccaggccgagtttgttctttaaagcattgagatttgtaaataaaatatgtttataaaccaaagataaaatataaaaatatccaaaatcacagagaataaaatagttacaaaaaattctcctatgagaatatctaaatcttgacacttaatttaactaagtgacagagcatattgtatttgaatgactaatctgtgtaggttcataaagtttatattctcaacagtataaaagcctgggtcataatgaaaaacttaaaaaagttttttctctatttttaatgtttatttaaatagaaaaaaattaaaacatagcagtagagaatgggatcaattttatcagtgggcaagatattttacaaatttttgtcagcagaaaagaacactatagtaagctccatagatatgtgtgaaaacacattagacacagttgaagaaaggattattgaaatagaaaatagtgcactggaaaatactcattagcaaattattgataggagacatagaaacaaaattatttaaaatgggcaaaaataaaagcgacccagtgaatatttcaaataaacatgtaattcaaattctaaaaagaaaagagagagaagaatagaaactttatgtgaagaaataatggctaagaatttgcaaaacactaattgaagatatcaatctatataattaataatctctataaattaaaacaggatactcaaagtgctgtaaaaaaatactaactagaaaatgttaagaacaaataaaagaagataaaacatacattaactggaaaggagcaaaataaggcctgagtattgatatggtaacaaaagtaatgaaaaaccaaaaaccaatggactgacttcaatagattgcttaaggaaatgactggcaaccaagagacatagatgaagccctctcctcgggtgtcaacagtgaccaagtgaagtacctgaactttggccttcatctggcaataataaggtagaaatgcccttctcctgacagagcagtgttggagaaagccagctaaaatcagaaggtttaaataaaatccagaatctcataaaataataaaaatgtccagatttcaataaaaagtcagtcatcrtaccaaaaaccagactgactaaatgaaaggaaaaaaaagataaccaatagatgccaactctgagatgacagagaaataagaagtatctgaaaaagattttttacaatccagcataaaactgctacaaaaagcacctatgaacttacttcacacaaacacacacatatatgtgtgtatatgtatataca

SEQ ID NO: 691252 - DNA, 602 bp, Homo sapiens
tgtggtttgaatggcatccagttttatgtcttctatttttttatttttgtttcttctgtatcttttttggaattaaagccatgtacccttacttgtatagaatttaagttacaygccaaaatacagtttgggggacacaaagcaatatttattatgttattactatgtactgggtactacgttagggactgaagatgccaaaatgaataagagatactctggcttcaaggagaccgctgtttttaaaatttaaaatagatattataacataagtaactgacaattatcagctgctggttactgaacatagaaattgtacttattttcaaggatttaagagtgatttgaaaagtttctagtgccacccacactttcctcccaacctacaaaaatctctgtgcagaagacaaggtatttatcacaacaattgaacagatgagaaaagtgaggctcagaaatactgtaacttgctaccctcgcttctatggccaaggctcctgagaggtatcaatgcctatcatttctcacctcctgcttgcttttcaacccaatgaaacctgagttctatgcccaggactctagcaacttctctcactaggaaa

SEQ ID NO: 691253 - DNA, 602 bp, Homo sapiens
tgtggtttgaatggcatccagttttatgtcttctatttttttatttttgtttcttctgtatcttttttggaattaaagccatgtacccttacttgtatagaatttaagttacatgccaaaatacagtttgggggacacaaagcaatatttattatgttattactatgtactgggtactacgttagggactgaagatgccaaaatgaataagagatactctggcttcaaggagaccgctgtttttaaaatttaaaatagatattataacataagtaactgacaattatcagctgctggttactgaacatagaaattgtacttattttcaaggatttaagagtgatttgaaaagtttctagtgccacccacactttcctcccaacctacaaaaatctctgtgcagaagacaaggtatttatcacaacaattgaacagatgagaaaagtgaggctcagaaatactgtaacttgctaccctcgcttctatggccaaggctcctgagaggtatcaatgcctatcatttctcacctcctgcttgcytttcaacccaatgaaacctgagttctatgcccaggactctagcaacttctctcactaggaaa

SEQ ID NO: 691254 - DNA, 1656 bp, Homo sapiens
gcccaggcgggggcggggcgcgccgagggcccagagctggcaggtgccctggcggggacaggtctggtgcccgcgcctgctcgctggaccgcccgccccgcgctctggcggctcctcccgggcgatgcctccgctctgggccctgctggccctcggctgcctgcggttcggctcgggtaggcggtgaagggcaggagggggctgagcccagaaagagcgggcagctctgccctggggcgcccgccgcctggaccctgattcctggcgctggggacccagatattactgttatgaataatagtgatagccaacgtttacgggcctcctctgttgggaatccgagggctcacagatggctgcagccctgcgatgtgtgttgcaagagaccaacatgcaggggggctgcggtaggacagagaagggactagccccagccccatggtgacgcctggacgggggcagatagagagatatttcggccgaggaagcagcatgggcaagttcatggaggggagacaatattgggctgtcctgggaactgccagtccatgggaccagctggagcgtggggtgaggggagcctgtgggggaaggggtgaggctggagaccgaacaaagcaaagcccagaacttcaggacctcactgcctttccagagaggctggacttcgtcagggggcgctgggggaccatgggagggccatagccagagaatgaggcagtcagacttgcatgtggggggagggtgtttttactagggcccaggtgaggaaggtgggacggaggagggctgggccgatggcatggagagatgcttaggagggacagtggagttcttggcaactgagtgtctgcagcagggagagaaggcagcagtttggcccgaccgctccatttctgagcaggatgactgggcagggggcagtgtctgagacagcttatgcggtggcccagggggagggtgaagcccagggcctggcacacaacacgtgctcagtaactgcaagcagagtgggtgtggacagttctgccggaggtcagttcccatcctcactgcctcctccagctgtgaacctgcagccccaactggccagtgtgactttcgccaccaacaaccccacacttaccactgtggccttggaaaagcctctctgcatgtttgacagcaaagaggccctcactggcacccacgaggtctacctgtatgtcctggtcgactcaggtaagggtcctgcttccctctggctactccaaaaggggctctgacctgtctgcagggaggagggaaggaggcagatagaggaaccctccatgcctgtagtcgtctcattaaacaggtactgcagccacagacctgtccttgccttgcagggacatccagttagtgagggaagtaataacaccaccagtcactgaacacctacaccataccaggcactttgcacaccatagagctagtatctacaaccagcttgtaaggtagctattaccaatccccattacagagcagggaagcaagcctcagagaggtggaataaccccccctggacctcccagggctggagagtgaatcctgatctctctagtccccaagcccaaggtccttcctgaggctccraaaggtggctcaagattggtgtttctgagacaaaaccat

SEQ ID NO: 691255 - DNA, 2035 bp, Homo sapiens
agaaggtttgttttcagggtattaaatactgaagcctaaaacaaacaggaatgctaagatactgacttactgagaaatttcagaaatgattcaaaagagatttctactataagaagaatgaaagtttttcatataaaaagatagggctcagatggacatatcaaaaaaaaatcaaaggtgaaatgttgattttatcagctttcttaaaagattactatcatggcatgtcagagtcagaaatatcatttaagatcctcttattcaattctttcattttaaaaagaagcaggggtaggccgggtgtggtggctcacgcctgtaatcccagcactttgggaggccgaggcaggcggatcacgaggtcaggaaatcaagaccatcctggctaacatagtgaaaccccgtctctactaaaaatacaaataattagctggacgtggtggcggacacctgtagtcccagctactcgggaggctgaggcaggagaatggcatgaacccgggaggcagagcttgcagtgagccgagatcrcgccactgcattccagctggggcaacagagcgagactccatctcaaaaaaaaaaaaagaagcaggggtataggaaacccagataggaatgggaggcagatctgatcctcattttcactaaacacagtttctctggtgaatgcatgaaattaagaagttagttgtcctaaagagccttcaattcctacttatagaatcaaggattccttttttctcttcccattaaccatttggttggtttctctttcgccaactaagttttgttttctgtagaggagaggctatctttatgtcctttcactacctagcacagtaagttcagtgttaagaaaacaatattctatgcatcttaagaattataaattccaagcactgtagattgatatagagatggttgctaagtgcccaatggtacttgtgctttcccaatataggggaaagtattgttagacactatcattttatttgattgggttttccatcttcccagatgggcatgcttcaacgtggacagggcccttttctctcttgctcaatcttggttccccagggcctcacatggtaattggcaaagaggaggtctttaataaatttatttgttgaatgatgaaataaagcagtagatttgccagggtagacacagtggaaattttcaaaatgagttcacatggaacatagatacttgacaaccatttgccaaacagggtatctagcataatgtctagaagtggcagactccaccagtcagacttggatgagaaagccagttctgtttgctggcagctttacgactctagtcaagttttttaactcccctaaatctcaacttctgcatctgtaaaatggacacaatagtagtatttatctatcaggattgttatgaaaattaaatgaagcaatgtagatatattgattagagtaatgcttgacacttggtaagcagtcgacaattgtaagctgggagggaaggatgcccctctccaatctcatctggctattcttgcctatggagaaagttttatgggcacaaacccaggtttctggaaggactgttacgctgtcagtatcaggagatacaccaggcaagtctctcatcacttcaaacatctgggctgtaagtgccctctgcttccctccctccccgccctaggtgctccaggggcaggacatgggccctaggccaggctcgccatctttatccatgtgactcactctgtaactggacccagagcctcacccacaggacagccatcctagattcacagacacggtgaaaaacagctctttgaaattcagcctgagtcctgcaattcagcagtggtttccagagaagccctgcatgaggagcgttatagagtgttcagtaactccggtaaactgcacttcattttccacttggccatttttgtcctttgtgtaaggaacctctagagagagcaccaggagtgaggtaacaagccccagcccttttattattattaaaggaaatgtcggcctgaggatcc

SEQ ID NO: 691256 - DNA, 633 bp, Homo sapiens
tctggagataacaattttggaaacattctagcaagccagagatggtatattaaaaataactgagcttttactgcaaatgaagcacatacgaaatatcaaaatgcttctttgttattttattttagtgaatattaggaaaatattctatctacactctacattttgttgtaactgctttatcttataacagaatgataaaaataaatgcaagacttttttagagaaaattatctatcacccactcataactgggtgataggtgatttattttagttcrtactgttgattggctgtttatgataattgctttttgattggtttgtgcaaattggaactcgaaattccaaggtgagatttataacactaggaagatttttattaagccctgaacaaaaaaaaatatgtttataatgtgaattttaattgcattccactggaaaaaaacaagttcatatttcacaattaaatgaaaatcacttaggattaagaaattcctattgctgaaatattctaagttccttaaaaaggtaagcattactggcttgttctagcactactgactctaataatcaaaatcacatataaattccaaaataataatactgatagcttacatttattgatcacttagga

SEQ ID NO: 691257 - DNA, 1188 bp, Homo sapiens
taccaaattgacctattgggtaattttctaaaagccatgtatatttttactatttttagaaagttttcataggcagtcgagttttcaatttgtttactattagagtttattggttttaaacaatggtgtgctgataatctggttctaaaaaaaaaaatgagcccttggccagctgtggtggctcacacctgtagtctcagcacgtcgggaggccgagacaggtggatcacgaggtcaggagttcaagaccagcctagcaagatggtgaaaccctgtctctactaaaaatacgaaaattagctgggcgtggtggcaggtgcctgtaatcccagctactcaggaagctgaggcagagaattgcttgaacctgggaggtggaggttgcagtgagtcaagtttgcactactgcactccagcctgggcaacagagcaagactccttgtcaaaaaaaaaaaaaaaaaaaaaaaaaagcccttatttgaagcatttgcaaatttcagtcatctaaatactcccatcatggacaatttcaagctatcaatttcatgtcactgaatcaaaaattgggaaaatgtgtgcacaatagtttcttatgagctggtacaagccagctccagcacactcctagctctaggtcaattcaatgttakccaattattggaaatgaccaactcagtaaatgacaaactcagcaaatgatcaactcatcaaatgacaaatatgtcaagtaaccaatttacaaaatgacaaatttatcaaaagccaattttccaaaagctaacttccagaaaaataatgtgtcatatgatcaattcccaagtgaccttagttcctaaaacatatcaaattccttaaagaggaactaacaatttctttattcattgtttctccagaggcagacaaatgtaggggggaaagaaaagcttaaagatataaagaagataggcaattgtacatataaaaacatttgaatataaaatatgctcactggaatataccacatgcatgactctggcttgtagccaaactagactgagaatgctgcaactaaaatgcagacaggcaatgaataatcaaattttgaaaaaaaaaatcctaatcaatttggcattttttaatttgctatcttaacaggcagattggtttttcagtgaattgactttacttaaatttactcttacaatcttt

SEQ ID NO: 691258 - DNA, 1188 bp, Homo sapiens
taccaaattgacctattgggtaattttctaaaagccatgtatatttttactatttttagaaagttttcataggcagtcgagttttcaatttgtttactattagagtttattggttttaaacaatggtgtgctgataatctggttctaaaaaaaaaaatgagcccttggccagctgtggtggctcacacctgtagtctcagcacgtcgggaggccgagacaggtggatcacgaggtcaggagttcaagaccagcctagcaagatggtgaaaccctgtctctactaaaaatacgaaaattagctgggcgtggtggcaggtgcctgtaatcccagctactcaggaagctgaggcagagaattgcttgaacctgggaggtggaggttgcagtgagtcaagtttgcactactgcactccagcctgggcaacagagcaagactccttgtcaaaaaaaaaaaaaaaaaaaaaaaaaagcccttatttgaagcatttgcaaatttcagtcatctaaatactcccatcatggacaatttcaagctatcaatttcatgtcactgaatcaaaaattgggaaaatgtgtgcacaatagtttcttatgagctggtacaagccagctccagcacactcctagctctaggtcaattcaatgttatccaattattggaaatgaccaactcartaaatgacaaactcagcaaatgatcaactcatcaaatgacaaatatgtcaagtaaccaatttacaaaatgacaaatttatcaaaagccaattttccaaaagctaacttccagaaaaataatgtgtcatatgatcaattcccaagtgaccttagttcctaaaacatatcaaattccttaaagaggaactaacaatttctttattcattgtttctccagaggcagacaaatgtaggggggaaagaaaagcttaaagatataaagaagataggcaattgtacatataaaaacatttgaatataaaatatgctcactggaatataccacatgcatgactctggcttgtagccaaactagactgagaatgctgcaactaaaatgcagacaggcaatgaataatcaaattttgaaaaaaaaaatcctaatcaatttggcattttttaatttgctatcttaacaggcagattggtttttcagtgaattgactttacttaaatttactcttacaatcttt

SEQ ID NO: 691259 - DNA, 1879 bp, Homo sapiens
tcccagcccagtggagtcttggcgcccccggctggatggcaggctggccacactccaccacgggccagatggagcctgcagtctgcatccgcttccccccgagtcaccccgcagccaggtccggagcattccactgtctccctatcccactgtcagtgtctgcgtgcaggtgctgagcctggcttggtgttcttctgtcctttgtttcctgtgaccctgtggtgagtgtgaccccgtggtggggcaggggctgctctctggccttcccagtggagaggatgagcaaggggccccggcagccgatggggggcttggagaaagggcgcttaccccaccctggggctccttggggctgccaggggratggtgcccaggctggctctgaagatagggtaagatgactgggccaccaaggtgggggctgtggggagcgctagggaggccctgccaggagtcggtgccctgagagcagggcgggcactgggccagctcaggccgaggggacctgccagacccctcctgggagcttggacctccttgggtaagaaggagcagaccttgatggggctgggctggggctgtgcttgagggactggagggtgacaggcagaagagggcagtggctccacaacgggtagacggggtgagtcttggtgtctgtcagtgactgccagcatgcccagcatcatcacacgctctgctttctcctggcaccggcctggtgcgtctccccggggctcgcccacctgcgcgggagccagcacttgcagggacccaccttcctgggttggtcacctggcttccttcctctccacccccagcgcccactccccctggctggactctccctctgtcctccgaggaacagcttttcttggcggcctccacccccagctcctgccttcctggagtgacttgcccctgggctccctgtcacttctgaattacttagcctgaggagcgtttcttccctttgtgtctccttccctagggcacttcctctttaccttcccgtcccacccctgcggctgacactgaagattctgctgtgtgccagtgagtgagcgggcccagcatgggacacttttccttggaaatgaggggaaagagggctgcttcctggggaactagacagagcttggcagtcttcgaggaggcctggtgtgtcctctttgttcgaaagactgttttgcctcaggccaaattgtccgactctgccaaggcaggaaggagagtaggagatgcatggatccctcaagtgaacaagagaagagcccaggacatgccggggtcattggttgctggggtcattggttcctggggttattggttcccggggttattggttcccgggttcattggttcccggggtcattggttcccggggtcattggttcccggggttcttggttcccggggttcttggttcccggggccgtttcaggccacctctggctcctgagagcgaggggagcccatggaggcctgcagaggagagtgggaggtgaggacagggacctctggatatggccctcaacagtacgatggtccttgtgatgctgccatctgggtggtgcacgttcagtgtgggtgccagccctggcgcagtgtcagaacagccgtggtcacgttgagcatgtgactcagctcttcgttccccggggccaacgccttccctcttccaggccatcatcgtgtggaccccagctgccaactccgtctccatcctggactctgctttagtgccctccccaccctggtcaccgctggactttatgtgcctgggtgctcgtctcccccaggaaggaaggaagtccccaagctgtcacggatgcccactgggctgctcttcgacagacgcctcagggtccaagaggtg

SEQ ID NO: 691260 - DNA, 1398 bp, Homo sapiens
ggctgctcgtcacatcttcttttgtccttgatgctcccagttttgtcagggtgtgtttgggtgtggagcaccctgttgtcttggcatatgtttgcctttgtgtctgtgagtttgtgtgttttatcagtcctggaaatccgcagctagtgcccctttaaatattgctccatagtcttccttccttcccttccttcccttccttcccagtcctgcagagtcagctgtcacacctcctcaggtggctcttatgggttttcaactctccytggacttttactttcagaatacaaaatacaggatttgggctctccttcatttttgtattttgattccctctgctcagctgatttcttcgtcaggatcttctcactcaccgaatctcctttttatttttgcatggcatttattgcttaaatcattcattgagggttttcttttttttaaaatgcatcaattacacttattatttttgaaagtctactttgttcttttcctaaaatgattaattttgacaattctgttgcttcctctgattcattacttaaaatttttcaagtattttcataaactttttatttaatcaaaacatacatggggaaaatgatagtgaataaagcattaagagattctttgaaagtttcagaaacagtaatcgtaccatttctcatgatatgagtaactgaagaacttgactgtcttttgatgtgtttgctgccttttttcacttctttctgtgttggcttgtgtttgcttgggagcgtatgtctcgctggtcttactgtttggaaatagagggatgggagtgaggaggccgttcttctgataggcatgccacgtgcatttcctgggagctgccctggactccagcccctgcatcctgaacgctgcagctctgggctcacctcggtcctgacccccatgcagtcctccacccgctgccctcaactctcctgtcagctcgagttgcttttgtttcccttaattatatatttctggcttgttggagggtttccttactgctggtgagcccagcagtgtgacagaaggtatgtcttatgcagaacctggggtttccacagcacaagagcctgtaagatgacttgtctgccacgtccccagaagaggaagtttctagtacttcaaaagcccaacctttggccagctttctctcagccccttttacccagcttcgttttctccccaccagctgggatgacaggtcccgcggcggagacacttgctggcagccggcactgctcctctgcctccccgcacactagcgaagccccagcctcggtggaaccccttgctgtaaggcttctccttccttacccaggaagtgcaggatgccagggaagagcaccggctcagcattctggccacgctgcacagccgcga

SEQ ID NO: 691261 - DNA, 775 bp, Homo sapiens
gttcctgtatccacaagcatcactcgtgtgtttcagatcaaggtgcagcttagtgggtcttggctcacctacatttctgggcactgggctggtccgcgtcccacctacccttcaagaagacatttattgcatgcttgcactagctggcacaccaaggagaatgccgttcgataacagcaygtggattccctgcgtaaaccagaccttgaccttaacatgtccaatcctgtatactggcgggtggggtggtttctgacaccagccaactggcaccaactgggcgtccaatgatccagttccactctgacaataactgcccagagctagcacacacgccacaggggctcaggtccacaaggctgcccccatttcagacacaagtcctgggcctcctggacttctaaagatcggctataaatcaggagttcccacaagcccctctcaggttctgtaatttgctagaagggctcacaaaactcagaaaaacactttaccatgttgatgggtttattgtaaaagatgcaaataaacagtaacatgaaggcagggtctggaggggtcctgagtgcaggagcctctgtgtcagtaccactggggtcagcaggtgcggctgaacatgctgctcctctcgtctctgcgtcctggtgactggccccatcccgaggctatccaggggtcctgccctaagtcacttcattagcataaactcagaagcacataagaagctcctccttaggaataacgaaaggctcgctggacactcaggaagctcctg

SEQ ID NO: 691262 - DNA, 775 bp, Homo sapiens
gttcctgtatccacaagcatcactcgtgtgtttcagatcaaggtgcagcttagtgggtcttggctcacctacatttctgggcactgggctggtccgcgtcccacctacccttcaagaagacatttattgcatgcttgcactagctggcacaccaaggagaatgccgttcgataacagcatgtggattccctgcgtaaaccagaccttgaccttaacatgtccaatcctgtatactggcgggtggkgtggtttctgacaccagccaactggcaccaactgggcgtccaatgatccagttccactctgacaataactgcccagagctagcacacacgccacaggggctcaggtccacaaggctgcccccatttcagacacaagtcctgggcctcctggacttctaaagatcggctataaatcaggagttcccacaagcccctctcaggttctgtaatttgctagaagggctcacaaaactcagaaaaacactttaccatgttgatgggtttattgtaaaagatgcaaataaacagtaacatgaaggcagggtctggaggggtcctgagtgcaggagcctctgtgtcagtaccactggggtcagcaggtgcggctgaacatgctgctcctctcgtctctgcgtcctggtgactggccccatcccgaggctatccaggggtcctgccctaagtcacttcattagcataaactcagaagcacataagaagctcctccttaggaataacgaaaggctcgctggacactcaggaagctcctg

SEQ ID NO: 691263 - DNA, 593 bp, Homo sapiens
agttctactctaaagtgtaccccaaataattaaaaatagagactcaaagagatatttgcataccaacgttgatattagtattatttacaatagccaaaagctggaaacaatttaagtgtcaatcaacaaatgactgaataaacaaaacatgatacatatcatgcaatgggacatcactcagccataaaaatgaatgaagttctgatgcatgctataacatgtaggaaccttgaaaatattatgataagtgaaataagcctgacacaaaggacagatattgtatgaccctactgatatgaaatatctagaatagaaaattcacagaggcagaaagcagatccgaggcaccagggatgagagagaatagacagttactgcttaagagatacagagtttctgtctggagtgaataaaagcttttgaaaatagatagtggtgatggttaaaaaccattatgaataaaattaatgctattgagttatacctatatggttaagtggtgatttaaatataatgtatacattctgatgyaaacacagaaacatagaaacatccaataaatgactgtgggctttgaaaatataaccaggggt

SEQ ID NO: 691264 - DNA, 1497 bp, Homo sapiens
tttaattaactaaaagtgtgtaactggattttttgaaacaaagtatgaattattaaggtgatgaatgccttgcttatgctgtgattattacacattgcatgcctatatcaacatacctcacataacctataaacatcaacaactattatgtacctacagaaactgaagataaaaaaagtttaaaactgaagattatgagattatgatgaatgaaatgaataaaaagaagtcacatgatctcagatgtaactcagaaaaagtgaatattaaaaatgtgaaaggggactaacttcttaatgacagtgaaatgtaatgagaagctgtaatatgtataacttatttaatgggcatatagtattatatgccagacatgttaatgaagatgaacttaaattgtaaaagcaacattaaatattttctgcacagcaaagaaaacaacaaaaagaaaagacaagccacagaatgggagaaaatatttgcaaactatatatctgataagggactaatatctgaagtatataagtaactcttacaactaaatggcataaaaacaaagtctaattaaaaattagaaaatcatctgaatagaaatttattcaaagacagagaaatgaccagcaggtatatgaaaggatgctcgatatcattaatgaccactgaagggcaaatcaaaaccacaatgagattaycaccatctgttacgatgctattgtgaaaaactcaaaagttgttttttgttttgttttgttttttttgagacgcagtttttcattctttttgcccaggctggagtgcaatggtgcgatctcggctcactgcaacctccacctcccaggttcaagcgattctcctgcctcagatacagtatctggtattacaggcatatgctaccacgcctggctaatttttgtacttttagtagagatggggtttcaccacgtcggacaggctggtctcaatctcctgaccttaggtgatccacccacctcggcctcccaaaaagtgttgggattacaggcgtgagccactgcgcctggcaaggtgtgtattcttatattcattttatttatgaagaggctaaaacttgcagaagttaattaaattgccaagtccgtatggatcggaattggcaaagcaataattccagcagggtctgactgttccacatgggtatttttttacactttgcctcacagacatccatgtctaaaatttgaaaaaacaaaaagataactctagttttaattttaaaaaatgaatatgctcatatcaaactattattttaaaaagaaccataacttctacttacgggaagatggactatacatatattccttattcttttcaataattacaacttaaaaccctgagcactgtatataacacaaaaataagaaaattctgaaaagtaggaagaaaaagcatgtgttaaacacataaggagctgaaaatttcaccgcttctggcagtaatgaggtgccctttttttcccagatg

SEQ ID NO: 691265 - DNA, 694 bp, Homo sapiens
catttaccagagggataaagatacatgagtaatgaggcgaaagggcattacaagctgggtgtgtattttcccattactttaagaaatgagcctagccaaaattgcactctgaattccaagttaaaaatgaattaaatgagtatccttcacatttgtcacagcaccctcaacaaaaatcaaaaattctcaaggtatacatgtggctggtctttttctatgccatttcctaactatattacatacccgttttcacagtatcaagctgcacattatttttggttggtatgcaaacaccaacatctgtgtctatctcctctatgatgtcattttccttaataacaccagctcctgtcattatcaactgcctggtatttggtagacatgatgttagtgctgtacgtgtattctgccatttaatttttaacaaaaaccctatacaattgtcaccattctttatcaaggtaaatcacacctttcttctttttcatctttctcttcagagcctagcgcmgtgttcagtctcttctgcaatctcagtaagtatattgactcattgcatttcctggcacacatgaacaaaacaaggggttgaagtataattaatgtggccataagtggataagtagatcaaccatccagtccgccactttgctcagaagtggctcacacactcactcacccacaaacacacaca

SEQ ID NO: 691266 - DNA, 979 bp, Homo sapiens
aagtgattcctggaacactttaaatccacccatgatcttttgtcctgaggttctagtgtagcaatttagcataaatggygttttccaagccccgctgactaaaaaacagaattctgattttaaataaaaatccaaaaggaaaaagtacatgatttcattcagggcttcaaatacttgtgggagaagaatttaaaataggcatagaggaacaaagccatcttgatataagatgtttatattgaaatgacttttaaaaataaacagcatatgctgtgcatgtttttcatgatttttcagtaaaagtgaagaaaaataactatttataaatgaactattaacttttatatttaacaaaatgtagaaatcatttaacagaaaatattagaaaaaaaggtccatggaattataaaagtatataattctttaaggttttaataggagcattaaaaagatctagtagtcctcttattttacagcatgagtaaaaagtaaacccaaagaggtcaagagctttgcataaagtcatatggttaagagggttagcatatgtggtttttttacttttacatcttattttttaaaatcctgtaactgtcttccaaaataaacatcaatgaagttaatttttttattcttggaaaattattatttgaaaaatgctaccaaggcaagacatggatcgtaggaaaccttgggttgctgtttctgtgctatctgagctgggcagatgccatgtgagaaggcttcaggtttaatctccctccatcagaaagataatcaccatcatgaagatcatccgtggcatctttggagaataaaatacaaaagcagagtggcaggaaactcatgaggtttcaagaaggcctcaggggcacaattaagttagtgaccaggtaggagttgccccctcatcacaggatgcaagctctggctttaaggaccactgtcacacaaaattaactacagctacattgaactg

SEQ ID NO: 691267 - DNA, 632 bp, Homo sapiens
ctttctaattagtgatacatttataagacataaatagctatccacagagttaacaaaataaactttggtccacaatctggatgagttcatattattttgataagatttggtatataacatatttggatgaatgttgttctttattataccttgttaagtagttaaaatgacatttattcaaatggttctgaaactctcttccctggttgtttgaaaaatactccagggttggccaggtgcagtggctcaacctgtaatcccagcactttgggaggctgaggtgggttgatcacttgaggtcaggagttcaagaccagcctgcccaacatggcaaaaccttgtctctactaaaaattcaaaaaattagccgggcgcagtggtgcacgcctgcaatcccagctactcaggaggctgaggcaggagaatttctygaacctaggagccagaggttgcagtgagccaagatagcaccactgcactccagcctgggtgacagagtgagactctgtctcaaaaaaaaaaaaaaaaaaaaaaaagccaggtgcagcggctcagcctgtaattccagcactttggaaggctgaggcgggcaaatcacttgaggtcaggacttcgagaccagcctggccaac

SEQ ID NO: 691268 - DNA, 1631 bp, Homo sapiens
atgaactttgtgagataattatggtctaaacagtacacaaatggaaaaatggtgtcccctcaggtatattggctgtcataacaaaatgtcttccaaacttgagttttaaaatgattgtcttaatttataccttactctgtttaaattatcgcacactccacattttaaaagaatagatctgcttctgcttcaaaatcatgaaagaggaatatgagaaataacctacctgtcaagtgttaggtgtatcttttgttcttattgacattcatacactgtaatacattctgatactttctgaaggatgttgtatatgctactgtgttatccctaccttcaaaatgttgcagggcagagtgcaagacaatttccatgcataaggaactgattaatataattatttctcaggttggcataatatatttatacaaaataattttggatacagaatgaattaaaaattaaaatgcaaaacatgtaaacaaaatcattttttaaaaaatgatttctgtcattctccatctgcccaacaacttcacatggcccaggccacccactgttattagcttccttccaacatttttttcaggtatgtattctttttttttttttttgccttaataacatattatataaactcttctgctcctttatttttcacttaataatttttgtagtcaagtctcgttttctaatagctatatagaattgcagcttgtatatgtactataattatttagctagttctctttgatgaggtttggcagtttaatttacctctattcgattctgggccagcctttgttgtttgcttccctggaatagaatgaggtagaagtgactgtatgtgacttctgaggctacattagaagaatacagttttctcctctcatcttcctcttctcttttctctcctctccatatttctctctcccttgctgttgtgcttgcttttcatttggctttgaatctctaaaaatatatttaggaagaaaatttactggaaaattcgaggaaagaaagatttcctacatccaatatctggagtaagaagaatctatttttgagaaatttgcctcaatacttacaaggtgttatgcttgtaaatttttcttatgtgtaatttctttttttctcaaacatttcattacasttgctgaaatacctaactatagatttattacctgaattcattcaggaaaaaaggaaaatattaatattatatctaatttatttagatagaacttgaggagaattaaacaaagacatgaaacacaagataaattgatcaaacaaagggattgactagttcaaaaaatataaagcttaagagttgagaagtgtttgatgaataaatttgtgaatcaatacgcttgtcaaaagagactatggaaaagccaagttgcaattaacataatgtacaatgctagttttgaaacaaatgcacctgaagaacccacagaatttcttgaatatattctcgttattctaaaaatgataattaagtactccttccaattagtacctaacagaatataatgctatttggtaatgtatcttatccttaaaataaaaaaaggtatatttttctttgcaaatgttattaaacaagcaaaagattaagaaaggtgaaa

SEQ ID NO: 691269 - DNA, 1631 bp, Homo sapiens
atgaactttgtgagataattatggtctaaacagtacacaaatggaaaaatggtgtcccctcaggtatattggctgtcataacaaaatgtcttccaaacttgagttttaaaatgattgtcttaatttataccttactctgtttaaattatcgcacactccacattttaaaagaatagatctgcttctgcttcaaaatcatgaaagaggaatatgagaaataacctacctgtcaagtgttaggtgtatcttttgttcttattgacattcatacactgtaatacattctgatactttctgaaggatgttgtatatgctactgtgttatccctaccttcaaaatgttgcagggcagagtgcaagacaatttccatgcataaggaactgattaatataattatttctcaggttggcataatatatttatacaaaataattttggatacagaatgaattaaaaattaaaatgcaaaacatgtaaacaaaatcattttttaaaaaatgatttctgtcattctccatctgcccaacaacttcacatggcccaggccacccactgttattagcttccttccaacatttttttcaggtatgtattctttttttttttttttgccttaataacatattatataaactcttctgctcctttatttttcacttaataatttttgtagtcaagtctcgttttctaatagctatatagaattgcagcttgtatatgtactataattatttagctagttctctttgatgaggtttggcagtttaatttacctctattcgattctgggccagcctttgttgtttgcttccctggaatagaatgaggtagaagtgactgtatgtgacttctgaggctacattagaagaatacagttttctcctctcatcttcctcttctcttttctctcctctccatatttctctctcccttgctgttgtgcttgcttttcatttggctttgaatctctaaaaatatatttaggaagaaaatttactggaaaattcgaggaaagaaagatttcctacatccaatatctggagtaagaagaatctatttttgagaaatttgcctcaatacttacaaggtgttatgcttgtaaatttttcttatgtgtaatttctttttttctcaaacatttcattacagttgctgaaatacctaactatagatttattacctgaattcattcaggaaaaaaggaaaatattaatattatatctaatttatttagatagarcttgaggagaattaaacaaagacatgaaacacaagataaattgatcaaacaaagggattgactagttcaaaaaatataaagcttaagagttgagaagtgtttgatgaataaatttgtgaatcaatacgcttgtcaaaagagactatggaaaagccaagttgcaattaacataatgtacaatgctagttttgaaacaaatgcacctgaagaacccacagaatttcttgaatatattctcgttattctaaaaatgataattaagtactccttccaattagtacctaacagaatataatgctatttggtaatgtatcttatccttaaaataaaaaaaggtatatttttctttgcaaatgttattaaacaagcaaaagattaagaaaggtgaaa

SEQ ID NO: 691270 - DNA, 862 bp, Homo sapiens
cctatttcctgtcttgcagttggaagacagatagtgctttgttgttttaattacttagttcaatggtcttcagctaccgtgcattgagttacctgctggactccaaattcttttggatagaataaatctgctttgaatattcttcaaaaaggtggcattataaaacttgcagtgactttttcccatttgtgcagctgatttaaacttatttactttttttttttgagatggagtctcactctgttgcccaggctggagtacagtggtgtgatctcrgctcactgcaacctctgtctcccgggttcaagcaattctcctgcctcagcctcccaagcacttgagactacaggcacgcaccaccatgcctaactaatttttgtatttttttagtagagacagggtttcactatgttggccaggctggtcgcaaactcgtgacctcatgatccacccacctcggcctcccaaagtgctgggattacaggcgtgagccaccgtgcctgacccactattgtatgtttgtttataaatgctgtgaacagctaaggttttttaaaagttcatacatattaataatagcggggttgttttatcaccttagtaacaagtaaatctttattcaatggtacttcacatatttggctcatttttgatgtatggttttggcttataaatatagtgtgttgaataagcatgaaaggagtaacagtccatatttgctttaaatgacacacataataagcagatcatgaaaatagtggtaaaacttcaattccagtgtttatgggtctcttgtcacaaactacaatgtcatggttcttttaagccaaaggggaaaaaaatccaacctgaaaagcaatca

SEQ ID NO: 691271 - DNA, 607 bp, Homo sapiens
cccgaaattcacaaaggagaaaaataaagaaaaaaagtgaacaatttgttaagatgtgcttcattacaatgtgtgccatcactacctctgtctagtgtcaaaacactttcatcactctaaaataaaaacccatacatagtaaattgttatcccctgttcttttcttcccatcccccgaggaactaccaatctgctttctgcctctatggatttacctattctaaatatctcatataaacaggatctgaccttctgtgtctagtttctttcacttagcatgtttcaaggtttatccacattgtaaaatatatcattacttagttcctttttatgcctgaagagtgtcccattgtgcatatacatatatatatgtgtgtgtgtgtgtgtgtatgtgtgtgtatatatatgacattttgcttatctattcatatagtgatggatgtttgagttgtttctactttttagttggaatatgaatatttggaatatgaacatgcrcccacatgtatttcaatctgttttaaaatcttcggggtatatacctggcattagaagtttttaaagaatgtcagaggtttctccactagatgataaaatgtattgtaaa

SEQ ID NO: 691272 - DNA, 460 bp, Homo sapiens
taacgactggaagcgctgctaattccctgcgtatgcgcctctccctctgcagcccgggacaggcgcagccgccttttgcctgcccctacctcgcccgggacacactggcgccgcctggccaggcccgactgggaggaaggacagaggaccgacggacacttgtacatgtgcgggcgcacggaacccaggccccggccaccgctgcctttcccctgtgtgtctgagctgaagcggctacgcttataccgggaggtgaaacggaagctcagagagggccataatttggccactgtcacacagccaacctccaccttcacccggctacaccaacacactcgatgaccttctctgtcttcctcgccgtgcgctcccgatagcgggggaaatacttttctgagacgcctctctgggcacgcaagatgaggcraaagcgggagaagggagtgggataggaccggga

SEQ ID NO: 691273 - DNA, 2537 bp, Homo sapiens
gttgagggcccaggaatttctattccaggtagccaattttagctcacaaaattttgctattgggttcaaaaacctctgtttgagggtgaagggacaaaaatatctaactkctaataattgtccctagggtttagacaatggcctataatttacagaattattacacagacacatcacattgaagagactccaaatgtaagtgggcaactgttcctttcaggctcagactgcttcctggctggagagaattttccctggtctgcactgtcctctctggtgcaggatgccaaagagtggggagcccatgaacctgtgtggtaggtaaagtaggaactgttatccccattttacagactatataaagcaaaattatgtttataggtaatatataaaatatatatgcattgatatattttacatatactgtgtataacatataaaatataggagatggaggccaggtgcggtggctcacgcctgtaatgccattactttgggaggccaaggcgggtggatcacaaggtcaagagattgagaccatcctggctaacacggtgaaaccccatctatactaaaaatacaaaaaattagccgggcatggtggcgggtgcctgtagtcccagctactagagaggctgaggcaggagaatggcatgaacctgggaggcggagcttgcagtgagcggagatcgcgccactgcactccagcctgggcgacagagcgagactctgtctcaaaaatatatatatgtgtgtgtgtgtgtgtgtgtgtgtgtgtgtgtgtgtgtgtgtgtgtattatatgagatggacactcagagaggcttcaactgccaactccccacaaaatgccacctaaataacctgtggagccggcagagctcagctgattgctttcttcaagagaggccactgcctcagaacaggcagctcaagggtgccatatctatgtgatttgggggatatggtttaagatgagtcttcattgaggtgcagctgactggctgggattagatgaagttcttcactcccatcctcccagtatagagtgcagtggtgtgatcatggctcactgcagcctccaccttccagattcaagtgattctcccacctcagcctgggactttaggtgtgcaccaccatgcttggctaatttttgtattttttataaagatggtgtctcatcattttgcccaggctggtctcaaacgcctggactcaggcaatctattcgcctcagcctcccaaagtgctgggattacaggcatgagccaccacgcccggcctgaagttactgatataaactttgaggattgggagacacagagtggggaaagtttgaatgaaccttaagagtaaacggttgcttgataagcccaaatgaacaatgcattgtttgagaaagggtcttcttacccaaatgaagtctagttgagtgataagtaaaagtgcagataaatggattttcagaaagttaataaaacaaataataaagttatttataactttttcttactgggcaggaatttcttgcagagaatggggggataattttaatgtagacagtcttatacttaatcccattaaacgtggggctgcaggtggcttccttctcagcagtagggcacaaggtccctccatgagaagctgggtgcgctggaacttgacctcagtctcctggatccaggctcctgccccttccctcacaccacaatgccagtcttcaacagtggtgctgagctcaccctgctcaggctgctacaagacccctctgatagagttcaatcagactctgcactagatgccaactcatgaccatggtggctcctcaatgggtactggggtaaaaacacagggcagggtctcaggagagggcgctatggccttggagtgagcgagacccaagaataatgtacctgtctgaagagtgtccccccaaaattcaggtctaattggatcttatttggagatagggtctttgtagataaaattagttaggatgaggtcatactggattagggtgggccctaaatccaatgactaatgtcctcccaagaaggtcacataaagacacaggaaagaaggctctgtgacatcatgacagtggcagagattggctacaaaccaaggaacacccaacgatttgggggcaaccactagaagccaggaagaggcatggaaggattctcccctagagccttcagagggagcatgagacaccttgattcagacttctggcctccagaaccgcaagagaatacatgtctgtggttttaagcccccagctggtggcactttgttatagtaaccatgggaaacaaatgcggatgctgcctgagcagatctgccaagtgcagcacacacctgggcttgtttcccctgagcgggagcccacagcaccctgggtaggatgggcagcctccctaggactgcggaggggcaggggcaacctcacacagacagggtggggtgtccggatcacagccttttctggcagtctgtccactctgccaacattcaagaaaggactctttaaaa

SEQ ID NO: 691274 - DNA, 2537 bp, Homo sapiens
gttgagggcccaggaatttctattccaggtagccaattttagctcacaaaattttgctattgggttcaaaaacctctgtttgagggtgaagggacaaaaatatctaacttctaataattgtccctagggtttagacaatggcctataatttacagaattattacacagacacatcacattgaagagactccaaatgtaagtgggcaactgttcctttcaggctcagactgcttcctggctggagagaattttccctggtctgcactgtcctctctggtgcaggatgccaaagagtggggagcccatgaacctgtgtggtaggtaaagtaggaactgttatccccattttacagactatataaagcaaaattatgtttataggtaatatataaaatatatatgcattgatatattttacatatactgtgtataacatataaaatataggagatggaggccaggtgcrgtggctcacgcctgtaatgccattactttgggaggccaaggcgggtggatcacaaggtcaagagattgagaccatcctggctaacacggtgaaaccccatctatactaaaaatacaaaaaattagccgggcatggtggcgggtgcctgtagtcccagctactagagaggctgaggcaggagaatggcatgaacctgggaggcggagcttgcagtgagcggagatcgcgccactgcactccagcctgggcgacagagcgagactctgtctcaaaaatatatatatgtgtgtgtgtgtgtgtgtgtgtgtgtgtgtgtgtgtgtgtgtgtgtattatatgagatggacactcagagaggcttcaactgccaactccccacaaaatgccacctaaataacctgtggagccggcagagctcagctgattgctttcttcaagagaggccactgcctcagaacaggcagctcaagggtgccatatctatgtgatttgggggatatggtttaagatgagtcttcattgaggtgcagctgactggctgggattagatgaagttcttcactcccatcctcccagtatagagtgcagtggtgtgatcatggctcactgcagcctccaccttccagattcaagtgattctcccacctcagcctgggactttaggtgtgcaccaccatgcttggctaatttttgtattttttataaagatggtgtctcatcattttgcccaggctggtctcaaacgcctggactcaggcaatctattcgcctcagcctcccaaagtgctgggattacaggcatgagccaccacgcccggcctgaagttactgatataaactttgaggattgggagacacagagtggggaaagtttgaatgaaccttaagagtaaacggttgcttgataagcccaaatgaacaatgcattgtttgagaaagggtcttcttacccaaatgaagtctagttgagtgataagtaaaagtgcagataaatggattttcagaaagttaataaaacaaataataaagttatttataactttttcttactgggcaggaatttcttgcagagaatggggggataattttaatgtagacagtcttatacttaatcccattaaacgtggggctgcaggtggcttccttctcagcagtagggcacaaggtccctccatgagaagctgggtgcgctggaacttgacctcagtctcctggatccaggctcctgccccttccctcacaccacaatgccagtcttcaacagtggtgctgagctcaccctgctcaggctgctacaagacccctctgatagagttcaatcagactctgcactagatgccaactcatgaccatggtggctcctcaatgggtactggggtaaaaacacagggcagggtctcaggagagggcgctatggccttggagtgagcgagacccaagaataatgtacctgtctgaagagtgtccccccaaaattcaggtctaattggatcttatttggagatagggtctttgtagataaaattagttaggatgaggtcatactggattagggtgggccctaaatccaatgactaatgtcctcccaagaaggtcacataaagacacaggaaagaaggctctgtgacatcatgacagtggcagagattggctacaaaccaaggaacacccaacgatttgggggcaaccactagaagccaggaagaggcatggaaggattctcccctagagccttcagagggagcatgagacaccttgattcagacttctggcctccagaaccgcaagagaatacatgtctgtggttttaagcccccagctggtggcactttgttatagtaaccatgggaaacaaatgcggatgctgcctgagcagatctgccaagtgcagcacacacctgggcttgtttcccctgagcgggagcccacagcaccctgggtaggatgggcagcctccctaggactgcggaggggcaggggcaacctcacacagacagggtggggtgtccggatcacagccttttctggcagtctgtccactctgccaacattcaagaaaggactctttaaaa

SEQ ID NO: 691275 - DNA, 653 bp, Homo sapiens
cattaccattcctcctcttccctcagatcctccttgccttgcctccctgcctcgcccttcacacagggtgcctgtcccttctagatcacacccaccatcagcatgcttttgtctcttggccagcatatcactcctctggcccttggctactctccattgttttccccgcctctctcccctcaagctctgcttttcttttctttctttyttttttaaactatcaaagaccttttctgaatatactgtcagcttcaggttccagaaggctagtaaaatatatattttagggtactgatttttttcaaggtctattagcttctttcttgacaaagcatgcttaactaagcaacatcacataggtcttataaagtatctagctctcaaaatcaatcttgctccattccatcaagaatgggcctgaatttggactgagtccaggggtagcccacaaggctaccgtttgttactgtcacaacattccaaagccacaaggaggtacagtggaagaggtgccagtgtgtagcaattctttgagtatgcttcctgaagccaaggccatgctgcaaacttagctttaccaagtgggtaaattagcaccatcaccagctgctactaaattcatgtagacagctaaagacagactcataaattag

SEQ ID NO: 691276 - DNA, 1079 bp, Homo sapiens
gggatatgcatcaatggtratggtaatgtcaatgaaatctcttagttttctttcatggattgctaaatctgaagtagcatgaactgctggcaattggtaatcaggatagctcctaattttctaaatttcttatttagtctttttcaatttggtaatatagtaggtcaaaaataaaactgtgccctaattctttcataaaggtaggcaagtgatcaagaaactccttttctgcactatagtaaagaggtaaataaattccttattccagaagatcttcaggctgccgcacctccctctcattaaaaatttttccagacacttattacaactttttttttttttggagacagggtttcactcagtcacccaggctggagtgccgtggcatgaccatggctcactgcagccttgacttcctgggctcaggtgattctcccacttcagcctcctcagtagctgggcccacaggggtgcaccaccaagcctggctaatttttgtattttttatagagatggggtttcaccatgttgctcaggctggtcttgaacttctggcttcaagcaatcctcccatcttggcttcccaaagtgctgggattacaggggtgagccacagcacctggccacttattacaaagattttaatagaatgtcctctgttcttagtgacagttttaggttttcatacctattcctctccaaagtaactataatgtcttggcttttcctgagaatttctaagagtatatggtagaaatacaagccagcaattatattttcttagctgaacatgggaaaaattgtaagaagggaatgttgtgctggaattgctaggtcagatcagtaatggtaaaaagattttatgacttggagctaaatatagagtattttcttccactttcaacttttctcctaccagtggataaaatacagtacattgggaaatgtatgacaccgggatcaggtaggcttgggttcaaaatattggttctgccactcagcagctctgagtcagagtatgtccatttcctcacctataaaatggagaaaattatgctacctactaatgaagattttta

SEQ ID NO: 691277 - DNA, 1079 bp, Homo sapiens
gggatatgcatcaatggtaatggtaatgtcaatgaaatctcttagttttctttcatggattgctaaatctgaagtagcatgaactgctggcaattggtaatcaggatagctcctaattttctaaatttcttatttagtctttttcaatttggtaatatagtaggtcaaaaataaaactgtgccctaattctttcataaaggtaggcaagtgatcaagaaactccttttctgcactatagtaaagaggtaaataaattccttattccagaagatcttcaggctgccgcacctccctctcattaaaaatttttccagacacttattacaactttttttttttttggagacrgggtttcactcagtcacccaggctggagtgccgtggcatgaccatggctcactgcagccttgacttcctgggctcaggtgattctcccacttcagcctcctcagtagctgggcccacaggggtgcaccaccaagcctggctaatttttgtattttttatagagatggggtttcaccatgttgctcaggctggtcttgaacttctggcttcaagcaatcctcccatcttggcttcccaaagtgctgggattacaggggtgagccacagcacctggccacttattacaaagattttaatagaatgtcctctgttcttagtgacagttttaggttttcatacctattcctctccaaagtaactataatgtcttggcttttcctgagaatttctaagagtatatggtagaaatacaagccagcaattatattttcttagctgaacatgggaaaaattgtaagaagggaatgttgtgctggaattgctaggtcagatcagtaatggtaaaaagattttatgacttggagctaaatatagagtattttcttccactttcaacttttctcctaccagtggataaaatacagtacattgggaaatgtatgacaccgggatcaggtaggcttgggttcaaaatattggttctgccactcagcagctctgagtcagagtatgtccatttcctcacctataaaatggagaaaattatgctacctactaatgaagattttta

SEQ ID NO: 691278 - DNA, 943 bp, Homo sapiens
ctgaccaactccctgcctaattcctgttttccccacacatggctaaatttcttcctgttatgtaaacccctagtattagttggtcagggagatggacttgagactgatctcccatcttcttggctgcagcacccgattaaacacttcttccctggcaatactgacggtctcagtgagtggctttctgcgtggtgagcagtaggacctagaccaagcccctggcatttcagtaacagtttctgggtatttcaaggggatttgatgatgggtttcatgtgggggtgagagcaaggaaggagttccaagtttttgttctgagaagtgcagtggtgttgacaatccacagagatggaaccagagaggcttggagggctaccaagagctgagatgaacactcttggcttgctaacatcggctatcacaggatggaagaggaggagtgatagccctgctccatccagagcaagaggccactgcagggccacagagttcacactcatcattaaaatcaaaagaaaatgagcagagcacactgcactcctgggcaatctctgtctatggagcaggcatcctcctgtctctcatcttcttccctcacttcccctgccctgaaactctgagattagagatctttcttcaggttagctacactctacatggacgcttgctttctgtgatcacagagggatccctctaggattctttccttatagtaattcttagtggtgtctacaggtcactgctttctctccagtctgaygctgaggcattttggaatgtttcttcctcttacaccaaaataaatgaaggcaacttgtggatgatattgagtgaagatcacggaatgattcattatttaactgcaaatgctgaaaacacagctgtactcactgggcctaagaaagtgacttccttcctctcattgaatatagatgtttactca

SEQ ID NO: 691279 - DNA, 943 bp, Homo sapiens
ctgaccaactccctgcctaattcctgttttccccacacatggctaaatttcttcctgttatgtaaacccctagtattagttggtcagggagatggacttgagactgatctcccatcttcttggctgcagcacccgattaaacacttcttccctggcaatactgacggtctcagtgagtggctttctgcgtggtgagcagtaggacctagaccaagcccctggcatttcagtaacagtttctgggtatttcaaggggatttgatgatgggtttcatgtgggggtgagagcaaggaaggagttccaagtttttgttctgagaagtgcagtggtgttgacaatccacagagatggaaccagagaggcttggagggctaccaagagctgagatgaacactcttggcttgctaacatcggctatcacaggatggaagaggaggagtgatagccctgctccatccagagcaagaggccactgcagggccacagagttcacactcatcattaaaatcaaaagaaaatgagcagagcacactgcactcctgggcaatctctgtctatggagcaggcatcctcctgtctctcatcttcttccctcacttcccctgccctgaaactctgagattagagatctttcttcaggttagctacactctacatggacgcttgctttctgtgatcacagagggatccctctaggattctttccttatagtaattcttagtggtgtctacaggtcactgctttctctccagtctgatgctgaggcmttttggaatgtttcttcctcttacaccaaaataaatgaaggcaacttgtggatgatattgagtgaagatcacggaatgattcattatttaactgcaaatgctgaaaacacagctgtactcactgggcctaagaaagtgacttccttcctctcattgaatatagatgtttactca

SEQ ID NO: 691280 - DNA, 628 bp, Homo sapiens
ggcaggcctgggactgctgtttacagaagggccagcttgcaaggtgggtcactggctagtgtctggaactcagcttctgaaatgtcccctacactggatggaaacatcccctgactgataaaggcaggcctagcttgtgcacaccacacagctcacactgaacacctgctttccttccaggagtctggagcttcggtgggcacggtgcccgcgcaagcagcccccaggaaaagctctggacccaagtctcagtgggtttcccagagcagaagccgtgcgtttcttgtcgcacggagtggggctctgtgtggcccttcacgggagggagagagacagcatggagacacgtgcattctgttttcccctgggaagaacggaaaccgtcttgttttcctccactcttcaggtgtcacagctcaaatgtggtttcttggcagccgccttccaggaccatctagaagagcccaagtcactgtccacctcatcacctggtcttcatgcagcgtctggatcagaggctccccacrtatcgtctgcccgccagcgggagctccgcacggtgccctgtctgtctctcagcgttgcaacctaggcagggcatgcagcctgggtgtcgtgagtgcctgga

SEQ ID NO: 691281 - DNA, 619 bp, Homo sapiens
gtgcttcgctcacagccacggccagaacgcatctctccagccccttctcccatggcccgtgagacagttctgttcgtcggatgcggtagagcgacagctgcttttattttagagtcctggcagggaaggacggtttaacttcacactcacaaggtttctagattcagagagctcaatctagaagcagttagaggcagggactggtggacccaccagaggctgtgagcagaatcagtgattacggagcccagggagcagaaggcaggtgagaagcttctggacagaggggtagattcaatcagcctccccacagtcatgtccacccagaactggggcgcggggcctaatttggaaatagtgtgtttggagatgtaactaggtgaaggtgcggtcgcacatcagggagggccctcgttcagtgacaggctttggaaagaaaggagaggggagtttggatagagacacagaygctcagggaggaagccacgtgtggatggaggcagagatcagagccatggagcgcccaggagcctggcaagatggggaagagcctgccctggagctttcggagggtacatggccctgtccacacctcgactgaagacttccggcctccagg

SEQ ID NO: 691282 - DNA, 619 bp, Homo sapiens
gtgcttcgctcacagccacggccagaacgcatctctccagccccttctcccatggcccgtgagacagttctgttcgtcggatgcggtagagcgacagctgcttttattttagagtcctggcagggaaggacggtttaacttcacactcacaaggtttctagattcagagagctcaatctagaagcagttagaggcagggactggtggacccaccagaggctgtgagcagaatcagtgattacggagcccagggagcagaaggcaggtgagaagcttctggacagaggggtagattcaatcagcctccccacagtcatgtccacccagaactggggcgcggggcctaatttggaaatagtgtgtttggagatgtaactaggtgaaggtgcggtcgcacatcagggagggccctcgttcagtgacaggctttggaaagaaaggagaggggagtttggatagagacacagacgctcagggaggaagccacgtgtggakggaggcagagatcagagccatggagcgcccaggagcctggcaagatggggaagagcctgccctggagctttcggagggtacatggccctgtccacacctcgactgaagacttccggcctccagg

SEQ ID NO: 691283 - DNA, 619 bp, Homo sapiens
gtgcttcgctcacagccacggccagaacgcatctctccagccccttctcccatggcccgtgagacagttctgttcgtcggatgcggtagagcgacagctgcttttattttagagtcctggcagggaaggacggtttaacttcacactcacaaggtttctagattcagagagctcaatctagaagcagttagaggcagggactggtggacccaccagaggctgtgagcagaatcagtgattacggagcccagggagcagaaggcaggtgagaagcttctggacagaggggtagattcaatcagcctccccacagtcatgtccacccagaactggggcgcggggcctaatttggaaatagtgtgtttggagatgtaactaggtgaaggtgcggtcgcacatcagggagggccctcgttcagtgacaggctttggaaagaaaggagaggggagtttggatagagacacagacgctcagggaggaagccacgtgtggatggaggcagagatcagagccayggagcgcccaggagcctggcaagatggggaagagcctgccctggagctttcggagggtacatggccctgtccacacctcgactgaagacttccggcctccagg

SEQ ID NO: 691284 - DNA, 1377 bp, Homo sapiens
agtaagatttattaatataaagtaaaaatagcaaatagcagaatagtgtgaatagaatgctacttttgtgtaaaaaatggggggaagctgaatatatgtatttgtagaaagaaacactggtgcatatgtaggacctaaggaaagtgttacattcaagggcagctgtggaggaggggagaaggtggatagagacggggtgggagctaggctttcatcatgtacttgtatatcatttttatttttaattatatgaattaatacattacctagtcagatttttctcaarcaaaaaaaggaatgaatagagcagcccgttgcaaattctaaaacactatgcagctataaggagttaataatgagaaaatgataatactcttaataataataataattaccattgagggtaataatactctcaatactctcatttgtgaaatatttactatttatcaggtgcaatgctaaatattttatgtctgttatcttctttgatccttacacaacctatggatagaatgattttcagtactatagatggggaatctggcaatcggagtagttaaccaaattgtttaaggtcatatttctagaaaggtgcagagctgctttttgaacctagatcctccactgccaagacgtggctgttgactctctgccatacattcccttgtgctagatggcttacgtggggagctttctttatttcctgcgctgccagtgctttccctagcatgacacacccattttccaagaagcttagctcttctgtggtcttcttctctgtgccattcttggaaaaagctgaacaccttgacaccgccagtctgccgcaggccatgtggtcattctgtcttcaggaggtattttcggtcataattttcctacgatatccggacgagtgccacgattaggcacaatgcttccttgcggtcgctcgcagcctccctgaaatatccgtccagggccatgctggctccaccgccttggatggagcccagaagaaggtttttatgggacacatctttaaactggtgaacgatttaggaataacttggctatgaaggcaatatgcgtacagatgcacggcaaagccttttcctgtgttcagatgaccgcagagccaggcacttaaacttgcaaatagggctgggtaattacatggtcccagaggaggcctaacagtcaaaagaaaatttggtcataaaaataattacattgcaggatatttataaaagtagggtccagaagtagaggcacagcctccatcctcctttgactttagtgaagggaccgcaagttgagaagcagaagtgctggcacctgggggattgaaattccaggctacctgacctaggggacaggcctgctgctgacggg

SEQ ID NO: 691285 - DNA, 659 bp, Homo sapiens
  misc_feature 514, 546, 575, 600: n = A,T,C or G
tccctgacttcctctgctgtcctcaccaaggagaatactttgatttaaggactcctgtaattacattggcccacctgggaaatctaggctaatctctgtatcttaaactcaattgattcttaaccttaattacctctgcaatgtcattttgccatgtaatataacatattcacaggtgtaacaccagggagcaaaggtcagagagccaaaattctgtctaccgttsatactcaacagcaataaacattcagctgtaggaaacctgaagtctccagagagataatttagataaaatacagccttaagtataggacagacctgcttagaatcaggagtctaaatttttttggttacacaaatatagccaattctctttaccattataaatctcagctttatttttttaatctgaaaaatgcaaatattgctgcatctctatcatgttgcttttaacattaatataagaaacatacatataatcagcaaaaaagatttttaaaaccttacatatcanagattacaaaagagaattaggagaaagaacanagtctaaagatgttgagagagtaccctanagttatctatttatttattcacttngtcaaaatatttaggactaggccagccacagtggctcacgcctgtaattccagcacttt

SEQ ID NO: 691286 - DNA, 1182 bp, Homo sapiens
  misc_feature 84: n = A,T,C or G
ctatttgatgcaaagccacaagttgagagctggctaagaagtccgtgatgacttcatagctcataaattctcagaaggcagcanctatagcagatcagagtacaagcatgaagcaataggccggtgggtgaagagacagctgctctttcagaatgtaataggattttcaggccccttttctagaatcattgccttctatgtgggaaaaaaaaggaaaaagaaggatgcactgataaaaaattgtccagtgccagccttaaggagtccggagtccatttactttctggaatactgaacagacagggatagttaaatttgcatcaaaggcagcatataaccggaaggttccataggtgagtgagaggattcagccttgcagaggctgtgactgcccaggaaactgctgtatctttctgtgaagtacagttagtgcttattttgggtgaaaactggtgtttacagtgagagagaatattcctgattctattacagttgtaatattgctaagtgtagaagcaagtaagaatttgacagatagacatgaacatagaaagctgagagacaggattttgaaatcatagggcaatataacttgttttactttctaccatacacctaaactacagtgagattttcctgaaagcttttatcctagagaagtcaatcttctattttaacttcaaataaagagctgtaacagatttaccaactgggatttcaactttaacrttgttgacattttagtcaagataactcttcactatagggattctcctgtgcatactagtagcaggctctcccctcattgttagaaatgttccctgcaggacaaaactgccttgatgagaaaccctgcattatgcaaatggaatttggcaatggctggaggcatttttggttgtcacagctggaggttggaggtatgccacaaatatctagtgaatagaagagattctgctaactgaacaaagaattatccagttaaacatgtaaatattgctgagatccagaaaccctactttagcataataaaagtaaaatcctcttcattgaaagtagatctttgtgagcaagcacctttctaaaaaaatatataaaacaaacaagcatactttgtgaggtttagcagagtaaaatactaaaaaatcaaaattggattctaatattatcaccacatcaaaa

SEQ ID NO: 691287 - DNA, 1182 bp, Homo sapiens
  misc_feature 84: n = A,T,C or G
ctatttgatgcaaagccacaagttgagagctggctaagaagtccgtgatgacttcatagctcataaattctcagaaggcagcanctatagcagatcagagtacaagcatgaagcaataggccggtgggtgaagagacagctgctctttcagaatgtaataggattttcaggccccttttctagaatcattgccttctatgtgggaaaaaaaaggaaaaagaaggatgcactgataaaaaattgtccagtgccagccttaaggagtccggagtccatttactttctggaatactgaacagacagggatagttaaatttgcatcaaaggcagcatataaccggaaggttccataggtgagtgagaggattcagccttgcagaggctgtgactgcccaggaaactgctgtatctttctgtgaagtacagttagtgcttattttgggtgaaaactggtgtttacagtgagagagaatattcctgattctattacagttgtaatattgctaagtgtagaagcaagtaagaatttgacagatagacatgaacatagaaagctgagagacaggattttgaaatcatagggcaatataacttgttttactttctaccatacacctaaactacagtgagattttcctgaaagcttttatcctagagaagtcaatcttctattttaacttcaaataaagagctgtaacagatttaccaactgggatttcaactttaacgttgttgacattttagtcaagataactcttcactatagggattctcctgtgcatactagtagcaggctctcccctcattgttagaaatgttccctgcaggacaaaactgccttgatgagaaaccctgcattatgcaaatggaatttggcaatggctggaggcatttttggttgtcacagctggaggttggaggtatgccacaaatatctagtgaatagaagagattctgctaactgaacaaagaattatccagttaaacrtgtaaatattgctgagatccagaaaccctactttagcataataaaagtaaaatcctcttcattgaaagtagatctttgtgagcaagcacctttctaaaaaaatatataaaacaaacaagcatactttgtgaggtttagcagagtaaaatactaaaaaatcaaaattggattctaatattatcaccacatcaaaa

SEQ ID NO: 691288 - DNA, 1532 bp, Homo sapiens
  misc_feature 663, 676, 677, 678, 679, 680, 681, 682, 683, 684, 685, 686,687, 688, 689, 690, 691, 692, 693, 694, 695, 696, 697, 698,699, 700, 701, 702, 703, 704, 705, 706, 707, 708, 709, 710,711, 712, 713, 714, 715, 716, 717, 718, 719, 720, 721: n = A,T,C or G
  misc_feature 722, 723, 724, 725, 726, 727, 728, 729, 730, 731, 732, 733,734, 735, 736, 737, 738, 739, 740, 741, 742, 743, 744, 745,746, 747, 748, 749, 750, 751, 752, 753, 754, 755, 756, 757,758, 759, 760, 761, 762, 763, 764, 765, 766, 767, 768: n = A,T,C or G
  misc_feature 769, 770, 771, 772, 773, 774, 775: n = A,T,C or G
tttacttctctaacataacatttctaatgtcttgcaaccttttctcagatgaaattcataagttaaacagatttttaaacttaaatgcttttggaaactggttaaaaccccatatgacctctaggtaaaaaattccatactagtaaatcaattgccaaaatttctaagacttatgttttactggctcgatacatattstgcttttcatgtttaactgaagccacaaatcaacactgtatcaacactgtagaaaaaataaattaaaagtaatgtgggtttgttttttaattcatcacttaatgacaataatttgtctctatatggtacttttccctaaattatgttggaagaattgttaatacattcttctacattcctatctatgtatcttttagaaagatgacaaatgtcattataccaataatacaccagatgaatagaatgttcaaagaagaagttacaatttagaggagtcatttctaaattggtggtatactagttaaaaatccaagtaaatgcctacagggcaaattttgcagatcaatggaatgaaaataaatagctccaacagaaagaagctacaggtaaaccatagatgttgctgtcaacactgacattgtactgtgtccccttaaatgtaaaagccaacaacttcacagcgtnctgtaaaacggannnnnnnnnnnnnnnnnnnnnnnnnnnnnnnnnnnnnnnnnnnnnnnnnnnnnnnnnnnnnnnnnnnnnnnnnnnnnnnnnnnnnnnnnnnnnnnnnnnnctctcagagttcgggttacagtttccttacatatctgttatgtcactttttatgatttccagttttctgccaaaatggtttaaataaacttttatctccttgaacatagcagacctatttattttatggtatctgctgatgattccattatttgcagttcctgtgggtgtgtctgtttgctgtttctgtttattctcatccatagcatttttttatctttttttttttttttctttgagacggagtttcgctctgtcgcccaggctggagtgcagtggcacgatctcaagtgattctcctgcctcagctttctgagtagctggaattataggggccccccaccacgcccggctaatttttgtatttttagtagagatggggtttcgccatgttagtcaggctggtctcaaactcctgacctcgtgatccgcccgcctcagcctcccaaagtgctgggattacaggcgtgagccacggcacctggcctcatccatagcattttatcttcacgtgtacttggttatccttgactctgtgttagacattgtgcttggaaaacataatttaaggcctatactgtgcccttgtcttctaaaagtaggttctttattcgttttgccaggagactgggagcactaccaacacaggattaccttaattcaagttcaggccttgttgttttctccagcactcagatttttgaagcacattttcatctatgcgaggactggtttgtttcttgttattcttacttcaa

SEQ ID NO: 691289 - DNA, 1532 bp, Homo sapiens
  misc_feature 663, 676, 677, 678, 679, 680, 681, 682, 683, 684, 685, 686,687, 688, 689, 690, 691, 692, 693, 694, 695, 696, 697, 698,699, 700, 701, 702, 703, 704, 705, 706, 707, 708, 709, 710,711, 712, 713, 714, 715, 716, 717, 718, 719, 720, 721: n = A,T,C or G
  misc_feature 722, 723, 724, 725, 726, 727, 728, 729, 730, 731, 732, 733,734, 735, 736, 737, 738, 739, 740, 741, 742, 743, 744, 745,746, 747, 748, 749, 750, 751, 752, 753, 754, 755, 756, 757,758, 759, 760, 761, 762, 763, 764, 765, 766, 767, 768: n = A,T,C or G
  misc_feature 769, 770, 771, 772, 773, 774, 775: n = A,T,C or G
tttacttctctaacataacatttctaatgtcttgcaaccttttctcagatgaaattcataagttaaacagatttttaaacttaaatgcttttggaaactggttaaaaccccatatgacctctaggtaaaaaattccatactagtaaatcaattgccaaaatttctaagacttatgttttactggctcgatacatattgtgcttttcatgtttaactgaagccacaaatcaacactgtatcaacactgtagaaaaaataaattaaaagtaatgtgggtttgttttttaattcatsacttaatgacaataatttgtctctatatggtacttttccctaaattatgttggaagaattgttaatacattcttctacattcctatctatgtatcttttagaaagatgacaaatgtcattataccaataatacaccagatgaatagaatgttcaaagaagaagttacaatttagaggagtcatttctaaattggtggtatactagttaaaaatccaagtaaatgcctacagggcaaattttgcagatcaatggaatgaaaataaatagctccaacagaaagaagctacaggtaaaccatagatgttgctgtcaacactgacattgtactgtgtccccttaaatgtaaaagccaacaacttcacagcgtnctgtaaaacggannnnnnnnnnnnnnnnnnnnnnnnnnnnnnnnnnnnnnnnnnnnnnnnnnnnnnnnnnnnnnnnnnnnnnnnnnnnnnnnnnnnnnnnnnnnnnnnnnnnctctcagagttcgggttacagtttccttacatatctgttatgtcactttttatgatttccagttttctgccaaaatggtttaaataaacttttatctccttgaacatagcagacctatttattttatggtatctgctgatgattccattatttgcagttcctgtgggtgtgtctgtttgctgtttctgtttattctcatccatagcatttttttatctttttttttttttttctttgagacggagtttcgctctgtcgcccaggctggagtgcagtggcacgatctcaagtgattctcctgcctcagctttctgagtagctggaattataggggccccccaccacgcccggctaatttttgtatttttagtagagatggggtttcgccatgttagtcaggctggtctcaaactcctgacctcgtgatccgcccgcctcagcctcccaaagtgctgggattacaggcgtgagccacggcacctggcctcatccatagcattttatcttcacgtgtacttggttatccttgactctgtgttagacattgtgcttggaaaacataatttaaggcctatactgtgcccttgtcttctaaaagtaggttctttattcgttttgccaggagactgggagcactaccaacacaggattaccttaattcaagttcaggccttgttgttttctccagcactcagatttttgaagcacattttcatctatgcgaggactggtttgtttcttgttattcttacttcaa

SEQ ID NO: 691290 - DNA, 1029 bp, Homo sapiens
gctcatagttctgaaggctgggaagtccaagatcaaggtgctggcctctgacgaggaccttcttgctgtgtgaccacatggcagaaggtgggaggacaaagacagggcaagacagaaacacaaaagggaccaaatatgccctgtcataaggacattaattccacccatgagggcagagccctcacagcctaatcacctctcaaaggcctcccctcttaatactgttacaattaaatttcaacatgcattttgggggagacaaacattcaaaccatagcactggcttaaataataaaggagatttattgggtcctataagtgaaaagtccagactggacacattgacactatggtttctctgtgtgtctctcagctctgtccttctcctggtgctggcttcatcctgaggcttgagctgtggtggcttcaggattcataggttctcacaacaaccccrgtaagagagactcttgagaaggaggagcagtttccccgaagcatccaccaaacctacccttgtatctcatgggcccgaattgggacatatatctgttgtgctctctgaagacactcccagtaaatgggacttctaaattttgatatataaaacaaaagaagaaaatatgacctctacttctaatactgttggaggctataacctagttatacagtggaaattgaggtccatagagattaagttatatgcctaaattatattgcagagtggaatttaaactcaggttgttgactgcaaagtctctaatttttctttttcccagtttacctctttttaaaatatgagcatatctgtaatgtttttgtaagaatgaccatgttcaaacccatgttgtttaaaggtaaagaaaaaaaggatgaccatgtctatcaaaaaattcaatgtagaaaagttcagagaagtaagtaaaagtaaactgagatctcctatccgatgataaaccacaaatacattggtaaacatccttccaaatgtaacactgcataaaatcacatgtaagtgtacaacttaat

SEQ ID NO: 691291 - DNA, 1029 bp, Homo sapiens
gctcatagttctgaaggctgggaagtccaagatcaaggtgctggcctctgacgaggaccttcttgctgtgtgaccacatggcagaaggtgggaggacaaagacagggcaagacagaaacacaaaagggaccaaatatgccctgtcataaggacattaattccacccatgagggcagagccctcacagcctaatcacctctcaaaggcctcccctcttaatactgttacaattaaatttcaacatgcattttgggggagacaaacattcaaaccatagcactggcttaaataataaaggagatttattgggtcctataagtgaaaagtccagactggacacattgacactatggtttctctgtgtgtctctcagctctgtccttctcctggtgctggcttcatcctgaggcttgagctgtggtggcttcaggattcataggttctcacaacaaccccggtaagagagactcttgagaaggaggagcagtttccccgaagcatccaccaaacctacccttgtatctcatgggcccgaattgggacatatatctgttgtgctctctgaagacactcccagtaaatgggacttctaaattttgatatataaaacaaaagaagaaaatatgacctctacttctaatactgttggaggctataacctagttatacagtggaaattgaggtccatagagattaagttatatgcctaaattatattgcagagtggaatttaaactcaggttgttgactgcaaagtctctaatttttctttttcccagtttacctctttttaaaatatgagmatatctgtaatgtttttgtaagaatgaccatgttcaaacccatgttgtttaaaggtaaagaaaaaaaggatgaccatgtctatcaaaaaattcaatgtagaaaagttcagagaagtaagtaaaagtaaactgagatctcctatccgatgataaaccacaaatacattggtaaacatccttccaaatgtaacactgcataaaatcacatgtaagtgtacaacttaat

SEQ ID NO: 691292 - DNA, 2205 bp, Homo sapiens
  misc_feature 537, 538, 539, 540, 541, 542, 543, 544, 545, 546, 547, 548,549, 550, 551, 552, 553, 554, 555, 556, 557, 558, 559, 560,561, 562, 563, 564, 565, 566, 567, 568, 569, 570, 571, 572,573, 574, 575, 576, 577, 578, 579, 580, 581, 582, 583: n = A,T,C or G
  misc_feature 584, 585, 586, 587, 588, 589, 590, 591, 592, 593, 594, 595,596, 597, 598, 599, 600, 601, 602, 603, 604, 605, 606, 607,608, 609, 610, 611, 612, 613, 614, 615, 616, 617, 618, 619,620, 621, 622, 623, 624, 625, 626, 627, 628, 629, 630: n = A,T,C or G
  misc_feature 631, 632, 633, 634, 635, 636: n = A,T,C or G
atttctctgataatgaatgagacttagttcttcctgtgagttgcctgttaagactttgccatttatctgttgcaatctttatttcttgctgttttgtaggagttcttttttatattttggatatgatcccattaatacttacatgtattacaatgttttctcccactctgtgatttgtctttttacttttaaatggttgtttttgatgaacaagaacttctttttttaatggggtctgagtaacaagcttttcctcattggtagttcttcttgtgtcctgatgaggaaatttttccctacactggggctatgaaggtagtttctcatattatcttctagaatctcaatgaacacaattttaagcaatttttacttgctgtgtttttcaattctagaattcccatttttttcccccaaatctggtgtgtctttttgtatagtttctggattttgctgacattgttttttttttccttttatctgcatatacacaggaagcacagaatttttaaaacttttaaattataaacaaggatnnnnnnnnnnnnnnnnnnnnnnnnnnnnnnnnnnnnnnnnnnnnnnnnnnnnnnnnnnnnnnnnnnnnnnnnnnnnnnnnnnnnnnnnnnnnnnnnnnnntcacatatgttcaggagggataggattttcatgtagttttaattgatttaaaaaaaaattcacaaccttttgatatctggaaagaggtaaatcaaatatgatccacaaaagttaatgttgtgtcttttgttatttttaagagaagagataagaagaaaaagggaacattggtttctgtggctactaaaaacaatagtaagatagttctcacagagatcaaaaactgtaaaaggaagagtttttttcaatatgtttagatattccccagattcttgttttattctgagaataaggaatatatcctaaagaaaaatattctgtcctttctgaactggcatcattttctctagtaaagacataaaatctgacatctttgtatccaggtttgctcaagtccatgcataaaatatccttttcagaaaaatctcattgaaaccctataagatactgttttcaaattacttcttacaactaatcttttacctaatgtgtatcacaaatatgttagattagctgtatattcagggatgatccatttcaaacaaataaactatatatttttctgatctatacttttaattattccaaagctaactgataaaacatataatatcctatcttcccctaaatatgaagagcaattagggtgttttcatttacttatcacacaataagtaaatttttggtaagtaacatatactctcatttctctttgctcttgaaacaagtgaacatttctacttcatccttacttttgaggtcatagatggacatttcaaatgtttgaattatgcagttttgaaaaaaacaaaaataataaacagaagacatgtcactagtgtgaatcttattgcagaagattaaggatctaggaattagcatattagcattttacatacatctaaagttaggtaattgaatagccattaaattaaccatttcctgccacattatgtataaaaagaaaaatgtaaattgaaagaaatatcactggttaaaaagtttttatctatgttaagagattcagttgaccaaatcagagcaatttgtttcagatgtatattsttaaagatcagctaagtcagaataaaccagtttactttaattcttttggtcctaaccggtaggtaaaaaatccttgagagtttcatttcttttccttttttttttagtcagtctcactgtctcccaggctggagtgcagtggtgtgatcatagctcactgcagccttgacctcccagctgcaagtgatcctcttacctcagcctcccgagtagatgggactgtaagtgcgctccacgatgtctggttaattttttaaattttttttgtagagttggggtctccctatgtcacccagactgatcttgaactcttgggctgaactgattctcccttcttggcctcacaaaatgttgggattacaggagtaagtcactgtgcctggctgtttcatttttctaaggagtgtttgaaactgttagcttgacagtctctgaaactctaatagcatcctttgttacatcagtcttttactggtcatttcagatttttaaaaatatgtaatt

SEQ ID NO: 691293 - DNA, 2205 bp, Homo sapiens
  misc_feature 537, 538, 539, 540, 541, 542, 543, 544, 545, 546, 547, 548,549, 550, 551, 552, 553, 554, 555, 556, 557, 558, 559, 560,561, 562, 563, 564, 565, 566, 567, 568, 569, 570, 571, 572,573, 574, 575, 576, 577, 578, 579, 580, 581, 582, 583: n = A,T,C or G
  misc_feature 584, 585, 586, 587, 588, 589, 590, 591, 592, 593, 594, 595,596, 597, 598, 599, 600, 601, 602, 603, 604, 605, 606, 607,608, 609, 610, 611, 612, 613, 614, 615, 616, 617, 618, 619,620, 621, 622, 623, 624, 625, 626, 627, 628, 629, 630: n = A,T,C or G
  misc_feature 631, 632, 633, 634, 635, 636: n = A,T,C or G
atttctctgataatgaatgagacttagttcttcctgtgagttgcctgttaagactttgccatttatctgttgcaatctttatttcttgctgttttgtaggagttcttttttatattttggatatgatcccattaatacttacatgtattacaatgttttctcccactctgtgatttgtctttttacttttaaatggttgtttttgatgaacaagaacttctttttttaatggggtctgagtaacaagcttttcctcattggtagttcttcttgtgtcctgatgaggaaatttttccctacactggggctatgaaggtagtttctcatattatcttctagaatctcaatgaacacaattttaagcaatttttacttgctgtgtttttcaattctagaattcccatttttttcccccaaatctggtgtgtctttttgtatagtttctggattttgctgacattgttttttttttccttttatctgcatatacacaggaagcacagaatttttaaaacttttaaattataaacaaggatnnnnnnnnnnnnnnnnnnnnnnnnnnnnnnnnnnnnnnnnnnnnnnnnnnnnnnnnnnnnnnnnnnnnnnnnnnnnnnnnnnnnnnnnnnnnnnnnnnnntcacatatgttcaggagggataggattttcatgtagttttaattgatttaaaaaaaaattcacaaccttttgatatctggaaagaggtaaatcaaatatgatccacaaaagttaatgttgtgtcttttgttatttttaagagaagagataagaagaaaaagggaacattggtttctgtggctactaaaaacaatagtaagatagttctcacagagatcaaaaactgtaaaaggaagagtttttttcaatatgtttagatattccccagattcttgttttattctgagaataaggaatatatcctaaagaaaaatattctgtcctttctgaactggcatcattttctctagtaaagacataaaatctgacatctttgtatccaggtttgctcaagtccatgcataaaatatccttttcagaaaaatctcattgaaaccctataagatactgttttcaaattacttcttacaactaatcttttacctaatgtgtatcacaaatatgttagattagctgtatattcagggatgatccatttcaaacaaataaactatatatttttctgatctatacttttaattattccaaagctaactgataaaacatataatatcctatcttcccctaaatatgaagagcaattagggtgttttcatttacttatcacacaataagtaaatttttggtaagtaacatatactctcatttctctttgctcttgaaacaagtgaacatttctacttcatccttacttttgaggtcatagatggacatttcaaatgtttgaattatgcagttttgaaaaaaacaaaaataataaacagaagacatgtcactagtgtgaatcttattgcagaagattaaggatctaggaattagcatattagcattttacatacatctaaagttaggtaattgaatagccattaaattaaccatttcctgccacattatgtataaaaagaaaaatgtaaattgaaagaaatatcactggttaaaaagtttttatctatgttaagagattcagttgaccaaatcagagcaatttgtttcagatgtatattgttaaagatcagcyaagtcagaataaaccagtttactttaattcttttggtcctaaccggtaggtaaaaaatccttgagagtttcatttcttttccttttttttttagtcagtctcactgtctcccaggctggagtgcagtggtgtgatcatagctcactgcagccttgacctcccagctgcaagtgatcctcttacctcagcctcccgagtagatgggactgtaagtgcgctccacgatgtctggttaattttttaaattttttttgtagagttggggtctccctatgtcacccagactgatcttgaactcttgggctgaactgattctcccttcttggcctcacaaaatgttgggattacaggagtaagtcactgtgcctggctgtttcatttttctaaggagtgtttgaaactgttagcttgacagtctctgaaactctaatagcatcctttgttacatcagtcttttactggtcatttcagatttttaaaaatatgtaatt

SEQ ID NO: 691294 - DNA, 2205 bp, Homo sapiens
  misc_feature 537, 538, 539, 540, 541, 542, 543, 544, 545, 546, 547, 548,549, 550, 551, 552, 553, 554, 555, 556, 557, 558, 559, 560,561, 562, 563, 564, 565, 566, 567, 568, 569, 570, 571, 572,573, 574, 575, 576, 577, 578, 579, 580, 581, 582, 583: n = A,T,C or G
  misc_feature 584, 585, 586, 587, 588, 589, 590, 591, 592, 593, 594, 595,596, 597, 598, 599, 600, 601, 602, 603, 604, 605, 606, 607,608, 609, 610, 611, 612, 613, 614, 615, 616, 617, 618, 619,620, 621, 622, 623, 624, 625, 626, 627, 628, 629, 630: n = A,T,C or G
  misc_feature 631, 632, 633, 634, 635, 636: n = A,T,C or G
atttctctgataatgaatgagacttagttcttcctgtgagttgcctgttaagactttgccatttatctgttgcaatctttatttcttgctgttttgtaggagttcttttttatattttggatatgatcccattaatacttacatgtattacaatgttttctcccactctgtgatttgtctttttacttttaaatggttgtttttgatgaacaagaacttctttttttaatggggtctgagtaacaagcttttcctcattggtagttcttcttgtgtcctgatgaggaaatttttccctacactggggctatgaaggtagtttctcatattatcttctagaatctcaatgaacacaattttaagcaatttttacttgctgtgtttttcaattctagaattcccatttttttcccccaaatctggtgtgtctttttgtatagtttctggattttgctgacattgttttttttttccttttatctgcatatacacaggaagcacagaatttttaaaacttttaaattataaacaaggatnnnnnnnnnnnnnnnnnnnnnnnnnnnnnnnnnnnnnnnnnnnnnnnnnnnnnnnnnnnnnnnnnnnnnnnnnnnnnnnnnnnnnnnnnnnnnnnnnnnntcacatatgttcaggagggataggattttcatgtagttttaattgatttaaaaaaaaattcacaaccttttgatatctggaaagaggtaaatcaaatatgatccacaaaagttaatgttgtgtcttttgttatttttaagagaagagataagaagaaaaagggaacattggtttctgtggctactaaaaacaatagtaagatagttctcacagagatcaaaaactgtaaaaggaagagtttttttcaatatgtttagatattccccagattcttgttttattctgagaataaggaatatatcctaaagaaaaatattctgtcctttctgaactggcatcattttctctagtaaagacataaaatctgacatctttgtatccaggtttgctcaagtccatgcataaaatatccttttcagaaaaatctcattgaaaccctataagatactgttttcaaattacttcttacaactaatcttttacctaatgtgtatcacaaatatgttagattagctgtatattcagggatgatccatttcaaacaaataaactatatatttttctgatctatacttttaattattccaaagctaactgataaaacatataatatcctatcttcccctaaatatgaagagcaattagggtgttttcatttacttatcacacaataagtaaatttttggtaagtaacatatactctcatttctctttgctcttgaaacaagtgaacatttctacttcatccttacttttgaggtcatagatggacatttcaaatgtttgaattatgcagttttgaaaaaaacaaaaataataaacagaagacatgtcactagtgtgaatcttattgcagaagattaaggatctaggaattagcatattagcattttacatacatctaaagttaggtaattgaatagccattaaattaaccatttcctgccacattatgtataaaaagaaaaatgtaaattgaaagaaatatcactggttaaaaagtttttatctatgttaagagattcagttgaccaaatcagagcaatttgtttcagatgtatattgttaaagatcagctaagtcagaataaaccagtttactttaattcttttggtcctaaccggtaggtaaaaaatccttgagagtttcatttcttttccttttttttttagtcagtctcactgtctcccaggctggagtgcagtggtgtgatcatagctcactgcagccttgacctcccagctgcaagtgatcctcttacctcagcctcccgagtagatgggactgtaagtgcgctccacgatgtctggttaattttttaaattttttttgtagagttggggtctccctatgtcacccagactgatcttgaactcttgggctgaactgattctcccttcttggcctcacaaaatgttgggattacaggagtaagtcactgtgcctggctgtttcatttttytaaggagtgtttgaaactgttagcttgacagtctctgaaactctaatagcatcctttgttacatcagtcttttactggtcatttcagatttttaaaaatatgtaatt

SEQ ID NO: 691295 - DNA, 2205 bp, Homo sapiens
  misc_feature 537, 538, 539, 540, 541, 542, 543, 544, 545, 546, 547, 548,549, 550, 551, 552, 553, 554, 555, 556, 557, 558, 559, 560,561, 562, 563, 564, 565, 566, 567, 568, 569, 570, 571, 572,573, 574, 575, 576, 577, 578, 579, 580, 581, 582, 583: n = A,T,C or G
  misc_feature 584, 585, 586, 587, 588, 589, 590, 591, 592, 593, 594, 595,596, 597, 598, 599, 600, 601, 602, 603, 604, 605, 606, 607,608, 609, 610, 611, 612, 613, 614, 615, 616, 617, 618, 619,620, 621, 622, 623, 624, 625, 626, 627, 628, 629, 630: n = A,T,C or G
  misc_feature 631, 632, 633, 634, 635, 636: n = A,T,C or G
atttctctgataatgaatgagacttagttcttcctgtgagttgcctgttaagactttgccatttatctgttgcaatctttatttcttgctgttttgtaggagttcttttttatattttggatatgatcccattaatacttacatgtattacaatgttttctcccactctgtgatttgtctttttacttttaaatggttgtttttgatgaacaagaacttctttttttaatggggtctgagtaacaagcttttcctcattggtagttcttcttgtgtcctgatgaggaaatttttccctacactggggctatgaaggtagtttctcatattatcttctagaatctcaatgaacacaattttaagcaatttttacttgctgtgtttttcaattctagaattcccatttttttcccccaaatctggtgtgtctttttgtatagtttctggattttgctgacattgttttttttttccttttatctgcatatacacaggaagcacagaatttttaaaacttttaaattataaacaaggatnnnnnnnnnnnnnnnnnnnnnnnnnnnnnnnnnnnnnnnnnnnnnnnnnnnnnnnnnnnnnnnnnnnnnnnnnnnnnnnnnnnnnnnnnnnnnnnnnnnntcacatatgttcaggagggataggattttcatgtagttttaattgatttaaaaaaaaattcacaaccttttgatatctggaaagaggtaaatcaaatatgatccacaaaagttaatgttgtgtcttttgttatttttaagagaagagataagaagaaaaagggaacattggtttctgtggctactaaaaacaatagtaagatagttctcacagagatcaaaaactgtaaaaggaagagtttttttcaatatgtttagatattccccagattcttgttttattctgagaataaggaatatatcctaaagaaaaatattctgtcctttctgaactggcatcattttctctagtaaagacataaaatctgacatctttgtatccaggtttgctcaagtccatgcataaaatatccttttcagaaaaatctcattgaaaccctataagatactgttttcaaattacttcttacaactaatcttttacctaatgtgtatcacaaatatgttagattagctgtatattcagggatgatccatttcaaacaaataaactatatatttttctgatctatacttttaattattccaaagctaactgataaaacatataatatcctatcttcccctaaatatgaagagcaattagggtgttttcatttacttatcacacaataagtaaatttttggtaagtaacatatactctcatttctctttgctcttgaaacaagtgaacatttctacttcatccttacttttgaggtcatagatggacatttcaaatgtttgaattatgcagttttgaaaaaaacaaaaataataaacagaagacatgtcactagtgtgaatcttattgcagaagattaaggatctaggaattagcatattagcattttacatacatctaaagttaggtaattgaatagccattaaattaaccatttcctgccacattatgtataaaaagaaaaatgtaaattgaaagaaatatcactggttaaaaagtttttatctatgttaagagattcagttgaccaaatcagagcaatttgtttcagatgtatattgttaaagatcagctaagtcagaataaaccagtttactttaattcttttggtcctaaccggtaggtaaaaaatccttgagagtttcatttcttttccttttttttttagtcagtctcactgtctcccaggctggagtgcagtggtgtgatcatagctcactgcagccttgacctcccagctgcaagtgatcctcttacctcagcctcccgagtagatgggactgtaagtgcgctccacgatgtctggttaattttttaaattttttttgtagagttggggtctccctatgtcacccagactgatcttgaactcttgggctgaactgattctcccttcttggcctcacaaaatgttgggattacaggagtaagtcactgtgcctggctgtttcatttttctaaggagtgtttgaaacygttagcttgacagtctctgaaactctaatagcatcctttgttacatcagtcttttactggtcatttcagatttttaaaaatatgtaatt

SEQ ID NO: 691296 - DNA, 601 bp, Homo sapiens
tccataagcaaccagtgtattgccacaactgtgataagacagtggctctttgttgatacttcccttgtaattgaaaggcatggccttttcaaagaacrtgatgtttgcttatagaagacaagatatctgttttacttaattataaaatatgaagccatgttctggtccatcagtcttctaaaatggcttactgttcctggagggtgagaccatccctagcatgagaaggtcactactgtatttctatgccaccatgcttgttccacctgtcatacataatcaccacacttcctaacttggagaagcagaaaatcatgggtgaaataatgcctacattttggtgttccaacataaagtgtatatgctttaggtttaattgtagtttttaaatgagtatattgacatctgccatatcttacctgttagtttgctgtttggtagtgtgcttttggactattagtttgctttttgtgcactagaacatgaatatcttagatccactggaactgtacctaatattgttagaaaaacgaactagggaagaaatgagaggaggcagagaagaaaagaagaaaggaaggaaaccgcttgacattttgta

SEQ ID NO: 691297 - DNA, 1608 bp, Homo sapiens
cacaatactaacccaccaccaccactccctgcagtgcttggtagcgctaaacgagctggcctgagatttcacatagggcaaaaggggaaatcgagagcatcttaagggaaagtccagtgaacgtaaaataaaagttccttcagggcccccagacacatggcaatacttcaaggtgtggccaagaaaggagagggtgtatttggatagaccaccagaataacagcacttgtgagtatgttgatacgtgatggaaatgttgctaaatgtcactcagtaatatagcccttgcctccatccacaaaaataataaatatcagcatctctcgatgctgaacgcagagccaccaagatctccaaattcctactataactgccaaggacactgagtgtgcgtccaagtacttcagtgaatccatcttgaataatctgtcctctgacgtccaagccaaaaagaaaacctgttcccagacctagcaggggttttagaaactaggtaactactcaccaaggagacattgagtacatttgcctgcctgtgaaataattgtgatagaaaggaatcaattatggacccatctgcagttcattaatatgatctgttgaaaaggaggccaaattcaccaagtcaacccgaaagtctaaaaataggactaatgcgagcctggctcagcaataaaaagatccctgcatctgctggtgtaggagcccctgggcccttcctcactctttactacttatcctcagtggtaattgggaatgaaggcatttattttctttccagaaaaagagaaaaacactccgtgaagattattgtggccaaaaataccatcctgtgctggtgaaggagaaaaaaatcagagattgctctctcatagcacaaatcctgggtgttttaaagatttctaaagggtctcctgttaaatggttcaaagggatacatcttccttgaaggtagtagggtggcaattcccaaagtatgatatgggcaaggattttaagaggcacatagatgaataaatttttagtaatagctgtatttatggtaatgtgtattatgcattaagaaaatcgtagctagcgtagccaacctgtgactccaagttgcttagaattaggatatatctaaaatatgttataagtttataagtggaattgtgcaagagtataagtactaaataaaagtgatgaaagtggcatgcaaagatgcaaaatgaaatcagaagatagcacatgaattgctaaaagttgggagatactactcttagggatgaagccagatgggttcccatggcttgggccagtgatgtggtacacaaaatcatttccacagccccagtagacttactgacagtctgggacctcagcaatgttgcaagatctacctggtttcttaccacattaagaagtcttaacccaaatggggtggtccaatggtagtgggttatcagaacttattaagattagtgtcactaaagttggtgttcaacccccaactcagccactgctacatttgactgggaagaagaagaagaagaagaagaagaagaagaagaagaagaagaagaagaagragaaggaggaggaggaggaggaggaggaggaggagga

SEQ ID NO: 691298 - DNA, 613 bp, Homo sapiens
tattatgtaaatgcaagtgagcatctcactccaacatatgtttcatggactaaatattcctggggcattgacataagcttttaaatattgctccattgtttgctatcattcaaaaaggcttttgttataaaagcaatagaggtcactgcaaaaattacgaaggcacagacagctatataaactggagcttaaaatctgcctgtctaccctygggtcctcctacccagtgagccctacttggataagtaattttcatgaacagttttgataaatctttccagaaatactctatgtttacatacaagcatatgtaaatgcttttattttgcacaaaagcaaatcatgctaaaatgttattctgcaactcctttttttctttttccctatttccatgtttggtctaactcatactgtttaatagccacacagtatcccatcgtgggaatgagctacagtttattaaactagaggtgagagcttttgtggtgagtagaaaggcatcagattcttctttcttccatgtgagcagatggctcactctccaaagttactttcccaccaggtaccccgaaaatcgcaggcccatatgggtgcatccagagtccgtgtgctt

SEQ ID NO: 691299 - DNA, 625 bp, Homo sapiens
aggatctgtttcctggcctcttccagcttctggcggccgccagcatgccttggctgtggctatatcactccagtcttcaagagctgcatcttcaagtctctctctattctatcttcacatcagccaccctgttgtgtgcctgcatgttacatctccctctgcttgtctcttataaggacattcataattgcacatagaactcacctgaataatccagaatactctccccatctcaagatacttaatcacatctgaaaagaccctttttccaaataagttagcatttacagcctccaggactagggcctgctatctttgaggactgagtgggagagggcagggaattattcaacctactacagaggaaaccatcgacaaacatcagctgtcattgctcttgttactattaatagagacaaracaaaaggactacacatccagaaaagggcttatggattgacaagcaagtgaggacctaaaaaacccttgagggatgtgagcactttatcctgagaaccaacaggcaggccatgtgtattacaggtcaaccacagcgggtatcccctaaacctcacgtaaattacccgtgtccacattgtgggctcggggtggcaatgagaagagc

SEQ ID NO: 691300 - DNA, 1046 bp, Homo sapiens
tttggcgcagggggaaagcactgatggttaaatctacatagctacagaatgatcaggattctctttaataaatgctgttgttatcattcagacataaatttaatcatgaagttgtacattttgtcttggtcaactaatcacaaagagtcatatttttaattcggattgataattacgttagcattaacacacttaattagagaaactttaaaggttagcccgtgtaacaatcatactattcttgcacctctttttctcacacctcaaattgaggaaatatgtgtttttctttcccctttaaatacaggaaaaaatgactctcttgagagcagagggacagttttaaaaaagaaaaatgttccttgccatagctatgcctgaagttcagcagaaattctgctaaaggacacgccaatgttactgacaaaatatttgtaaaaggcaggctgaggtagatgtgtagaaaattaaacacaaggcagacagtggtgaaaggtgaaataagagggcaaaactcaacatacggaacataagaaaaactggcaaagcttcgtggaagaggtgatgtttcagctgggccttaaaacaggtgtgattttaatgggctatgacaaaaggwtgtatgtttaagtaagggtacaaatgagcaaagacacagggcaggcaacagctgggcatgctaggagacagagcacagggagcagaaggaagctcccggaaggtcacagtgaggcctgaatttcagaccaagcaggaatttaacacatttatccttgtgataatccagggatagatcagagtgggaaactagaatctgagaaaagagtgagggtttacctttaatagtccgtgcatgaaagaaaggcctaactgtaaacaaagggatggtgacgaagggacataaaggaagacatcctttgtctagtatgggttgtcctttccgtgatgaaaacaaagaggcagagtgagaagaacagggctaacattttctgtctgatcggctggaaaggtcaattgggaacaggtgacaggaggaagacagacta

SEQ ID NO: 691301 - DNA, 1046 bp, Homo sapiens
tttggcgcagggggaaagcactgatggttaaatctacatagctacagaatgatcaggattctctttaataaatgctgttgttatcattcagacataaatttaatcatgaagttgtacattttgtcttggtcaactaatcacaaagagtcatatttttaattcggattgataattacgttagcattaacacacttaattagagaaactttaaaggttagcccgtgtaacaatcatactattcttgcacctctttttctcacacctcaaattgaggaaatatgtgtttttctttcccctttaaatacaggaaaaaatgactctcttgagagcagagggacagttttaaaaaagaaaaatgttccttgccatagctatgcctgaagttcagcagaaattctgctaaaggacacgccaatgttactgacaaaatatttgtaaaaggcaggctgaggtagatgtgtagaaaattaaacacaaggcagacagtggtgaaaggtgaaataagagggcaaaactcaacatacggaacataagaaaaactggcaaagcttcgtggaagaggtgatgtttcagctgggccttaaaacaggtgtgattttaatgggctatgacaaaaggatgtatgtttaagtaagggtacaaatgagcaaagacacagggcaggcaacagctgggcatgctaggagacagagcacagggagcagaaggaagctcccggaaggtcacagtgaggcctgaatttcagaccaagcaggaatttaacacatttatccttgtgataatccagggatagatcrgagtgggaaactagaatctgagaaaagagtgagggtttacctttaatagtccgtgcatgaaagaaaggcctaactgtaaacaaagggatggtgacgaagggacataaaggaagacatcctttgtctagtatgggttgtcctttccgtgatgaaaacaaagaggcagagtgagaagaacagggctaacattttctgtctgatcggctggaaaggtcaattgggaacaggtgacaggaggaagacagacta

SEQ ID NO: 691302 - DNA, 1375 bp, Homo sapiens
caatactttaagccaacccacatatatgacacataatagagcctgtttttataaatgaatgcatccgttagaaattttaagtagcatcaatagtttctatacgtccttacagagtctgataactgtttttccttatttgagagtaattagttcacaaggaagtttggttcttcagacggttagacacacttcattctaaattaaaaactggataaataaactagcattagaaattataccatccttgaggtcgcggttagtgtgcaattgctcttgatgttcatttctttgtccttgacttatggtgctttctttgaattttcttagaaagtcaagaaatattatttggacaaactaatgtatttcctatttccatgattggtgggcttttaaaaaacgtctcagctgaaatcagtatgtattaatgctaacaatatataatacagttttctccattctgggccaggtgccagcgcctgcagttttttaaagttctataaaaggtgcctcacagctgaaggcttaactaccatttttctctatagtgtcattattaaaattaattgatattggcagtgatggcctttcagttctttgtgtaggaaaaaataaattattctgtcacaaatgtccaaagtatttctctgtgtcttatatcatagaaaaatgatataataatgtatttctttataactaccagagaaatcttaattgaagtgaaaatcagtcatgaatcttaacacataaatgtaatattctttcaaacaaaaggtatatatgatagatagaagtatgttcctactactttgcactggtcaaatctctctcttcatctactctataataatatccaatgaggggctcatattaaaatgatcatctcattcaccagacagcttaacacattttaagtattgttttcctaatgattactattgttattattttacatatttttatatcaggtatattttatcaaaattacatgtagctcaaaaaatctatgagtgctaagtcagtagatttgtcatttgacttaatttatgtaagtataacttgtttacatctactgcatttttcaaggtataatatcaacaaaataattcagggaacacacatcrtaagtgttgaatttaggctgaatttagctaaggacagaaaaaagatactaatcatggaatttaatttagaattgatgagctttattgttcttgtgagttaagaattgtttagaatagttttaactcttttttatatctaataattttcaaagaaattataagaaaaaaatcctccgggcacggtggcacacgcctgtaaccccagaactttggggggctgaggtgggcagatcaagagatcaagactgtcttgg

SEQ ID NO: 691303 - DNA, 580 bp, Homo sapiens
ttggatgtggtaccaaaaaagaaaaaaatcatgcctggtccaacgaaagtgtgtaaacggaaagaagggaaagctaggtgaattcaccatatgagaaaagaaaacatgctcagtcaagactaaacaaatagaacagagatgccccacagcaacagaaaattacaaggcaaagtgagaaataaagcaacaagtatgagagagagagttgggagagtgattttaagtttctttatgcagagagtacacttactgttcatagatggaaaaaatgatactaaatgaattgtggataaatacaggcacttgtatcttggaggtgccttgctgaatattttgctgagtttttctcagtatttactttcttctattttcctaagttgtagaaaagagttttatatatttagagttcttgcccgagaagaatgcataatatgactgagaagacaactttttaatacagaaacacagaaatatgcaagagagaagatgatcaatttmtaaattatgtagctcttactgtaaatacagtttgagtttagagaaaaacgacttatatacaagaacttaagagaggctgtga

SEQ ID NO: 691304 - DNA, 1382 bp, Homo sapiens
taataaatttaaaaaaaagagtttacctatataacctgcacatgtaaccctgaacctaaaataaaagctaaataaaaaattttttwaaaaaatactttttaatgaagaaggaactcttaaagagaaaggaacaattggagactctggttatgagaagttacgatgaatacaataaagaaaaaaatatgtattttggattatcacttgaaagtcatcgataatcatggagtagaacctttactgaaatcaagttaagaaatcaggaacatattacagagattcagagacagctaattattctgttctgaaatgagaaatatgagaatgtttaaaggcattaagtgataacattatagaagtgtacaagcatatggttataaaagccatcattttgagcacagttttggcgataagagtgataaagacaaatttattcaataaaactttctaaagcatggtaaggaagactgttcagtaccattacaatgggtatgtggaccatggcaaagagattttgcagtgggagagtgagattgggttcaactccaaatacagcgtgagcaagtgtgagtttatagccgaggatcagtgcagggctctgtggatggaaaattacaaagaaaaatcatcatgggtaagggtgattctggttgaaacaacctgacatgattattgatgaatacaagcgaggtgaacagacttcacctgggaaggggaaaggatgatgaacccgatcaaaaatagaggatgataggaaatcaaggttgggggaaagggttcttgctcaactgacttaacagtgttgtatgatgaaactgaatttaattaagaagtatatagttgggcctaggaaaacgttcagaagcctgactaaagtttggtcagccaaaaatctttatatttcccccttcttatttgagaacaaaagagacactcttcattcctataagtaatagaagtccaattttcttgtttggctgccttttgtttcttaaggacttgctgaatcatatgttaggacttagtagtagaggatatttgatggacggtgctagcagtcatgtgtttaatgaagggaatttttataaaatgcaaaaaacaaaaaacaaagattaatcattagaaatacagtttctgaatccacggggctgccagttgagatttctagatgtggggttcaacgcatctgtagaaggtaaagtgagaacggcagtagcccagtggccatttgtaaattttcttgtgggcagtttaaatgtctctgtgtctccagcaatgacattgaatcttgcagtgaattttctgagtagcccttgcaacatcaggcaacaatattatctatacattatctgtagttgtaatttatctgaagcttatatgac

SEQ ID NO: 691305 - DNA, 2749 bp, Homo sapiens
atgcggtcttgctttgtcacccagagctggagtgcagtgatgtgatcatagttcactgaagcctggaacttgtgggctcaagtgatccctctgcctcagcctcccaagtaactgggattataggcacaagccattgcaccaaatgacaattttaaattacatacacaggttatattttatttctattggatgacactgctctgcagaaccagtgcccttccttttacaatgttaaatttgtccctctccttcattataaacgaaaacctagtatcatttcctagctaggagaaataacagtacaccgtaagatacagattcttgttccacttctgctattactcagtaaagacctcttgggtaaatcagatagcctctcttggcctcagtttactcatgtctaaagtcttcatttctaaggtcccttgggacaatgacattatcagattcaaaacagaataaggctctatgttctacagtagtgtataggcacattcgttcttaggtcagggattcctaacctagagctcacagaaactgtacgcaagtatacatccacttttaagttaacacttttcacatttctcaaagaccgtatctttaaaataaaagattaagagctaccttagctggtaataaaactggtatamttaaaaaaaaatcagagattgttattttatcattgtacttgtttggcatggctaagatgtgttactggtcactaagggtgaggtttcacttccctaacctgttcttgaaggccttcaacagatcccacttcttgttccactctagtagccacacttctaaaaatgatctgtgcaacatatataatatgcaagctgtagaatgctggctgttaaaaatggggtccattttcaaatacaacatttttctaaaccatgcacaaaagaacagccctacagggacactcttccatactgtatacatgccgttgccactacatgtgaatactggcagacgttagtggctaaagataaacattagataaaacataggtcttcactgagcagacctgaaatagcagagcaatgaagtacattacaaatcagcatcccagtacattttaaaaaacaaaccaacaagggtgtcatgccaccagtcaaaaggtactttgcttaaactggcattctttaacattcatgttgtagtggtaagtacttcatttcatacagccacagttattaatactttcctaagggctaccagctgctaaaaactgctgttatctcatactgagaatgctagttctatacctttgctctcaggctgtgaggaaggggtgctagtccaaaaggccatgggattagatttaaaaaggctaaaattaaatcctagaaaataaagaatatttcattttttaacattttaggaaacaaaatgaatatgcttttaaaacataaaaagccagaatccctcaatttataccaccaatctgactgtcttacatattcatttatccctgtagtttcattctttgctcatttaatacatgagcaagactgacatacaacacataaaatgagaacatctcaatatcatggttttttttgtttttttgtttttttttttttttttggagacaaagtctcactcagtcaggctggagtgcagtggcatgatttcagctcactgctacctccatctcctgtgctcaagcgatccacctgcctcaacctcctgagtagctgctaattataggcacgcaccaccacgcccggctcatttttgtattttcagtagaaacagggtttcaccacattggccaggctggtctcgaactcctgagctcaagtgatctgcccacctcaacctcccaaagtgctggcattctaggagtgagccaccgtgcccagcctcaatatcatgttttctgagtgacaaaagaaacagaacaaatgaaaatgaacactttaaaaaaagactcacgttaatgcgcatgattcaagcatgagtccgtacactgtaccaagttcttttgctctgccctagcatgatagaagtatcttccagttactgaaatgtctttaactaagttctcttgctctttgaaacctcaccgtgaacttattaagggagaaaaaaaattgctcaaatattttgggggtgttcacaaagcatcgtttatatcccaacattagtatcccacaaagagtctgcatcaagctaaacattaaaagaaagaaaaattgtgcttaactttaacaacaaagtacctacccttttctggtgttttaaatgtgtagttgattgaagattcttccattggaaaggaagcagagagatttttgactttgctatctgaagactgttcgatatcagagttctttgacagttcacattttttaggttccactttgctttcagatccactctgggctactgaactagtttcactatcgttacttttcaaaggtgcattaaaactaaatccaaacaaagacccagtggcagaactgttgccaaatgcaaatgggtttgatttttcactactaaaaattcttttaacagactctgaaccaaatacaaactttggaggagaaaccactgcttttgttgttgtttcagatgtgctagacacttcaacttctgaagctgcatctgctacatcatcaccctgaataacatctgtcctctctcttgtggtttcttctaatacagctacagcaattttgccacatggtgactctctgggagtgcttgaccgagaaacatgaggtgttatcaa

SEQ ID NO: 691306 - DNA, 2749 bp, Homo sapiens
atgcggtcttgctttgtcacccagagctggagtgcagtgatgtgatcatagttcactgaagcctggaacttgtgggctcaagtgatccctctgcctcagcctcccaagtaactgggattataggcacaagccattgcaccaaatgacaattttaaattacatacacaggttatattttatttctattggatgacactgctctgcagaaccagtgcccttccttttacaatgttaaatttgtccctctccttcattataaacgaaaacctagtatcatttcctagctaggagaaataacagtacaccgtaagatacagattcttgttccacttctgctattactcagtaaagacctcttgggtaaatcagatagcctctcttggcctcagtttactcatgtctaaagtcttcatttctaaggtcccttgggacaatgacattatcagattcaaaacagaataaggctctatgttctacagtagtgtataggcacattcgttcttaggtcagggattcctaacctagagctcacagaaactgtacgcaagtatacatccacttttaagttaacacttttcacatttctcaaagaccgtatctttaaaataaaagattaagagctaccttagctggtaataaaactggtatacttaaaaaaaaatcagagattkttattttatcattgtacttgtttggcatggctaagatgtgttactggtcactaagggtgaggtttcacttccctaacctgttcttgaaggccttcaacagatcccacttcttgttccactctagtagccacacttctaaaaatgatctgtgcaacatatataatatgcaagctgtagaatgctggctgttaaaaatggggtccattttcaaatacaacatttttctaaaccatgcacaaaagaacagccctacagggacactcttccatactgtatacatgccgttgccactacatgtgaatactggcagacgttagtggctaaagataaacattagataaaacataggtcttcactgagcagacctgaaatagcagagcaatgaagtacattacaaatcagcatcccagtacattttaaaaaacaaaccaacaagggtgtcatgccaccagtcaaaaggtactttgcttaaactggcattctttaacattcatgttgtagtggtaagtacttcatttcatacagccacagttattaatactttcctaagggctaccagctgctaaaaactgctgttatctcatactgagaatgctagttctatacctttgctctcaggctgtgaggaaggggtgctagtccaaaaggccatgggattagatttaaaaaggctaaaattaaatcctagaaaataaagaatatttcattttttaacattttaggaaacaaaatgaatatgcttttaaaacataaaaagccagaatccctcaatttataccaccaatctgactgtcttacatattcatttatccctgtagtttcattctttgctcatttaatacatgagcaagactgacatacaacacataaaatgagaacatctcaatatcatggttttttttgtttttttgtttttttttttttttttggagacaaagtctcactcagtcaggctggagtgcagtggcatgatttcagctcactgctacctccatctcctgtgctcaagcgatccacctgcctcaacctcctgagtagctgctaattataggcacgcaccaccacgcccggctcatttttgtattttcagtagaaacagggtttcaccacattggccaggctggtctcgaactcctgagctcaagtgatctgcccacctcaacctcccaaagtgctggcattctaggagtgagccaccgtgcccagcctcaatatcatgttttctgagtgacaaaagaaacagaacaaatgaaaatgaacactttaaaaaaagactcacgttaatgcgcatgattcaagcatgagtccgtacactgtaccaagttcttttgctctgccctagcatgatagaagtatcttccagttactgaaatgtctttaactaagttctcttgctctttgaaacctcaccgtgaacttattaagggagaaaaaaaattgctcaaatattttgggggtgttcacaaagcatcgtttatatcccaacattagtatcccacaaagagtctgcatcaagctaaacattaaaagaaagaaaaattgtgcttaactttaacaacaaagtacctacccttttctggtgttttaaatgtgtagttgattgaagattcttccattggaaaggaagcagagagatttttgactttgctatctgaagactgttcgatatcagagttctttgacagttcacattttttaggttccactttgctttcagatccactctgggctactgaactagtttcactatcgttacttttcaaaggtgcattaaaactaaatccaaacaaagacccagtggcagaactgttgccaaatgcaaatgggtttgatttttcactactaaaaattcttttaacagactctgaaccaaatacaaactttggaggagaaaccactgcttttgttgttgtttcagatgtgctagacacttcaacttctgaagctgcatctgctacatcatcaccctgaataacatctgtcctctctcttgtggtttcttctaatacagctacagcaattttgccacatggtgactctctgggagtgcttgaccgagaaacatgaggtgttatcaa

SEQ ID NO: 691307 - DNA, 2749 bp, Homo sapiens
atgcggtcttgctttgtcacccagagctggagtgcagtgatgtgatcatagttcactgaagcctggaacttgtgggctcaagtgatccctctgcctcagcctcccaagtaactgggattataggcacaagccattgcaccaaatgacaattttaaattacatacacaggttatattttatttctattggatgacactgctctgcagaaccagtgcccttccttttacaatgttaaatttgtccctctccttcattataaacgaaaacctagtatcatttcctagctaggagaaataacagtacaccgtaagatacagattcttgttccacttctgctattactcagtaaagacctcttgggtaaatcagatagcctctcttggcctcagtttactcatgtctaaagtcttcatttctaaggtcccttgggacaatgacattatcagattcaaaacagaataaggctctatgttctacagtagtgtataggcacattcgttcttaggtcagggattcctaacctagagctcacagaaactgtacgcaagtatacatccacttttaagttaacacttttcacatttctcaaagaccgtatctttaaaataaaagattaagagctaccttagctggtaataaaactggtatacttaaaaaaaaatcagagattgttaytttatcattgtacttgtttggcatggctaagatgtgttactggtcactaagggtgaggtttcacttccctaacctgttcttgaaggccttcaacagatcccacttcttgttccactctagtagccacacttctaaaaatgatctgtgcaacatatataatatgcaagctgtagaatgctggctgttaaaaatggggtccattttcaaatacaacatttttctaaaccatgcacaaaagaacagccctacagggacactcttccatactgtatacatgccgttgccactacatgtgaatactggcagacgttagtggctaaagataaacattagataaaacataggtcttcactgagcagacctgaaatagcagagcaatgaagtacattacaaatcagcatcccagtacattttaaaaaacaaaccaacaagggtgtcatgccaccagtcaaaaggtactttgcttaaactggcattctttaacattcatgttgtagtggtaagtacttcatttcatacagccacagttattaatactttcctaagggctaccagctgctaaaaactgctgttatctcatactgagaatgctagttctatacctttgctctcaggctgtgaggaaggggtgctagtccaaaaggccatgggattagatttaaaaaggctaaaattaaatcctagaaaataaagaatatttcattttttaacattttaggaaacaaaatgaatatgcttttaaaacataaaaagccagaatccctcaatttataccaccaatctgactgtcttacatattcatttatccctgtagtttcattctttgctcatttaatacatgagcaagactgacatacaacacataaaatgagaacatctcaatatcatggttttttttgtttttttgtttttttttttttttttggagacaaagtctcactcagtcaggctggagtgcagtggcatgatttcagctcactgctacctccatctcctgtgctcaagcgatccacctgcctcaacctcctgagtagctgctaattataggcacgcaccaccacgcccggctcatttttgtattttcagtagaaacagggtttcaccacattggccaggctggtctcgaactcctgagctcaagtgatctgcccacctcaacctcccaaagtgctggcattctaggagtgagccaccgtgcccagcctcaatatcatgttttctgagtgacaaaagaaacagaacaaatgaaaatgaacactttaaaaaaagactcacgttaatgcgcatgattcaagcatgagtccgtacactgtaccaagttcttttgctctgccctagcatgatagaagtatcttccagttactgaaatgtctttaactaagttctcttgctctttgaaacctcaccgtgaacttattaagggagaaaaaaaattgctcaaatattttgggggtgttcacaaagcatcgtttatatcccaacattagtatcccacaaagagtctgcatcaagctaaacattaaaagaaagaaaaattgtgcttaactttaacaacaaagtacctacccttttctggtgttttaaatgtgtagttgattgaagattcttccattggaaaggaagcagagagatttttgactttgctatctgaagactgttcgatatcagagttctttgacagttcacattttttaggttccactttgctttcagatccactctgggctactgaactagtttcactatcgttacttttcaaaggtgcattaaaactaaatccaaacaaagacccagtggcagaactgttgccaaatgcaaatgggtttgatttttcactactaaaaattcttttaacagactctgaaccaaatacaaactttggaggagaaaccactgcttttgttgttgtttcagatgtgctagacacttcaacttctgaagctgcatctgctacatcatcaccctgaataacatctgtcctctctcttgtggtttcttctaatacagctacagcaattttgccacatggtgactctctgggagtgcttgaccgagaaacatgaggtgttatcaa

SEQ ID NO: 691308 - DNA, 2749 bp, Homo sapiens
atgcggtcttgctttgtcacccagagctggagtgcagtgatgtgatcatagttcactgaagcctggaacttgtgggctcaagtgatccctctgcctcagcctcccaagtaactgggattataggcacaagccattgcaccaaatgacaattttaaattacatacacaggttatattttatttctattggatgacactgctctgcagaaccagtgcccttccttttacaatgttaaatttgtccctctccttcattataaacgaaaacctagtatcatttcctagctaggagaaataacagtacaccgtaagatacagattcttgttccacttctgctattactcagtaaagacctcttgggtaaatcagatagcctctcttggcctcagtttactcatgtctaaagtcttcatttctaaggtcccttgggacaatgacattatcagattcaaaacagaataaggctctatgttctacagtagtgtataggcacattcgttcttaggtcagggattcctaacctagagctcacagaaactgtacgcaagtatacatccacttttaagttaacacttttcacatttctcaaagaccgtatctttaaaataaaagattaagagctaccttagctggtaataaaactggtatacttaaaaaaaaatcagagattgttattttatcattgtacttgtttggcatggctaagatgtgttactggtcactaagggtgagrtttcacttccctaacctgttcttgaaggccttcaacagatcccacttcttgttccactctagtagccacacttctaaaaatgatctgtgcaacatatataatatgcaagctgtagaatgctggctgttaaaaatggggtccattttcaaatacaacatttttctaaaccatgcacaaaagaacagccctacagggacactcttccatactgtatacatgccgttgccactacatgtgaatactggcagacgttagtggctaaagataaacattagataaaacataggtcttcactgagcagacctgaaatagcagagcaatgaagtacattacaaatcagcatcccagtacattttaaaaaacaaaccaacaagggtgtcatgccaccagtcaaaaggtactttgcttaaactggcattctttaacattcatgttgtagtggtaagtacttcatttcatacagccacagttattaatactttcctaagggctaccagctgctaaaaactgctgttatctcatactgagaatgctagttctatacctttgctctcaggctgtgaggaaggggtgctagtccaaaaggccatgggattagatttaaaaaggctaaaattaaatcctagaaaataaagaatatttcattttttaacattttaggaaacaaaatgaatatgcttttaaaacataaaaagccagaatccctcaatttataccaccaatctgactgtcttacatattcatttatccctgtagtttcattctttgctcatttaatacatgagcaagactgacatacaacacataaaatgagaacatctcaatatcatggttttttttgtttttttgtttttttttttttttttggagacaaagtctcactcagtcaggctggagtgcagtggcatgatttcagctcactgctacctccatctcctgtgctcaagcgatccacctgcctcaacctcctgagtagctgctaattataggcacgcaccaccacgcccggctcatttttgtattttcagtagaaacagggtttcaccacattggccaggctggtctcgaactcctgagctcaagtgatctgcccacctcaacctcccaaagtgctggcattctaggagtgagccaccgtgcccagcctcaatatcatgttttctgagtgacaaaagaaacagaacaaatgaaaatgaacactttaaaaaaagactcacgttaatgcgcatgattcaagcatgagtccgtacactgtaccaagttcttttgctctgccctagcatgatagaagtatcttccagttactgaaatgtctttaactaagttctcttgctctttgaaacctcaccgtgaacttattaagggagaaaaaaaattgctcaaatattttgggggtgttcacaaagcatcgtttatatcccaacattagtatcccacaaagagtctgcatcaagctaaacattaaaagaaagaaaaattgtgcttaactttaacaacaaagtacctacccttttctggtgttttaaatgtgtagttgattgaagattcttccattggaaaggaagcagagagatttttgactttgctatctgaagactgttcgatatcagagttctttgacagttcacattttttaggttccactttgctttcagatccactctgggctactgaactagtttcactatcgttacttttcaaaggtgcattaaaactaaatccaaacaaagacccagtggcagaactgttgccaaatgcaaatgggtttgatttttcactactaaaaattcttttaacagactctgaaccaaatacaaactttggaggagaaaccactgcttttgttgttgtttcagatgtgctagacacttcaacttctgaagctgcatctgctacatcatcaccctgaataacatctgtcctctctcttgtggtttcttctaatacagctacagcaattttgccacatggtgactctctgggagtgcttgaccgagaaacatgaggtgttatcaa

SEQ ID NO: 691309 - DNA, 671 bp, Homo sapiens
aaaacagctttgtggcactgaaagggcgagagccaagatctcctgatttctgttcctgtgttcatagattctttttccttaataaaagtaaacatatatcaagatggtccttgtttttttaaaataagatgattaaaattaaagattaatgagctcataggagatactcagaagtactgaacagggtgaagaaaactaaaaactaaccaccttattaacatttcttatatttgagagcatttccttctggttctttctctatacatatagtattttttatgagattgttaccatgttactatgttgtgtgtagatgagctagcctgtttttwaaatgttactttagttctgagcatttttaaacttaaatgttttttgaatattaatgagttcatggtgtcccatcacatggaagtactgtaaattctgttcctttatttatgttgtttctggtttatgccattacaaattctaggacactgtcctagttttgtagggtattcaaaatattcagtttatgctcttaccactagtatctgatagtgccattttcgcacttttgctaatgctgacttactagtttataaaatcctttgccaatttgtaggaacaaaagttatatcaatttttaagtttttttaatactagtcatgctcaacaattcatgcaaa

SEQ ID NO: 691310 - DNA, 671 bp, Homo sapiens
aaaacagctttgtggcactgaaagggcgagagccaagatctcctgatttctgttcctgtgttcatagattctttttccttaataaaagtaaacatatatcaagatggtccttgtttttttaaaataagatgattaaaattaaagattaatgagctcataggagatactcagaagtactgaacagggtgaagaaaactaaaaactaaccaccttattaacatttcttatatttgagagcatttccttctggttctttctctatacatatagtattttttatgagattgttaccatgttactatgttgtgtgtagatgagctagcctgttttttaaatgttactttagttctgagcatttttaaacttaaatgttttttgaatattaatgagttcatggtrtcccatcacatggaagtactgtaaattctgttcctttatttatgttgtttctggtttatgccattacaaattctaggacactgtcctagttttgtagggtattcaaaatattcagtttatgctcttaccactagtatctgatagtgccattttcgcacttttgctaatgctgacttactagtttataaaatcctttgccaatttgtaggaacaaaagttatatcaatttttaagtttttttaatactagtcatgctcaacaattcatgcaaa

SEQ ID NO: 691311 - DNA, 671 bp, Homo sapiens
aaaacagctttgtggcactgaaagggcgagagccaagatctcctgatttctgttcctgtgttcatagattctttttccttaataaaagtaaacatatatcaagatggtccttgtttttttaaaataagatgattaaaattaaagattaatgagctcataggagatactcagaagtactgaacagggtgaagaaaactaaaaactaaccaccttattaacatttcttatatttgagagcatttccttctggttctttctctatacatatagtattttttatgagattgttaccatgttactatgttgtgtgtagatgagctagcctgttttttaaatgttactttagttctgagcatttttaaacttaaatgttttttgaatattaatgagttcatggtgtcccatcacatggaagtactgtaaattctgttcctttatttatgttgtttctggtttatgccattacaaattctaggacactgtcctagttttgtagggtattcaaaatattcagtttatgctcttaccrctagtatctgatagtgccattttcgcacttttgctaatgctgacttactagtttataaaatcctttgccaatttgtaggaacaaaagttatatcaatttttaagtttttttaatactagtcatgctcaacaattcatgcaaa

SEQ ID NO: 691312 - DNA, 610 bp, Homo sapiens
agaacgatggaggtgccagattaaaaaaatccaatcttgcagaaataagtagagcaagactccgtaccgtggggacggcaccaggcccctcatgagggatcctcctccatgacccaaacacctcccactagggcccacctccaggacccactggagatcccatttcaatatgagatttggggtgaatgaacatccaaactgtatcatccaaggtcagtgcgtttctctgtcctccagttttgcctgccatgagcagctttcctgtgagccagctgtccttttcgtctccagggtcattttsttccttcagtgcccagtgtttggactttaggctgaccttcaggattgtggagtcacagaacaagctcatataagtgtgtaagcaggcagcaaattttttaaaataaagaaaaagttatttagactgtgccagtcagtctgtgtgccatcctagctacaacccagggtggatgctgagtggagggtagaggagtgcatccctcactcttatctgtgcttgtccttcttgcatactgctgaggccaggagcacctagatttgccccagtgggactcacctttttatttatttttatttttatttttatttt

SEQ ID NO: 691313 - DNA, 610 bp, Homo sapiens
agaacgatggaggtgccagattaaaaaaatccaatcttgcagaaataagtagagcaagactccgtaccgtggggacggcaccaggcccctcatgagggatcctcctccatgacccaaacacctcccactagggcccacctccaggacccactggagatcccatttcaatatgagatttggggtgaatgaacatccaaactgtatcatccaaggtcagtgcgtttctctgtcctccagttttgcctgccatgagcagctttcctgtgagccagctgtccttttcgtctccagggtcattttcttccttcagtgcccagtgtttggactttaggctgaccttcaggattgtggagtcacagaacaagctcatataagtgtgtaagcaggcagcaaattttttaaaataaagaaaaagttatttagactgtgccagtcagtctgtgtgccatcctagctacaacccagggtggatgckgagtggagggtagaggagtgcatccctcactcttatctgtgcttgtccttcttgcatactgctgaggccaggagcacctagatttgccccagtgggactcacctttttatttatttttatttttatttttatttt

SEQ ID NO: 691314 - DNA, 610 bp, Homo sapiens
agaacgatggaggtgccagattaaaaaaatccaatcttgcagaaataagtagagcaagactccgtaccgtggggacggcaccaggcccctcatgagggatcctcctccatgacccaaacacctcccactagggcccacctccaggacccactggagatcccatttcaatatgagatttggggtgaatgaacatccaaactgtatcatccaaggtcagtgcgtttctctgtcctccagttttgcctgccatgagcagctttcctgtgagccagctgtccttttcgtctccagggtcattttcttccttcagtgcccagtgtttggactttaggctgaccttcaggattgtggagtcacagaacaagctcatataagtgtgtaagcaggcagcaaattttttaaaataaagaaaaagttatttagactgtgccagtcagtctgtgtgccatcctagctacaacccagggtggatgctgagtggagggtagaggagtgcatccctcactcttatctgtgcttgtccttcytgcatactgctgaggccaggagcacctagatttgccccagtgggactcacctttttatttatttttatttttatttttatttt

SEQ ID NO: 691315 - DNA, 1251 bp, Homo sapiens
ctctctgcctatatgtaaagaggaatagaaataattggcataaacaggaaaaaagaagtaaaatggtaggatcagatgtgagaaatatataagctaagatttttttgtttctttgtttgtttgttgtttttttgagacagagtcttgctctgttgcccaggctggagttcagtgacacaatcttggctcactgccgcctccaccttccaggctcaatggttctcctccctcagcctcccgagtagctgggattacaggtacgcatcaccacacccagctaatttttggatttttagtagagactaggttttaccatgttggctaggctaggctagtctcaaactcctgagttcaggtgatccacccacttcagtctcccaaagtgctgggatttcaagtgtgagccaccagggcgagcctagatatattctagaagcgaataatagtaaaatataatgtaaattgtttaaaattaatctgtatatgaaatgttttctaggactttcctgccagaaaagtaggaatagaatggcagaaggaaagaggttccttctacaagcaggcacacatcctatttcactttatcctgtgatcagtctcataaccatctcctggtatgaagtgctaaaactgtgctttaagaataacttaagtcctttatgtacaaactaaagcatgagagcctgaaccttggaaaccaagaaattccaaaaagccttatgtgtgagactgggtgccacagatcktggcagaaattactgcttattcttaattcttattgttcctttctaacacttcaacttataatgccaatatctacctcagcctaaagacaagctctagaatcacttgtgttacttattacatttcttttaaaaaactcatgaattacacatgaatttcaaagttgccaactgagattccaaggacttaaaaaaaaaacctggcacctttgcattataaaggctgtaaacagtgttcatagtgtttgtctttaagggacatgcctcatccattaacaacttttcttccttaaatcagcatatcttgcctaaaaatgttttctcaaaagttaggaagcactaagatttacagattgttctatcacatcttaatctacttatcaactttagcattatcaaagcatgaactgttttgggttttcatagttaattatgtttgtcataataattgggatgcaattgtttttcttacgattattttgtacttgcttttcttatggtaacttct

SEQ ID NO: 691316 - DNA, 2251 bp, Homo sapiens
gtagctatgttttttattgggtattggctggaggccaccctcaggtcttagacaccacctgctgttgggcttcctcaatatggtcacacacttcatcaaatcagcaaggagaatcttgtgtgcatgccagcaatatgtctatctcatatcctaatgtatgtctctctcctcctcctctcctcttctctctcctttcttctgtgcacacacacacacacacacacacacacacacatatcacaggagtaacaacccatcacatttgcaatattatgtcagttagaaacaagtcacagatcctactcacactcactcgatttcatccaaaagtttgggcagtgatcccatccacactaaaaaaggaagagatcatacagagtataacaccaggacatcgagatcatgggaaacatcttagaagtctgcctatcacagataataaatacttgttgttgtttgaagacattaagtttcaggtaatttcttatgcagcaatagataactaattagtaagagttgtgcctaactaatcaggcacaagttagaatataaggagtgaagagttatcactatagatcctacagatactaaaaagataagagtttgttttactataagcaagcctatcacaataagacaatttagattaaaaggctggtaagttttatgctttgtatattttaccatgataaaaacattttataagcatcacttaccattttatcacctattaaatgctaaaggctgtacatacatttcactaacccttagaacaactttgttcagtaaaaattattcctggtttacagaggagaaaactgagactcagaaaggctactcatttatttgaagtctcacagccttcataatgttattcatgcactctttatgccctagatagttggagaaattacaggggagaatctcagaaataactaaaataattgaagatgtaatcaagaaacaaaagtacagtgtttgaatagagaccaactaaagacagctgggactggttcagtctacatataattgaaaggtaaatcactaggaaaaggaagaaatctctgggtttcaagatgaaatagaagtcatgagaattctataaatttaaattcaagttcactgaagagagctaggagtcagctactgtttgctgcagataatattcagtaaggagctaactgctaatgcactggcctggggaagtgtttaatgtcaaatagaaaccaacactagtaaaatacttccaggaggtaagaatttttttttttttgagacagagtcttgctctgtccccaaggctggaatgcagtggcatgatcttggctcactgcaacctccacttcccaggttcaagcaattctcctgactcagyctccctagtagctgggattacaggcacacaccaccatgcccagctgatttttgtagttttaatagagatgcggtttcaccatgttggccagggtggtctcaaattcctgacctcaggtgatccgcccgccttggcctctcaaagagctgggattacaggcatgagccactgcaccttgctgctccttctttttttgtaatggacctgggagatccttaggaatgagggaaagactcatttctttgaatagggcagaatattaaagactagccagccttcaggcttatggtggttgctgctattctgttgaacgtaaaccatagcctttagaaaggagcaagtctttgtgggatacacaggacttgaagtgcatcaaaggggtggaaacccagctgaccatcataccctcaagtgagtttttccactgaatttgattatattctcatttggcctttctttctgggctttttaagcagccccaaagctctaggtgattttacttttgtaattgtattctcttgggaatactcattcctgattgtttcagtaaacagccttgaactcctggcctcaagtgatcctcccacctcaccctcctgagtagtagttgggactacaggctgcagaaacttttaagagaaaatagagggaacaaacccaagctcatttattcagattaagataaacttgatatcaaaactagacttgtcacagagaatgcaagaggcgggagttatttcccaaatccaagttctgcctctggattattagacgtggcctcactgtccttgatctgcaaggaatttatactgattagagcattagtaaaacctatgttctattcatcatgaaaagtcattttttaaagattccaga

SEQ ID NO: 691317 - DNA, 2051 bp, Homo sapiens
attaaaatcaaatcatcttgcagcacaccgagaaaaaggttagacttttaaaataatttcaaagtcatgaaaagagcaaatatgctcaagaaagagcctagcaacgctcaatgaccaattccccttttatatagtttggtatctgaattagaatgccagaatctacaaattcctctgggtgagggtgctgcattttgaggattttataacactgccatcaccaagctctcttttgttattcactttaaggagataatttacgggcaaccagggaacataaaccaaagtagatgtctatctagatatatagatacatctccatatcattgacaagataccttctggcctagtgtgagtacaatctatgggtgtggttggagagaacatgtgttccacctgaatggcagatcaagattattccttctcatctgctgcaatggctcagtgtgttaaggagaggagcgagacagcaagaactgcattcacttagtcatacagaccaaaaggaggaatgtcgcccagccctcttaactgacccagaacacagctcatgtctcaactgctacctctactatttagaaagaagtractctgccaaatcagggttctggacaaatatatttttattgatcacatacaaatagatgaagatggacttggatgttaagaaaaataatactatacaaaatcaagagtagacagtcactcctagacttaaattaagagtgtgtacattagataatttaatccaatgtatcaggtaaaaacttgaacaaaccttttggcctcttccatacaattcagggaagcatgtcctccacaaaacagtatcaaaatataaataaaagactggcttaagatgaaaggaaaccttatgaatgaaaagaagccagatgagaggcacttaactgagaatgaaaagaaactgagtggacaaaataattatgagaagatgaaccttcaaatcagaaagagggaaaaaagcttatttgatactatgggaactcaaaagagagtgaacacaaatgtgaaaattccaggagtaaagaaaagtagcacagctgaattaagagcatgagaaaatgtatacaattttgagtaataagaacagaaatcaaaagtaactattgtatgttatattttagtagagcaacactgaagaagaatgaaaacaagaaataatattaaatatgaacataaggagaagagaataatatttttaaaattttgagtttctaagtttacctgaaattttaattttggtttcttatgtaataccagagttattaggaagttattagctaataacactattttcagtgatattttaagtatttgtcctagaaaaatttctattttttaaaaatgtatatttaaaaatacattaaatgtgtatatatatcaatcatatgtatcgatttctgttttttttttgaattgcaaatgaaatctgtatttttgtgttcctggaaaaaaataaacttgactggatcgtaatatattattcatgctgtaattcaatgtatttgaatactttaagaatgttacatttatagttaacagacattgacctataaattttctttcatataatgatgctgtgagacaatctaagaagaattaaaatttaaattcatgtattcctacattttcctctgttctctaactgtaatatattttaattacagatggaggaacagatagatgttagataaataggtatataatagatagatcatccaaaattcttattcttatggttttatgcagtcagtatttacctctatttttctacatgtttatccttccaatttagttaattacttcctgcacctttgatgtcatatatataaacaggaaataacacgtggtggccagaatgtagagagagccacaagacttgtgaataaaatccacaggcaagcatgtggcgattccttttgcagttttggagggaatgccaaaccctatgtttgctgtggaaaagagtatggtagttcctcaaaacatcaaaatgatattgccatatgactcagcagcgccacatctca

SEQ ID NO: 691318 - DNA, 2535 bp, Homo sapiens
tgcatgtgtttatgcatagctttctatttttctcttttctatttatattccaaattagaatataatgctaatcaagcatagtggctgtgtttcttgcttcctgtagtctgcaggtagcatacaaatgtaataaactacttattcatgtcacatctatttattttctgccttataccaagcttgtgggattctcttaaatacaacatttttatacttacatctaggcaatacccattagcatcgccttcctaaatcaggggaaattgagcctctgtaaggtggagtaacttcctaagatacaaaactcagcattaaagtctgtatacttcaatatcctgcccccttctcatttgtctttactgccttttatgtatgtgttagatattcaataaattctgttttttaaactgaatttaagccgtggagcagtgttttgttgaacaataaatatgatataagacactcttcctccctttcatttatgatscagttcatgaaaaagagaaactctttcattgtgctagaagcttaaagtaatgaaaatgccacgttctatattaaacagaaactgaagggaatcaaggtgaattgcatgagacatagaaaacaagtgggaaagaaatctagtataatttgccctttgtgtacctttattatttagcgtttgagtaaatgtttcccccaaatatcttcccatcttaattcatgtctataaagtagacatttatgtctcaccttgtcaagaagggcaaactctaacataaacatttcccaaaaatgcttcctgctaaaacgtaagctcagtctggctagaaattaagctcacttcataaagattaattggtagctaatctttgcatgctgttctctgaacttgagtgaaagctgtccatcaggcatacagggaatgatggaaaaagtgacaacagaagatgaatgctatgtcactaaccttcaaatatgaccttccttgtcttttaaattcttgatatcttaagacttcattaattcatctctctttgccctgggttcaacattgtgctataccaaaactcatgtaaaacaatgatctaaggtaataaaaatggcatttttctttcatgtggatgcaagctaactggcatttttacaatcaacatatttcctttgtcaatttttgattctgtattggaagtaattcatgggtatttctgaagggaagatggtgtttctgtgttcattgtgatccaaactgtttttagacctagtggcgtttgtaaaacaatttgtgccagctgaccaaggaccactgtggcagaaagcagcaaacttgcgtaagatgtcactgcctcatcagttggctttgaaaactaggggcttactctatagtcttatgaatcaaagacattgatagatgtagtataagattacaatcatattttccttttgacagtcacattataaagcatgatgtattgtaattaatctcaattagctgatcacaattaaaattaataaggtttcttattgctgataaaaatcatgactctcctgttctcaaatgtgcaagaaattcttgtaattttaatacaaatttgcatattattactaattgatttaatctcattggatttggttcatggacccaatttattaaaatattgataatggggtaatgatttgtctccccatttcatttacactaaaagccacaattcttacaatggtctgcaagcccatcattatctgccgcatgttaaccgccaaaattcttttatatcttcacccttcatcttaccagtgttcctggccacctcactgtcctatagacatgccaacaagctgctgtcttatgacgaagactagttaatttcttggcctggaaagatagccctccatatatccattgatgatctcattcaacttcctcaagtctttactgaaacctcacattctcgatgagacctattcagtatttcaaactgcctcccagttgcaacattccaaaaccccttactcttctgtgtatttttgaaaggattttttgagatataattcacatagagtgcacacattaatgtctacaagtcaatggcttttcgtatatgcacagataagtggagccatcatcacaatgaattttagagcattttcatcacttcaaaaagaaaccccaccttctctagctgttaacctcctatgaacccatcccctcctcaattctaagcaaccgcaaatctgttttctatctctatagattttcctattctattttcatctaaatagaatcatacaataggtggccttttgtgcctggcttctttcagttggcataatgctatcaagtttcatatacgtattggtactttatttctttttataaccgtataatattcaatttcacggatataacattttgtttatccaataatatttttattgacatttgagttgtgttcagtttttggctattttaaatactgctgctaaaaatacttgtgtacaatttgtgtttgaacacctctttccaataatctgggtgtatacctaggaata

SEQ ID NO: 691319 - DNA, 2535 bp, Homo sapiens
tgcatgtgtttatgcatagctttctatttttctcttttctatttatattccaaattagaatataatgctaatcaagcatagtggctgtgtttcttgcttcctgtagtctgcaggtagcatacaaatgtaataaactacttattcatgtcacatctatttattttctgccttataccaagcttgtgggattctcttaaatacaacatttttatacttacatctaggcaatacccattagcatcgccttcctaaatcaggggaaattgagcctctgtaaggtggagtaacttcctaagatacaaaactcagcattaaagtctgtatacttcaatatcctgcccccttctcatttgtctttactgccttttatgtatgtgttagatattcaataaattctgttttttaaactgaatttaagccgtggagcagtgttttgttgaacaataaatatgatataagacactcttcctccctttcatttatgatgcwgttcatgaaaaagagaaactctttcattgtgctagaagcttaaagtaatgaaaatgccacgttctatattaaacagaaactgaagggaatcaaggtgaattgcatgagacatagaaaacaagtgggaaagaaatctagtataatttgccctttgtgtacctttattatttagcgtttgagtaaatgtttcccccaaatatcttcccatcttaattcatgtctataaagtagacatttatgtctcaccttgtcaagaagggcaaactctaacataaacatttcccaaaaatgcttcctgctaaaacgtaagctcagtctggctagaaattaagctcacttcataaagattaattggtagctaatctttgcatgctgttctctgaacttgagtgaaagctgtccatcaggcatacagggaatgatggaaaaagtgacaacagaagatgaatgctatgtcactaaccttcaaatatgaccttccttgtcttttaaattcttgatatcttaagacttcattaattcatctctctttgccctgggttcaacattgtgctataccaaaactcatgtaaaacaatgatctaaggtaataaaaatggcatttttctttcatgtggatgcaagctaactggcatttttacaatcaacatatttcctttgtcaatttttgattctgtattggaagtaattcatgggtatttctgaagggaagatggtgtttctgtgttcattgtgatccaaactgtttttagacctagtggcgtttgtaaaacaatttgtgccagctgaccaaggaccactgtggcagaaagcagcaaacttgcgtaagatgtcactgcctcatcagttggctttgaaaactaggggcttactctatagtcttatgaatcaaagacattgatagatgtagtataagattacaatcatattttccttttgacagtcacattataaagcatgatgtattgtaattaatctcaattagctgatcacaattaaaattaataaggtttcttattgctgataaaaatcatgactctcctgttctcaaatgtgcaagaaattcttgtaattttaatacaaatttgcatattattactaattgatttaatctcattggatttggttcatggacccaatttattaaaatattgataatggggtaatgatttgtctccccatttcatttacactaaaagccacaattcttacaatggtctgcaagcccatcattatctgccgcatgttaaccgccaaaattcttttatatcttcacccttcatcttaccagtgttcctggccacctcactgtcctatagacatgccaacaagctgctgtcttatgacgaagactagttaatttcttggcctggaaagatagccctccatatatccattgatgatctcattcaacttcctcaagtctttactgaaacctcacattctcgatgagacctattcagtatttcaaactgcctcccagttgcaacattccaaaaccccttactcttctgtgtatttttgaaaggattttttgagatataattcacatagagtgcacacattaatgtctacaagtcaatggcttttcgtatatgcacagataagtggagccatcatcacaatgaattttagagcattttcatcacttcaaaaagaaaccccaccttctctagctgttaacctcctatgaacccatcccctcctcaattctaagcaaccgcaaatctgttttctatctctatagattttcctattctattttcatctaaatagaatcatacaataggtggccttttgtgcctggcttctttcagttggcataatgctatcaagtttcatatacgtattggtactttatttctttttataaccgtataatattcaatttcacggatataacattttgtttatccaataatatttttattgacatttgagttgtgttcagtttttggctattttaaatactgctgctaaaaatacttgtgtacaatttgtgtttgaacacctctttccaataatctgggtgtatacctaggaata

SEQ ID NO: 691320 - DNA, 1470 bp, Homo sapiens
ctacaaacctgtgtactacattaccgtactgaatactgcaggcaataagaacacagtgataagagtttatgtatgtaaacatacttaaacatagaaaagtatgtaaaaatatgtattataatctcatggaccacttttgcatatgtaatccatctttgacagaaatgttattatgcattacatgactctaagacaaaaataaaataacacattgtaaaaaatgtacacatgtaccaaacatattaatattataaaaataaaaatattcagtgtaagaatttgtagtgatcacaaaatattcacagcttatattttagtacagttgcaaaagcctagtgcaattactatttatttctgtgtgtatattaaacatgtatataataaatatttttcaggttcaacaatatatatcaatcctactggctcttataaatattagttaaaatcaattagtaaattcatgtatatatatacacacatgtgtatcagtgagtgtgtgtgcatgtatgggtgtgaatgtaattgtaggtgtgtgtaaatgtaattggatgcatcctaatatttatcctacctacaagatttccaagattcatttattatctttagatgatgtgcatttaaagatttaccaaataaaactctaatcgtggaaaatctcaagatgttattaaattcaccttgtgcacataattgtttctttaaatttatgtttcttgcaaaaccagcattaacgctcatgcacaaaataattttctaaataaaaaatgaaaacattttctcagtcattaattcttaataattatttctctccaataattaatgtgaattgattcttaattcttaactatagaataatgttgcccttcagaattctgaaacttttgcatgttgtatacatttcactaactagttagaacaacttctggaatattggcattaattaatgtcactcagcaattattgatttcaaagaaattaaatacctgaatcacaagggtattttggcatctaatttaatcaagctctttgtatcatcatctacacgttaattacttaacaaacatttctctgtgtgagaaagwttgagcaggttattgtgctttgttaatatgcaacttttgcttaatctagagataggcaacgctccctgtaagggacaaagagaaaaatgaatgagcaatagagatgtgacaggcatggaaaaagacaatacatttataaaacaaatagggccacagatgacgataatggggataaatcttgagatactgactcagtttacaaccgcactgtataatagagcaaatcatttgttaatttttttacaaatggaatttaatttaattaagatgaataaagtattttaaacaaggcttgtcatcttaaaataaaatagtggaataaagtgataaaaccaatgtaaaaatcataaacattgtataaagaattttttcaggtaatttaatattt

SEQ ID NO: 691321 - DNA, 1470 bp, Homo sapiens
ctacaaacctgtgtactacattaccgtactgaatactgcaggcaataagaacacagtgataagagtttatgtatgtaaacatacttaaacatagaaaagtatgtaaaaatatgtattataatctcatggaccacttttgcatatgtaatccatctttgacagaaatgttattatgcattacatgactctaagacaaaaataaaataacacattgtaaaaaatgtacacatgtaccaaacatattaatattataaaaataaaaatattcagtgtaagaatttgtagtgatcacaaaatattcacagcttatattttagtacagttgcaaaagcctagtgcaattactatttatttctgtgtgtatattaaacatgtatataataaatatttttcaggttcaacaatatatatcaatcctactggctcttataaatattagttaaaatcaattagtaaattcatgtatatatatacacacatgtgtatcagtgagtgtgtgtgcatgtatgggtgtgaatgtaattgtaggtgtgtgtaaatgtaattggatgcatcctaatatttatcctacctacaagatttccaagattcatttattatctttagatgatgtgcatttaaagatttaccaaataaaactctaatcgtggaaaatctcaagatgttattaaattcaccttgtgcacataattgtttctttaaatttatgtttcttgcaaaaccagcattaacgctcatgcacaaaataattttctaaataaaaaatgaaaacattttctcagtcattaattcttaataattatttctctccaataattaatgtgaattgattcttaattcttaactatagaataatgttgcccttcagaattctgaaacttttgcatgttgtatacatttcactaactagttagaacaacttctggaatattggcattaattaatgtcactcagcaattattgatttcaaagaaattaaatacctgaatcacaagggtattttggcatctaatttaatcaagctctttgtatcatcatctacacgttaattacttaacaaacatttctctgtgtgagaaagtttgagcaggttattgtgctttgttaatatgcaacttttgcttaatctagagataggcaaygctccctgtaagggacaaagagaaaaatgaatgagcaatagagatgtgacaggcatggaaaaagacaatacatttataaaacaaatagggccacagatgacgataatggggataaatcttgagatactgactcagtttacaaccgcactgtataatagagcaaatcatttgttaatttttttacaaatggaatttaatttaattaagatgaataaagtattttaaacaaggcttgtcatcttaaaataaaatagtggaataaagtgataaaaccaatgtaaaaatcataaacattgtataaagaattttttcaggtaatttaatattt

SEQ ID NO: 691322 - DNA, 1470 bp, Homo sapiens
ctacaaacctgtgtactacattaccgtactgaatactgcaggcaataagaacacagtgataagagtttatgtatgtaaacatacttaaacatagaaaagtatgtaaaaatatgtattataatctcatggaccacttttgcatatgtaatccatctttgacagaaatgttattatgcattacatgactctaagacaaaaataaaataacacattgtaaaaaatgtacacatgtaccaaacatattaatattataaaaataaaaatattcagtgtaagaatttgtagtgatcacaaaatattcacagcttatattttagtacagttgcaaaagcctagtgcaattactatttatttctgtgtgtatattaaacatgtatataataaatatttttcaggttcaacaatatatatcaatcctactggctcttataaatattagttaaaatcaattagtaaattcatgtatatatatacacacatgtgtatcagtgagtgtgtgtgcatgtatgggtgtgaatgtaattgtaggtgtgtgtaaatgtaattggatgcatcctaatatttatcctacctacaagatttccaagattcatttattatctttagatgatgtgcatttaaagatttaccaaataaaactctaatcgtggaaaatctcaagatgttattaaattcaccttgtgcacataattgtttctttaaatttatgtttcttgcaaaaccagcattaacgctcatgcacaaaataattttctaaataaaaaatgaaaacattttctcagtcattaattcttaataattatttctctccaataattaatgtgaattgattcttaattcttaactatagaataatgttgcccttcagaattctgaaacttttgcatgttgtatacatttcactaactagttagaacaacttctggaatattggcattaattaatgtcactcagcaattattgatttcaaagaaattaaatacctgaatcacaagggtattttggcatctaatttaatcaagctctttgtatcatcatctacacgttaattacttaacaaacatttctctgtgtgagaaagtttgagcaggttattgtgctttgttaatatgcaacttttgcttaatctagagataggcaacgctycctgtaagggacaaagagaaaaatgaatgagcaatagagatgtgacaggcatggaaaaagacaatacatttataaaacaaatagggccacagatgacgataatggggataaatcttgagatactgactcagtttacaaccgcactgtataatagagcaaatcatttgttaatttttttacaaatggaatttaatttaattaagatgaataaagtattttaaacaaggcttgtcatcttaaaataaaatagtggaataaagtgataaaaccaatgtaaaaatcataaacattgtataaagaattttttcaggtaatttaatattt

SEQ ID NO: 691323 - DNA, 283 bp, Homo sapiens
tggtctgcaaccaggtctgggactgggtgaagtattccaccacggagtagaaactggaaacccaatttggctttgggkgcgtgtagtgttcagaaattcagctttactagtagtattgatctctttctatagtttgaggactcagagaggagaaagggcgtagttattttacatcattaaaccccaacaatgaccacttctaaatccatttattcactggtccttaaatatttgttttaaccaggtgcctgtatgagtcccccaaaatgtgacaatcttgaca

SEQ ID NO: 691324 - DNA, 620 bp, Homo sapiens
gtaatgaagtggtgtttcacacactaagcctcacaacccacagacctggtgrgttctgaaatcaatttagtgggtctcgaccagcattttaaaaaaattaacagctggagtagaacagaatagaaaacatcccacctagcagggtgcagtttcatgaaaacctttgttttattgtcttgtttgggtgtgtaccaaattgtacttcttactgtgggtcatggtcaatattgcattttatttgtaggataacagatagaaaagaaattataaatataaatatataaataaatataaaattattttttatgtactactaaagatcaacacatttatctctggagaaaaggggaaaagaaccaaccagtccaaagaacatatgcatctgtccctacgctgccttctgaccacaggacaaaaccccactgtggcggactccatgggtggctgataaacactattcccaaccacttcttgcttcactggccactactacagaggcagaaaagctgcgcactcattttctctgctgctcttgaagtgaggggccaccacgtgacccacttttggcccctaagatgaattcacagctgaagtcaactagggcagaggggtttctgaag

SEQ ID NO: 691325 - DNA, 2271 bp, Homo sapiens
tctttgctcattttacccatgagtgaatgatactaaaaaagaaatctttttacatgacataaactggttttatttattataaaatgtttactctttgacttaaatgttctacgtagaagtcaatatggaaagttgtatatttttaagtcactataaatgttcatgtgcccgttagcataaacgtgaagtatagttttacaaacattatatttaatatgtcacataacttttaaaatgtatgttgacatgcagtcagaaaactgagttgtttctagaatctattacattttagttatgtgacctttactaatttacttaatataatatctctgagtctcaattacttctagaatagaaataatagtatccttcttagaagttttataaatattaaatgggagcatagacacaaaatttaataatttttagtccatataaaattactcttcacccagtgtatggagagtattttaagtactctacatacagtttgaatatactatgtttctgtatatctcaataatatggtttggctctgtgtttccactcaaatctatgtcaaattgtaattcctaatgttgggggagggacctggtgagaggtgatgggatcatggggtcagatttccccattgctgttcttgcgatagtgagtaagttcccatgagatctgcttaaaagtttgtatcaattcccccttcactctctctctcctgccaccatgtgaagacgtgtttccttccacttcacctttttgccaygattgttaagtttcccaaagcctcccagccgtgcttcctgtacagcctgcggaaccgtgggtcaatcaaacctcttttcttcataaatcacccagtctcaggtagttctttatagtggtatgagaatagactaatacactcaataaaacgtgaaaatgtaaaatatgaaaataatagtacctgctccatagggttgttttaaaacaatgtgcaaacatggactcaataaataataattggtaaatttaacttataattattgttacagaaagctcaatccccatgtgttacacagtgggactttgttatatttatatataaaccaatcaaataacatatcctgaaagaaaactccatcgaataaaaaatagatataggctgagcacggtggctcatgcctgtaatcccagcgctttgggaggccaaggcgggcggatcacgaggtaaggagatcaaaaccatcctggctaacgcggtgaaaccccgtctctactaaaaatacaaaaaattagctgggcttggtggcgggcacctgtagtcccagctactcaggagcctgaggcaggagaatgtcatgaactcgggaggcggagcttgcagtgagccgagatcacgccactgcacaccagcctgggcaatagagcgagactctgtctcaaaaaaaaaaaaaaagatataatagagtttgtctacatacagtactaatctacattgtagtgaaataagaatggtaggatcatttttagtaacttataaatgtttatcaatattggtgattgtcaaaggccaaaaggatatggtataaatctagttgctaattttcctgcacacctttctcccatctgcttcattccataaaatattttacagaaaaaaaggatttctctggactttttttcaatctaatgatggcacagattaggcactgattatctgcgatgcaaaaaactgcctggtgaaaggttatatattccatttaatgtctctgcttcgaaaagaaaatgaaaatattaatcgtttgacttaaaattatttctagaaaaagaggggatgtttttctaatatttgcagttattacttagattttttaaaaggcattttttttcaaagcagaggttttgaacaaggatatttcaaatagtgatagtaattgaatagttcaagcctagtaaaaataccaattgtgaaaataatatatgggttcattttctaaaattcacaattttttcaaaaatattatggtattattgtaaagtacagtctattggatatctaacttacaatgtggcttttattttgcagcttaattataattgacaaaaatagattttaatttttttaatcagtgtaaaccaaattgagacagaaacaacaggaacaatcctaattgttataacatagccacacagaagaaattagattttgaaatccaacttttagaattagttccagcacaaagatgtgtttataaaaaactataagagaaaatgtcatttacaggtagttaaggc

SEQ ID NO: 691326 - DNA, 1111 bp, Homo sapiens
cactaacatatacacaaactcacaggaggaaatgttacgtcccatccaggcagtactggagccccagcagggctggttcttccttgactgcactggacccaggcactgatgtggtgagaatgcaactctkccattctgctgcccctcagacacatgcagaaaggatttgcccacaactgccaactccacatcaaagctcaggatctgagaaacgtgtacggggatttcataatgcttgtgaaatcaacatcctctttacctcctctgagaagcatactgagggacagcaaggggcttttctctggttatggtcagatggtgaaaaccaatggttttcaatattaataataaagtgaccgggagatgaggtcggggacagcaaccagcctctcaccccttctccagcacctgcttgcccaagctccttcctcaccctctgtgctgtgatcatgcccgccttctgctagtccctaagatgctgtgccatctcactggcctctcagcgtaacacatgccatgcctttacctggaatggccctcgtctcttcccctctctgtggtaaattctggctagtacttcagatttcagcctggctataacatccattgggatgcctgccctcacctctcaggctgaattgccagactgcattctcttatggaaccatgtacctctttttccttgcacttttaatggctgtactttttcatatacagttgacccttgcacaacacgagtttgaactgcacaggtccactaatacacagattggaaaatacataatttatggaatgtgaaacctggatacttggaaggttgacttttcctacatgtgggttccacagggccagttgcaggactggtgcaagcacagattgctggaaccaatccccctcatataccgagggacaactgtatttgcatagtggtataatgaatttctgtcccctttctacactgtagtggccatttggactgtaggtccattcattgagctgtgtcttattttgatgcctatgacattcccaaacacagagctttgcaggtagggaacactcagtagatacttctttcatcaagaaagaatacacacaaaggggtccagaatga

SEQ ID NO: 691327 - DNA, 1111 bp, Homo sapiens
cactaacatatacacaaactcacaggaggaaatgttacgtcccatccaggcagtactggagccccagcagggctggttcttccttgactgcactggacccaggcactgatgtggtgagaatgcaactctgccattctgctgcccctcagacacatgcagaaaggatttgcccacaactgccaactccacatcaaagctcaggatctgagaaacgtgtacggggatttcataatgcttgtgaaatcaacatcctctttacctcctctgagaagcatactgagggacagcaaggggcttttctctggttatggtcagatggtgaaaaccaatggttttcaatattaataataaagtgaccgggagatgaggtcggggacagcaaccagcctctcaccccttctccagcacctgcttgcccaagctccttcctcaccctctgtgctgtgatcatgcccgccttctgctagtccctaagatgctgtgccatctcactggcctctcagcgtaacacatgccatgcctttacctggaatggccctcgtctcttcccctctctgtggtaaattctggctagtacttcagatttcagcctggctataacatccattgggatgcctgccctcacctctcaggctgaattgccagactgcattctcttatggaaccatgtacctctttttccttgcacttttaatggctgtactttttcatatacagttgacccttgcacaacacgagtttgaactgcacaggtccactaakacacagattggaaaatacataatttatggaatgtgaaacctggatacttggaaggttgacttttcctacatgtgggttccacagggccagttgcaggactggtgcaagcacagattgctggaaccaatccccctcatataccgagggacaactgtatttgcatagtggtataatgaatttctgtcccctttctacactgtagtggccatttggactgtaggtccattcattgagctgtgtcttattttgatgcctatgacattcccaaacacagagctttgcaggtagggaacactcagtagatacttctttcatcaagaaagaatacacacaaaggggtccagaatga

SEQ ID NO: 691328 - DNA, 1449 bp, Homo sapiens
tttgtatcataaagtgatctaagagattgtgagtcatgccttcaataaccattagattcctagtactctgagataacttcattgaacatctcaaaatattgaacacagagaccaaaaaatgatcttctattaagtgactgttgatcactccttatgctattaggtcatcgtttagcagatcatttgcaatacacaacaaatttacttattgtggttactgctcaatttcacatggatgtctggctgattttactgcagcctgggtgggctgtggtcagaagagcacactgctgtgactgtccaccatgccactttggctgtcttggcctgtgcaggaatgggtgcctgtgagattgtcagctagggctgggggctttctcaggtatgatttcattgtttattctgtcaaactatggtcttgtttggaggtgctggttgcatctatgacttagataacacttgaaatggcacaaagatgaaagtcttgactttcagactagatattagacacattacagaaacaccgtgtcacacaaaagggaagaattacatagatgaacatgtaaacaagattgtttaagttgtaccaaactctctcattcttatttcccctgcttatttcctacagactccagttctgtgggtttgaggcaaatttcatgccatttgatggatagtcactgtcctcttaacttaatgtaacctatattaatttaataaagtttgtgaattcaaatgggaagtaaattctccatatacacatgaggcagagaaagaacattaacagataatagtgggattttgattgagagagagctgctaggaatagtagccataagcctgaaaaacaaatgaccaaattttgatctctcttcatccactggaggataatttatattatttttgtagtctttaccagccattgagaaatgttgatttttatgaagttccattgtgacataatttcatagagagaagtctgttccacctccctctatacacacacacacacacacacacacacacacacacacagggggcttaaacaagttcaagtcgcagtattcattttgaaagcatgttttattactacagttcatagtcttggtagaggagaatattctatttgtatttctgaactaagggaagagargcttattagaaattggctttttactgtggaatcaaactagatgatattaagattgaacaactggtgaacaacaacgagaaaagtatttcagcctatacagcaggttattcctcatctaggaatctttgagtctaggtgaacctggctttagggataaaatagcctttcacaagaaagataaacccctgtgaaaatttagtagtaactcagccaactgtgttgatatctccaaattgtgatgttctcaaatgaggtaagcgatgccaaagaatacagaaagtcactgttctgtgata

SEQ ID NO: 691329 - DNA, 1880 bp, Homo sapiens
caatgagctagcatcttggggacagagggatagtgtctgaaacctggcctttctggagaatgactaccagcactgtacaatcagtgtagtcaggagtcagagaggcagccatttgcttgccttttctaccaaaaagtgatggttcaaaaagccygactccatgaaatagcacgagtgcagcaggagtcatggtggtagtaaaaacatacacttaagcagcactcacagcgtgccagctactgtccatgtaattcatttgattctcaaacaaccacacaagcttggtactgctattcccatttagcagacgaggacactaagatgtaaaatggttaaaagcttacctgctgtcacacagcagtggcaggattcactgcctggaattggtgcttttagctactacatagctagccagcccctggcctgtggatggtaacatttgctaatgactagcatttcatgaaggctgtgtgcatgcatgtaggtgggcaaaagtgcgtgcaggcttcactctgctaagagctgtgcatgcttttgttcatttattcctcagaacgatcctgtgaggttactatagacatttccccttaatgtcagtgaccagttactgaaaattctatattctgactaaaagagctgatgacgagtctacttccttttgttttaaataacaaagattacaatgcattgtgctccaaccccaaacccccaaccaatttcctcaaaataattaaacctcaatgaaaagcctacatataagaaaccgtcatgctaggatactacaaatgcttagaatcgtttcctgatcaccccacaagtgtttggttgttactcagcagttgttttgtgtgcagtagcactgatggcttgcttagtgacagcaacatcccacatggacagtggacaaaatatctccccgtagttctgcccaccaaccagttatatttggaatgtaacatgagagtttgttcacacatagttttgttaaaatcccattgaattttggaattgaaatgtaaataagatttttttttcctacaaaaacaatagctgaaggctttgtacaaactttggtattggaaatctacaaacattctcttggggaaatgttaaccagtagacctcctgtgaagagtacctatgctactagcatccccattttacaggtgagaacagtgaggattcgctagaagtagcaaagcagggattggtactccaaacttctcttacttcagagccttcacccttaaccactatactatagtgtctatcattattgtcatcattataatgtcaaaatggcttcattagaatgctaccgttatctttgttgttgttgctattattattatcattatttgacatttacttaacactcattatgttccagttactgtactaagtactcaatatacattgttttatttacttctcacatcaacctctgatagaactttattatcctcagtttacaaataagaaaattgagacctagtgaggttttggatcttgcccactggacaatcaactgccaagcctctaccgagtgcctactatgtgctcatccacataccagggttatttagtgctttaaaattgacatgttgtattattggacagagagcttcataatagtaggatttggttcatggctgtgcttcaaagacattacgtattttactatttcatatttcaattttctttctataataaaaccatgcaattgtatcatgacctttgtctcaccctaaataatatggtataacttatattttatacatttattcagatacacatatgtgttgttgctaagtttgagtaagtctgaagtcagagacccagtgactgatgttgtcccagaaagtagaattcttgtgatg

SEQ ID NO: 691330 - DNA, 627 bp, Homo sapiens
gggcatttctacttcctaaagaaattgttgaagccagccctgagagtaaaggttaactgggtgtgtacattgggagagatttgccatctgtgtttgcacttagaatttccgactctaggataaagactagagcagtgcacggctgcaacatgcagaacgtgaaaagcctctgaaatgcaccatgtcggtgcccaggctcattctgctctgccttaagtgtccttcgttctctggaccacagccttcccaagaatgaggacctgttcttgctccctgctggacccctgcctccagcaagatgctgagtacacagacgacccataggtaaatgcttgctttttaaaaaaaactttcaagtgatattatagtcagcagttagagagaaatatagaagagtaacacctatgcraatcgtttgtttgtttgtttgtttgagacagaatctcactctgctgtccaggctggagtgcagtggtgtgatctcagctcactgcaacctctgcttcccgggttcaagtgattctcatgcctcagcctcccgagtagctgggattacaggtgtgcaccaccacacctggctaatttttgtattttctgtagaggtgaagtttcaccatgttagccagg

SEQ ID NO: 691331 - DNA, 657 bp, Homo sapiens
atcactttcttttcccggaatctccaattcattgtacatggaaaggatgactacaccaggaacagccaagggaagaccatgcgcttacgggtctgctcatgcagcaaggcagcctggcaaggcaagccactgggcttggttccctctggccagggagatacccacttcaaagtcaaacacctgggtggcagatatgatcagctgcagcagacctggcccamggcagatcctcccagaagagctgcacatgaggtgattatgaggagggaggggagggagaaggagacagggaaacattaaggaggggcggacggcactctggagtaatcacgcacttttttccctctcatttcctggaatctcaggaccttagaatatgtgggagtcagccctggagtggagaataccaattttttctcttcatcaggcagatggcgaggctggaaaagccatcttctgttgttaagccactgctccttgactctcaccaggtttcgtgagcaggcttagctggtcaggtctcctgagggtgggctgtgaggtggggctggcactttcccatctgatttggcaggtcaactccaactccttctcagcagggccaatacccaaaaaagccccctcggtagacagaggcctcaggggagagccaggctg

SEQ ID NO: 691332 - DNA, 605 bp, Homo sapiens
ctcttcaaggacctccctgagctgtttgacagttaacttctgattttttttttaaataagtagaaggaatacactctaaaataatgataagaagtgtagtaaatgcataaatcagtatcatagtcatttattaccattatcaagtattacgtgctgtacatatgtatgtgctatactttcatatagtcatatgcatatagcagtgcagtaggtttacaccagcatcaccataaacacgtgagtaatgtgttgtgttatgaaggctgtgataatccttaggtgctagkaatttttcaccaacatagtcttatgggaccactatcatttatgcagtccattgttgactgaaatgtcattatgcagtgcgtgattgtattgatacagcaactagaatggatcccaaaagaattgcaggcacacctaggagatactgcgagttcagttccagacaaccatgaaaaagcgagtcatatacatttttgggtaccctggtgcatttaaaagttaggtttactactgatgttatcatttgaaaaaaaaaagagttttatacaattctgtagtctatttaaagtgtgaagagcattatgtctaaaaaatgcaca

SEQ ID NO: 691333 - DNA, 638 bp, Homo sapiens
ctggtgggaagaacatgggcattgtagttgagtaaattaaaatctctaatccactctttcaagtcatgtgatcctgtccgagtttctctgtgtcttggggcctcagtttcccttagctgactagggagattgtaatgcacatcacacaggtgtagtcgtgaagaaatttcctggcctaatgctttcctggtagyaggtgcataacgtgggttacattccacattatgccacctctacgtaggaatccacatctagcttctgtggccgtggaagagagaaggaccatctttcagagcgtggagacgctggtcatcatccagctcgtataagtcacaggcaggtgctggagcctgaaaccgttaagttttaagtgagtttagcaattgagattgttatttacactgattagtcctgctggcgattaaggggaatagccaggggagacctgtattcactagaaataatcctctggaaagtgagatattaaataattgcatactttagaaaaatgcataatttcttgtcaccagatccattgcagttttacaagtgtattttgcagaacattaattcctgggttacttctaataaaatagagagtagaaatgatttctagggccaggcacagtggctcacat

SEQ ID NO: 691334 - DNA, 638 bp, Homo sapiens
ctggtgggaagaacatgggcattgtagttgagtaaattaaaatctctaatccactctttcaagtcatgtgatcctgtccgagtttctctgtgtcttggggcctcagtttcccttagctgactagggagattgtaatgcacatcacacaggtgtagtcgtgaagaaatttcctggcctaatgctttcctggtagcaggtgcataacgtgggttacattccacattatgccacctctacgtaggaatccacatctagcttctgtggccgtggaagagagaaggaccatctttcagagcgtggagacrctggtcatcatccagctcgtataagtcacaggcaggtgctggagcctgaaaccgttaagttttaagtgagtttagcaattgagattgttatttacactgattagtcctgctggcgattaaggggaatagccaggggagacctgtattcactagaaataatcctctggaaagtgagatattaaataattgcatactttagaaaaatgcataatttcttgtcaccagatccattgcagttttacaagtgtattttgcagaacattaattcctgggttacttctaataaaatagagagtagaaatgatttctagggccaggcacagtggctcacat

SEQ ID NO: 691335 - DNA, 1108 bp, Homo sapiens
ggaatccaagcagcacctagtataataaatacagctgtctttcccttgcttttccttgaaaatctcatctagtcccagtcacccagaagatcacaaggaccaatgaattggtgataaaataaaagctcataatgtcagacccagctaatatagattgttgatcatctgtacaaaaaccaatgtaaaaggttacaaaatcaatttcaaggctatcctgtaagaatagagagagattgaaaaagtaaatttatgacttaattaaggttgcaaggaaaactgtttctttaaggaattacattgtttgaaagcactttataaatactaacttatgtaagactagcaataaatcattcttaactgctctttaatcaaatgttcagtccttcattccatagttccttccatagggaacccttggtcggcttcgttaaattctgctcaaaatacatgctttccacacccatacttccctatttggatgttttactgattcattttgattcttctctacatagtctaaatcagcaaatatttaccatatgtactttttaaagagttgaaaggaagttatccctatattctagcgcctcatgactcgtgtctcagcatgaaaagtattttttatccagattacttaaatcaacattgcatgccaacatttcccatctgaaccttggcctgcccgtttttcctggcaatgttgcttaacacccactgaccatgtagtctcatcatttttaatggtgatgaggcagatttcctcctagttcacattgaatagtctatgtcactgatcttgctatttggatgccatgagctaggactagggactcgtttcaatggcctgtttctctatcacccaggaaatcacaaggctcaatgaattgctgatagcaattttggtactgaaaagtagggcgggctataccaaatatgtaaaagtgtggaagtgmctttggaattctgtgatgggtagaggctagaagtgttttgaagcacttcatagaaaaagcctagattcacatgtctgaaattgttggtagaaatacagacattaaaggcaattctgggccgggtgcagtggcttatgcctgtaatcccagcacgt

SEQ ID NO: 691336 - DNA, 1108 bp, Homo sapiens
ggaatccaagcagcacctagtataataaatacagctgtctttcccttgcttttccttgaaaatctcatctagtcccagtcacccagaagatcacaaggaccaatgaattggtgataaaataaaagctcataatgtcagacccagctaatatagattgttgatcatctgtacaaaaaccaatgtaaaaggttacaaaatcaatttcaaggctatcctgtaagaatagagagagattgaaaaagtaaatttatgacttaattaaggttgcaaggaaaactgtttctttaaggaattacattgtttgaaagcactttataaatactaacttatgtaagactagcaataaatcattcttaactgctctttaatcaaatgttcagtccttcattccatagttccttccatagggaacccttggtcggcttcgttaaattctgctcaaaatacatgctttccacacccatacttccctatttggatgttttactgattcattttgattcttctctacatagtctaaatcagcaaatatttaccatatgtactttttaaagagttgaaaggaagttatccctatattctagcgcctcatgactcgtgtctcagcatgaaaagtattttttatccagattacttaaatcaacattgcatgccaacatttcccatctgaaccttggcctgcccgtttttcctggcaatgttgcttaacacccactgaccatgtagtctcatcatttttaatggtgatgaggcagatttcctcctagttcacattgaatagtctatgtcactgatcttgctatttggatgccatgagctaggactagggactcgtttcaatggcctgtttctctatcacccaggaaatcacaaggctcaatgaattgctgatagcaattttggtactgaaaagtagggcgggctataccaaatatgtaaaagtgtggaagtgcctttggaattctgtratgggtagaggctagaagtgttttgaagcacttcatagaaaaagcctagattcacatgtctgaaattgttggtagaaatacagacattaaaggcaattctgggccgggtgcagtggcttatgcctgtaatcccagcacgt

SEQ ID NO: 691337 - DNA, 1108 bp, Homo sapiens
ggaatccaagcagcacctagtataataaatacagctgtctttcccttgcttttccttgaaaatctcatctagtcccagtcacccagaagatcacaaggaccaatgaattggtgataaaataaaagctcataatgtcagacccagctaatatagattgttgatcatctgtacaaaaaccaatgtaaaaggttacaaaatcaatttcaaggctatcctgtaagaatagagagagattgaaaaagtaaatttatgacttaattaaggttgcaaggaaaactgtttctttaaggaattacattgtttgaaagcactttataaatactaacttatgtaagactagcaataaatcattcttaactgctctttaatcaaatgttcagtccttcattccatagttccttccatagggaacccttggtcggcttcgttaaattctgctcaaaatacatgctttccacacccatacttccctatttggatgttttactgattcattttgattcttctctacatagtctaaatcagcaaatatttaccatatgtactttttaaagagttgaaaggaagttatccctatattctagcgcctcatgactcgtgtctcagcatgaaaagtattttttatccagattacttaaatcaacattgcatgccaacatttcccatctgaaccttggcctgcccgtttttcctggcaatgttgcttaacacccactgaccatgtagtctcatcatttttaatggtgatgaggcagatttcctcctagttcacattgaatagtctatgtcactgatcttgctatttggatgccatgagctaggactagggactcgtttcaatggcctgtttctctatcacccaggaaatcacaaggctcaatgaattgctgatagcaattttggtactgaaaagtagggcgggctataccaaatatgtaaaagtgtggaagtgcctttggaattctgtgatgggtagaggctagaagtgttttgaagcacttcatagaaaaagcctagattcayatgtctgaaattgttggtagaaatacagacattaaaggcaattctgggccgggtgcagtggcttatgcctgtaatcccagcacgt

SEQ ID NO: 691338 - DNA, 669 bp, Homo sapiens
aaatacaaaaattagccaggcatggtggcgtgtgcctgtagtcccagctacttgggaagctgaggtgggaagattgcttgagcttgaggaagtcaaggctgcagtgagctgcgagctgtgaatgcaccactgcactccagcctgtgcaacagagtaagatcctgtcccccmccaacccaaaaaaaaatcctgaaaaggcagcattattactctccttgttagttgtggggactggcttccaatctcctttctcctttaagaccatctacctccatgtctgtattttttcctcttcatcacctcctctctctaaggagactgttattctgtttattctgtgagatttatttcttctgactttctcccaccaaattcagaggacagaagtgctagagcaggcaaagagacaagaaaaggcagaggaatttcagcatctccaggtctctgaaaagcatgagagcatgaggaagaaaagactggaatctcagttccaagttcacccttggagttgtgcaacaacacgtggtcagacgagatagaaatataatggaagaaaaaagagggtgggctttctggagcacagaaaatggctgaccccagtaaggctcctaagtgactccgcagatagttatttcatcattcatttgcacaggaaagacccaggaaacc

SEQ ID NO: 691339 - DNA, 669 bp, Homo sapiens
aaatacaaaaattagccaggcatggtggcgtgtgcctgtagtcccagctacttgggaagctgaggtgggaagattgcttgagcttgaggaagtcaaggctgcagtgagctgcgagctgtgaatgcaccactgcactccagcctgtgcaacagagtaagatcctgtccccccccaacccaaaaaaaaatcctgaaaaggcagcattattactctccttgttagttgtggggactggcttccaatctcctttctcctttaagaccatctacctccatgtctgtattttttcctcttcatcacctcctctctctaaggagactgttattctgtttattctgtgagatttatttcttctgactttctcccaccaaattcagaggacagaagtgctagagcaggcaaagagacaagaaaaggcagaggaatttcagcatctccaggtctctgaaaagcatgagagcatgaggaagaaaagactggaatctcagttcyaagttcacccttggagttgtgcaacaacacgtggtcagacgagatagaaatataatggaagaaaaaagagggtgggctttctggagcacagaaaatggctgaccccagtaaggctcctaagtgactccgcagatagttatttcatcattcatttgcacaggaaagacccaggaaacc

SEQ ID NO: 691340 - DNA, 1101 bp, Homo sapiens
tggtggctgtggtggtggctgtggtggtggctgcggtggtggctgtggtggtggctgtggtggtggctgcggtggtggctgcggtggtggctgtggtggtagctgtggcagctgcaccacctgcaggtgctaccgggtgggctgctgctccagctgctgcccctgctgccgyggctgctgtggaggctgctgcagcactcccgtgatctgttgctgccgccgcacctgccactcatgtggctgtggctgtgggaagggctgttgccagcagaaatgctgctgccagaagcaatgctgctgctaggtggccggcctggttccacccctgcccaggagctgtgggaaccctcactgtctcctgctggcaaggctctgcttaaccccattctgtctaatcctttttctaacctatctgtcaccagcagatccccttggcttctgcctcatgtgccttgtgctttgtccttctgggatcttcctttgcccacacacggcaccaacttgcccagaccacacaatgtgaaacaaacgggcaaccgagcagccggtgataaccagataaagtcagagccaaccaggaaacttagtactttattattttgtaatgttcaatctttcctaaatagtcagtcctggatttcaccatttttctgttcactgtctgtgtgcaatcttttccattgcttttgtctatatttgctctttaaaatttcccagtaaaatgacttggtatgtcacaaaaatctcttcattagtcattttttttttaatcggttccttcgtcggcttatccatccctgtgctgtgagtccagttctggccctcacactcctgcaacctcctgaagctggccatggcccagccgctgaacttgtagctgttgatcagagaggcacagagctccctgtgctgctgctctgacatgatgtcttacctgtggggtctgtgtactcggactctcccaaggattttctagggtgggatgagggtggtgtgaattgatggtggtgataggtctctgtttctccttgaaatttatctaggaggctgggtgtagtggctcatgtctgtagtcccagcactttgggagcccaagatggg

SEQ ID NO: 691341 - DNA, 1741 bp, Homo sapiens
cacaaatgtagtcaactatyccctactgtaggggaatttataggcagggcttatagggatttgcaaagcaagtgagaatactagcagattgaaaaatgaaaacaatttgttgggcacaatcgaactacagaaatatcttctttaaattctgactatctttttttcttttttcagtattaagtccatctgagaaactagagccttgggacccagggatgaggaaacttaccgtacagacatgcgggctgaccttcattcaccctgcgggccatggcctctgccatccaactgcagaggcttcagccgaaactctctccagcactgccctaaacagaccaagtgtgagggagggagcatgtaatgaaaagtccacagagaacaagaagccacaagattcggtgctctggagccattctagatggtttcaggggaactagcttcccacctctgacagggataccatggcaaataccactctttgcctaggattataattctttgtgcacaatgcatcccatcccaaagacagtccacagcaggacttgctccatctctgaactggtcttacccccttaaacctgcctttatatctaggagtttctttattttattttatttttttgagacagagtctcgctccattgcccaggctggactgcagcggcgtgatctcagctcactgcaacctccacctcctgggttcaagtgattcttgtgcctcagcctcccaagtagctgggattaaaggcacgtgccaccatgactggccaatttttatatttttagtagagatgaggtttcaccatgttggccaggctggtctcaaactcttgacttcaagtgatccgcccgcctcagcctcccaaagtgctgggattacaggtgtgagccaccaggcccagcctatatctaggagtctcttgatgagcattggtcgacagaaagaagtctcttctaaaaattgttaatgcttttatagactactcatagtctgagtcataaaacatcatttgcctttcaatttataccttccaagtgaatatgattattgaggattatctaattattatctacgtttctctctagatataaaaaacaccatagatcctatacacacaaaaatggtttttctatcagaaatggactcactcgcctggcaaaaggacacagattagattattctaatctcaaggccccttaggcttatgaattcaaaaaaaaaaatagaagaaatgaacaaaaacttaaatcacagtttgttattaagtaatatctgaaatgaattagaaagaaaccataagccttaacaatactccaatcacagttaaattaatttagacagaaaagcaaatagcaattgacttgaaaataagaagtggagccgaaggtggatacaagaaatccaggagggctaagataaatcccaaatccaatgttcatcaatgcctacacattcagtacaacctgatggcattaattctgtggttggggaaatgtgaaagtgaaatcgataataccacagttctaaatgtgcactgttggctgaacttatggtgtggtggggggtggtaaaaattaggcttctaagaaaggatgggactctgccctccaggcaaggagtaaatggccccagcagatggaaaactaaagcaaatgtaatcacctgcattttgaaaataggtgtgtttctgagaatttgtttgaattagttctttgtaaataaaacaggattttgaatgca

SEQ ID NO: 691342 - DNA, 437 bp, Homo sapiens
gagcaaggcacagtagatggcttggactgtggtgggaggagccttcatgcttcacctgaacagaaggaaaggaggaggagatggagatgcaagcacaattgcagagtttgggaggaaaaatgatggcatttgtactacctaaaactttgcaatacacatggctgctttacatttaagtatctcctctttagcctcaccacaaccgtgtgagaaaggagagtagttattattacatttaaatcataaatgaaaaaactgaggtcagatacarcaaatgactttctctagatgaaaagctagtaagtggtgatacggggcttgatttccaatttaggtttcttttgtcaaggtcaggaaaacagtcaaactcaatgtcactagacatgtcaaaccttaattcttagacctaacatgaagcaaaaatattgctggcttca

SEQ ID NO: 691343 - DNA, 1549 bp, Homo sapiens
ctgggctcttcatacccatccctttgctgagcagctctccatgctggagtactctaaataaagactttgctacaaggctcataatgttccttatctctcktctcatggaaatttgtcaggtgactctcttaggtccttgttctttgctgggtttaataccataaaccactgtgatttagggtgttaatggttatcagtcatcaaatgccttgtttcatcatcctttgcatttgaagaatacttttcaatgttttgctgcaaaggaaggtgtggtggatgtggcagtgcattgccctggttctctattccacatggaagaattcattctccagctgctcagtgttggctgctgatggctcacagctgcatccctctccaagaaccacaagggctgccttgcccaagtttgtgtccttttcctgggggccaagcacgttcaatgactagtgaaacaggagtacaaaggctataaagaccagcaccccttgctgtacatggggaatctctgaaaggcacctcctttgcagttgcagagttccctgtgagtttggctaaagtttctgtgatgagtgcattgcagttcaacttctctctctgcccaactggattcccccattccttatgaagttgtgttgctgatccaccaatcccactctcaacatacacaacaaaactcctgcatgaaaacctctgacctaacacagttggtgatagaagtgttcctaggatgcagtctctcaaatgaggttttggagctatatcacccactagcttgctggcaaggaggagcccatgagcaatgctaggtcactccctgggctgcagtaagtagaatgtttaaaactggaataagacatcagtggaagggaatacatcaacttgtgcaatttatcagatgtttggcaggtacaggagaagtagtgaatataagtactgtagaatcagatggctgacactatcaatgcattggagaaagacaatgaaaaataaaaagctgaaagtgattaatcactaatttagggagaagtggagaatgcgaaggcctccttggcagcacagaaagagactctaagtgttcatagctggagagcacatagtgcagaggatcaggcctagggtattagaacttcatagaaggttatattctaagtctggtcaaattttctgtgccaaagcctgaagcacaggctggtttggattgagtgagcccctgagacttgggatcgtgacatctgggccagcacacacaagaagcttaaatctgcccatctccccacactcgctggctctctccttcctattaatggctggtattccccccttgcttgaagacaatgcagaggcctctacctgatcaataccaggtgctggcttcgagttgaaaccccactgctcctcttggctactagaccaataaatgttgtcaaactgcaacataacttggcccatggggtgctgattctgctgagaaaaaaatagggactcttccagaggagctgcaggacttaaccattacatacctgcagagccaggatacatatgtgggttt

SEQ ID NO: 691344 - DNA, 603 bp, Homo sapiens
taattttctaaattctaattctggcatatctccttgaatataatttagatgatttctgtgtacactaatttaacatctccagataaatgtttcttccaattccactcagcctggctatccttgtttgtttcaacttattcattccttagttcattcatgtatttaatacacttttaccaagcacacacrtgtctgtggctctcagtgggcatcttctagttctaggagagggttctggacactcttttctctttgactttcatattctggccatacatgctgtcaaaagtaaactttaaggcaaattaaatttaagagtttaattgagcaaaggacaatttgcaaattgggcagcccccgaacaagcattggttcagggaagcactgctgttgctatgtggtcaaagatttatgaacagaaagtgatgtacagaaaacagatgtggaatatagaaacagctgatgggttacaactcaacatttcccttagttaaacatggtttgaatagttggctgcccttggttaaaactcagtgattggcaaatgagtggctacaatctgtttacatatcccgttagggtacagttcagtatgtagggaga

SEQ ID NO: 691345 - DNA, 1972 bp, Homo sapiens
tttagattcattttatacacagactaaggtctagagaggttaagttggttcttaaccaaccctgtctcacctatactccttacagatgcagtgttgtgtaggagcatggacctgaatttgaatctcatcttcactacaaattagctaagtgactttgtgtgttttagttaaaatgtgtgagaatccttttcttttttttgaaatgaatttttttaaaaggtgaaaatatatgcttaccaaaaggttgtggtaaagaccaaatgagatttgtgaaacatttattacagggcttagtacattataaatcctaaatgaaaggcagttcccattatgattatcattgtggccattattaatttaaggatgcttttagtacttggtagtattacaaaaagtaaaagacaaaattccttgctgcaaggtgtttaaaataaattattctataagttttcctttaacctgccatcattattgctgagcgtaatctataataaaaaatgtcagtaaccttagttccaactcattagcctttgttttgcctctagcaattatcagcctagttactcccatttccattctcaccttctcttctgggccttcacatgactgaggcttcagttcttccttgatagtgattttggctcttcttaaaggttgtgctctgggggactcctttcttctacccaggcatatatcattcctcctcgccccttctctttccctctgcttcctagaggtaatccataatgtgatgtgggttagtcagaaagagaggaatatgtctcctgagaaagtcctttttggtctcagaattagtggatgcatactgtgtaccagaccctgtggaaatgggtcatgtctgctttgcaaaccactgttcagaatttgagagagtacttggagcatagttgatacccataaaacagttgccgaatgcatgaattttccaactttgtcttttataacaaccccaagaggtaggtgttgttatccatactgtaataaaatgtgcaaaatgaagcttggaatcctgagggaatgtgcgcaaggtcacgtggtagctgctaagaggctgtctccagattctaatttaagcaatctgactctggtgcctgccactcgatcactacaaaacatgacctcccacgatgcctttgggtcactattggaagtctgtgaattctgagagtcagacatggccatggttagagttaaaagttagattggactgtactgctatgttcaaggggaaagttgtgaaatctggcttcctgaatgcctgtaggctttagagtcagccgcacctggtcagagttgaaaactagtctgaggtgcactgctgtgtgcagagggcaggctgtgttctgttgggtgtgatgccatgtagtttcctaccccatatcttgtgctgttttccaccgatgctttggtcatgacctttcattacactaattggagatcattttattaccaaataccctccatctctaaagtatgactatgaaattaaggttgaccctcctcagcatcagaaggtcctagaaccacatttaaaaattcaggaaggatgacatcagcaagatggcccagtaaaatcccctaatgcttgtgaccccaatgccccctccctggcaaataaagccaaaacaacaaataaacaggtacattttgatgaaaatcactaaaggagagcaccagagtacatcaaagaagtcacagaaaccttggtgagcacagaagctcagaatagccgcatagagaatgaatggaaacaccagacctctacaaccccatcctcaagcccagatcagctggcaaccaggaggaatatcgcccttcagcrcaaaggtaagcatgaggaattgagcatcccccatctgcaccttggacaactatagtcctgaccactggagacgcctgtagtcctcacaggcactaagcccagctaaagaagctgcctggaatccacgtg

SEQ ID NO: 691346 - DNA, 1972 bp, Homo sapiens
tttagattcattttatacacagactaaggtctagagaggttaagttggttcttaaccaaccctgtctcacctatactccttacagatgcagtgttgtgtaggagcatggacctgaatttgaatctcatcttcactacaaattagctaagtgactttgtgtgttttagttaaaatgtgtgagaatccttttcttttttttgaaatgaatttttttaaaaggtgaaaatatatgcttaccaaaaggttgtggtaaagaccaaatgagatttgtgaaacatttattacagggcttagtacattataaatcctaaatgaaaggcagttcccattatgattatcattgtggccattattaatttaaggatgcttttagtacttggtagtattacaaaaagtaaaagacaaaattccttgctgcaaggtgtttaaaataaattattctataagttttcctttaacctgccatcattattgctgagcgtaatctataataaaaaatgtcagtaaccttagttccaactcattagcctttgttttgcctctagcaattatcagcctagttactcccatttccattctcaccttctcttctgggccttcacatgactgaggcttcagttcttccttgatagtgattttggctcttcttaaaggttgtgctctgggggactcctttcttctacccaggcatatatcattcctcctcgccccttctctttccctctgcttcctagaggtaatccataatgtgatgtgggttagtcagaaagagaggaatatgtctcctgagaaagtcctttttggtctcagaattagtggatgcatactgtgtaccagaccctgtggaaatgggtcatgtctgctttgcaaaccactgttcagaatttgagagagtacttggagcatagttgatacccataaaacagttgccgaatgcatgaattttccaactttgtcttttataacaaccccaagaggtaggtgttgttatccatactgtaataaaatgtgcaaaatgaagcttggaatcctgagggaatgtgcgcaaggtcacgtggtagctgctaagaggctgtctccagattctaatttaagcaatctgactctggtgcctgccactcgatcactacaaaacatgacctcccacgatgcctttgggtcactattggaagtctgtgaattctgagagtcagacatggccatggttagagttaaaagttagattggactgtactgctatgttcaaggggaaagttgtgaaatctggcttcctgaatgcctgtaggctttagagtcagccgcacctggtcagagttgaaaactagtctgaggtgcactgctgtgtgcagagggcaggctgtgttctgttgggtgtgatgccatgtagtttcctaccccatatcttgtgctgttttccaccgatgctttggtcatgacctttcattacactaattggagatcattttattaccaaataccctccatctctaaagtatgactatgaaattaaggttgaccctcctcagcatcagaaggtcctagaaccacatttaaaaattcaggaaggatgacatcagcaagatggcccagtaaaatcccctaatgcttgtgaccccaatgccccctccctggcaaataaagccaaaacaacaaataaacaggtacattttgatgaaaatcactaaaggagagcaccagagtacatcaaagaagtcacagaaaccttggtgagcacagaagctcagaatagccgcatagagaatgaatggaaacaccagacctctacaaccccatcctcaagcccagatcagctggcaaccaggaggaatatcgcccttcagcacaaaggtaagcatgaggarttgagcatcccccatctgcaccttggacaactatagtcctgaccactggagacgcctgtagtcctcacaggcactaagcccagctaaagaagctgcctggaatccacgtg

SEQ ID NO: 691347 - DNA, 627 bp, Homo sapiens
tctttcttattgtctctgtgagggagatccagtgggccctatctatgrtgtttgcccacaaatcatgatttcggcctgaggtcactgtgagtaagaagagtgaggagttttactagccacagtgaaatgataatgggaaacatcaaggtgcaatgctgatttgatagtcacagagatttgttcagaaatccggcaattaggaatgtgaaggttggcataagcacaacagaggtcaaaaggacagaagggagctgtcttatatttttttgtgtctctgtctccttcagttctgctctgatcttagttatttcttaccttctactagcttttgaatttgtttgcccttacttctctagttctttaaattgtgatgtaagggtgtcgattttagatctttcttgctttctcttgagggcatttagtgctatacatttccctctgcacacctctttaaatgtgtcccagagattctggtacattgtgtctttattccgttggtttcaaagaacatctttatttctgccttgatttcattatttacccagtagtcattcaggagcaggttgttcagtttccatgtagctgtgcagttttaagtgagttctttaatcctgagctctaatttga

SEQ ID NO: 691348 - DNA, 629 bp, Homo sapiens
agccatttatgggaagatgtgacatatgaacagmgctcattatgcaactttgtgaagtaaacgttgccaatggactatagtagtggtggagagtccctgaggggctacagcagagttttatcggtgcgcttttcttgataaagttatgaattgtcagtttgccatctccacccgcaatgcacttctcaccaccatgaccactcctccaaaagtgaatctcagcatctagaacaatacctaggtctgaaagatgtttgatatatgttgattgtttctagcaccaatcatctgctgtctggtgcgtggcttgttatacagcaccatataatggcaatagataactgatttaagaagttgatactgaaagtgaggtctgatatggcaataacctacagtgtatggaatttgttgtggaaacagacattagggagcaaataaactgttataggaggctaaaaatgctcaggagaccatttttaggacgctggaaatatcacaagaaactgttagataaggctggcaaaatggcaagaaagtcactataggaagacagaaaaatagtgacccacgttgtggcacagtgaaatatttggtaatctcatatcctttgactaaaggaattacattca

SEQ ID NO: 691349 - DNA, 629 bp, Homo sapiens
agccatttatgggaagatgtgacatatgaacagagctcattatgcaactttgtgaagtaaacgttgccaatggactatagtagtggtggagagtccctgaggggctacagcagagttttatcggtgcgcttttcttgataaagttatgaattgtcagtttgccatctccacccgcaatgcacttctcaccaccatgaccactcctccaaaagtgaatctcagcatctagaacaatacctaggtctgaaagatgtttgatatatgttgattgtttctagcaccaatcatckgctgtctggtgcgtggcttgttatacagcaccatataatggcaatagataactgatttaagaagttgatactgaaagtgaggtctgatatggcaataacctacagtgtatggaatttgttgtggaaacagacattagggagcaaataaactgttataggaggctaaaaatgctcaggagaccatttttaggacgctggaaatatcacaagaaactgttagataaggctggcaaaatggcaagaaagtcactataggaagacagaaaaatagtgacccacgttgtggcacagtgaaatatttggtaatctcatatcctttgactaaaggaattacattca

SEQ ID NO: 691350 - DNA, 677 bp, Homo sapiens
caataagctctcaccccaaatcaggctatgacatcagattctgatatttatcaagaaaactaatgccaagaataatcaccaacatcaaacttcaggagatggatttattccagataaatgaaaaataaaatagaataatctggaaatgaattaaaaataaatctgtcaacgagggttcaagaaataaagacaaaatgacatccacaaaagaagacaatattacgaaatgagaaaagaaattttcagaaataagagaagatgaagaaacaattacaatttctggaggtgaaaatttattcaaagaaagggacgaagtttgcatagaagacacaatttacatctatcttcattgcagtgaaaaaagaatyaaagtcccatatttttgtatgttttggttcattagcattattaatagcacgagggaaggcattatgttaataaaccaaaataagaaggaacaataagtgccttaattcatgtagaataaagataacaaaaatttcaaatcatgactttttacatcttttcattttttattaaatgaaaagtagattaaaggcatgacatagtggtatgtgtgactttttatacttatctgacaggtaatcacaatttctctgtaaacttttttatccatatatttgaaaacactagtttttatgagatgttatagaata

SEQ ID NO: 691351 - DNA, 1576 bp, Homo sapiens
atttttttcgaatgctgaggccaaggctccaccctgtagtttaagattctctatgtctgcagtagggatgaggaatctccattcttcggaagcaccgctaatcactgtgatatatgtgcaggtctgagaatcactacaggaagcaaaattcaggtcacctttacccctcaatatatggagttttacttccttttttcccataatcagtcattttagaagaaatctrtaagctagcagcagttttctatttattgctgtggaaaccatttttcatgggttgaaaacacagtcctctatgggccacatttccctcagtcagagatgttttgcattgtcttgctgtcaatcattctttcagtagtaatcgcctatcaattttacctctcctgtcaagtgatttttatggcatctatgatttatgtggcaggaactgctttccagagcaaggcatcagttttgaacattgtttacaggactaagatccatctcaatgccatgctagcaatgattatcctgaatgctattgagaaggaatctgaacagcttgagattcagtggcaattctccccacacaatcatcagacaaactcagagtgttggatttctttgccaaaggggtgaaaaaataaatatctcaaagttgaagaaaatttggtttataattcaaaagctattaaatatttttccagctttgttgaggtacagctgacaaattaatagattgtatatatttaaggtatataatatggtgttttgatataaaatatatgtgaaaatccttataaacttatggaataatttccacaatcaaactaattaacatatccatcacctcacatagttacctttttgtgtgtttgtgctgagaacacttaaggtctaatctttgcaaatttcaatcatcaatatattattattaaacacagttaccaggctatattttaagatttcaggaatttatacatcttatagctaaaagtttatatactttgacaagatccccatttctacattcccctggtccctagcagccaccattctactttgtttctccaaatttaacatttttagatttcacaagtaaatagcatcatgcaaaatctataaaacttcatcctatcaatcacaaaatggatttagaagattgcaattcatagaacttcagcaatggtatgaagtgattttttcaataattaaaatctaaccttattagcaaaccttaagtaaaaatgagcaaacacctttggatgcaatttcaaacctgaactcttaaataaattaaagatttattttgactgactcaaaattttgtttggtcattaataatttggaaaaacctgtttacttagatccaaaaacaagtttctgagaagaaattcactttgtgacatacaaaattttgacacatttttttgactaattccctcttgggcatactcccataatctcatcttgaggatatggagtgaatccccagaaaactgcagcagccttgtggaagagtggcctgactattaaaagaaaacaaacagaaaacaacaacaaattcaacaaaagagaccccacaaaaaaccca

SEQ ID NO: 691352 - DNA, 611 bp, Homo sapiens
tatctcaaactgaaaaactaggaaaaatgatataagaatattatttagagatatggaagtaaacacttttgaaagtaggttgaaaattgtcattgccctgctgttttcctagcagcatgtgtgaatccagttgcttctttaaatcatggtacctgtataagtaagtttgatgaaaataaaaactatatgaaaatttaaaacaatgcacttatgactataggcaacattataagtaaatgttataaaaatcacattgagtaaaagaagttcaaagtagtagactgtatatatatacayacgtatatatatatatatatacacacaaatatatatatatatataccctttatataaagtacaaaaagacacaatgtctaatgttagaagtcatgacaggctagtgttttctgctgaaacataattcgagcatttttactacccattataaaatacttaggttctctaagttcagtttttgtctcttctactataactcactaaatgtgtgtcacctggctttgctcatgtcatcttttaggaatttaggcttagaaaactgttgctaaacaatgatgatactgtggctactgctgttgaaatcattatctctg

SEQ ID NO: 691353 - DNA, 658 bp, Homo sapiens
attgaacaggaaaaggaagaagggagaggaaattctgtggaaacagctggtaaaagcatttggttggaactgatgttttgagagtgagaattacgatatgagactggaaatgcagctgggtgccagctgacaggggactttgaatattagaataaacaatttaaactctatcctttaggcaacatcaaatcattgaagcattttaagaaaatgattgatataatttgaaggaataattttggaaaatatcattacaatgaaaagactttttttaattaaagtagaaatcagtaacacatggttgttacagagaaatgtaaaattgcagataaggtaagtaaaatcacctctaattaaacaagatggaagtaattattattaattctttgatgtatttaaatgagaatccattccttgcatataaaaatgtatacagtataaaatggagtcacaatacccataatatttttgaaacgttatgtcatttaatgaaatcatattaactaatactttaaaggaacagtaaattttatctttttagttttttgtggaggggaggatctcactatgttgaccaggctcatttcaaacacctggcctcaagtgatcctcctgctttggccttctaatgcactggaattacagaagtgagcyacca

SEQ ID NO: 691354 - DNA, 1054 bp, Homo sapiens
taaatatccgttagtagaagaacagaaaagttgttttttagtttgactgctaaaccaaggtcataaatcttactgggaagggcaattcaagaagcacagtggctctctaacataagaacatcttgatattactgggcaagcctattaaatacagaagactgggtccatcccagatgttctaatccattagttcttggatgaggaaaaataatttgcatctttaacaagcctataagatatgacaatgatgcccactggggaatcacattttgagaaccactggagtagaatggtgcattagaagtaataaattagggaacaaatacaaatgattccccaagaaatgaagggcatttaaaatttttcatcagagtcaagaaaatctacttttttcaaaggttttgattttagctacaaagattaagcacattcacagctatttcctttttaaaatacatggtagaaagctgaaatgtttgaggcagagacagtgaataatttattcatcaagatcctggaaaaggatagagaggtgtcagaaacaaagtgtgtttgtgtgtgtgtgtgtgtgtgtgtgtgtgtaattccataaatatttatttattaagaacttattatgtgcctaatgctatgcaaagcacaggaatgaccaaaggcagccattttcttcaaagagagatcagagatgagtgaagtcagcagtagaacagcaaattacaattacattggagtttgctgaggagagaggtcagcccatggtcactgataacatagaaagataatccaatcagcctagagatttcagagaacacttctcagaacaagtggcacctgcttcgagctgtaagtctcatcttagggagaggaggggcacttcctctgagacaggagggaatttgccttagattgtaaattacctggattaataaacactgaatagatgcttattaattttaaatrgaagcaaacataaaggaaaaacaggagagaggaaaaaggaagaggagaggaaagatataatggataaaaaaataattttgaagtagaaaagttg

SEQ ID NO: 691355 - DNA, 606 bp, Homo sapiens
ttttggccaccggcaatattagcataaccttgtgtttgtattgaactctgtgccctttaaagcaatcccattttcattgcttcctttattctttggcttaatcatatatgttgagcaaggaagaccatttatccagttacaaaatatttttcagaactttctttgtyccagtgtcaaagatgcagatataattcacatgatatctgtccttataaagcttacagtttgttggcaaaatctgatgattattgttcagtgagtcatgggcgtggacaaaagtaaggaggattccatgactcagagcaagtcaaggagaatggtagagacgagcttgctaagggtgtttgaagggcaaagggcgttaggcagctaataaaagagaaagaagaggaggggtctggaaaaaagaagataagtctcagacaccatggcaaattcactatttctcccaggtttcaagcaaggggtgaactatggacaagaaggaaggggccattcaagggactttttgctactcttgagaaactttatgtttgagaaagaagacattgaatacttttatccatggatttacatactaagactagcattttagaaagataaaaa

SEQ ID NO: 691356 - DNA, 880 bp, Homo sapiens
taatcagcatacaataaggtaatcataaaggtatcatgagaaataaaatttcatgaaagcttatgtttgtagaaatagcttgtttcaggaaaatcatagtcttatttttaaaaaattgtctcataatactttatggcataaaatatcttcttttctgccagccacgtgtatctttataaaatacacatggtaatcaactaatagccaatcctcatcaggatcaatgagaatcaattgttaaagtaatataaattaatatacatttattagggaaattccatgaattatcttttggaccaaaaaactatctagtctgtaaatggatcaggtttagtgcatttacagggtaggtactgaggccagaaacattcaatagagagattccgacttcagaaagacaaacttgagagagttagctgcagagcaaaagcactaattcaggactggtggaataggatagcatacraaagacatggggaagaagagaatatttgtttccatgcatgcatgtattgatacaagcaagcttccatcaaaaaatgactttcttctaaaggttcatatggcataaacattaacacttttcctttactgcctcacagatcagcttttcctccaaagattctctttctggaaaagtaaagtccagaaagagaaatatttaattgttacagtcataaaaattatacttattcactaatgctgcagccagggtagaagagagagaagttccaactttagccatattttcatcaaccaacttttccttctacttttaaagacaagcatacaggaatgaaagtgagtgttgttattctggagaaattctcttaaatttgtgaaagaacaaattactcataattatgagattttgtaatca

SEQ ID NO: 691357 - DNA, 1063 bp, Homo sapiens
tttttccattgcttaagctattactgtcaccaatttactattgcacgtattcaggcaaagccagaatgtaaagtttgctttcctttagaacattctttgcaaattgtaagctgatattggaaaaccaggcgaggtttgcttctaggtctctttgactttcttctctctttagggaagagggaagttataaaagcaaccattaattttgatggaaaagagaacagctttcagattggtacctgaaaggaggaggcaatatttcttcttctttgtagaagtagtttcccctttactktggcaagctttcctgatgtgcgtggctggaactttttctgagattatttcatgctcctacaataggttatgacaagaatcatttaatttaaactggattcaatttttatttacaacaagcaaatataaaaagagcctaaatgaaccacctaattattttccttatttattcactttacaatagtgataagctagccattcacagggtaaaaaaattaccaactgtagctgggaaaggtagtcaaacttggttgactctaggtttttatgatgaaggcacaggttaaagtgtcccttaagttatcattagtgagagtcacaaaatggacattatagacatatttcaatgcacacataaagtatacacttattgcaaaagtgtaaaacaatatttctttaacatgatgaaaccaagaaactgtattctctaaagattttcaagctagggagacatttattggggattttatggtaaaagatcatctcatctaggcaagagtttaagcagctcttatcacatgatgagagtgggcatagcttagcttttccacaccagaacatttcccaacaataaagtcattgatcaggtaccaggataacaggattaaccaaactctccagcttgcctcagttattcatgtattaatatataggacagaaactcccaagaatgctactatttctcagatgaagtctcaataatgctgccttaaggagatgatgaagatgaatacataataatcattcacatttacatgccatgttagaa

SEQ ID NO: 691358 - DNA, 1063 bp, Homo sapiens
tttttccattgcttaagctattactgtcaccaatttactattgcacgtattcaggcaaagccagaatgtaaagtttgctttcctttagaacattctttgcaaattgtaagctgatattggaaaaccaggcgaggtttgcttctaggtctctttgactttcttctctctttagggaagagggaagttataaaagcaaccattaattttgatggaaaagagaacagctttcagattggtacctgaaaggaggaggcaatatttcttcttctttgtagaagtagtttcccctttactttggcaagctttcctgatgtgcrtggctggaactttttctgagattatttcatgctcctacaataggttatgacaagaatcatttaatttaaactggattcaatttttatttacaacaagcaaatataaaaagagcctaaatgaaccacctaattattttccttatttattcactttacaatagtgataagctagccattcacagggtaaaaaaattaccaactgtagctgggaaaggtagtcaaacttggttgactctaggtttttatgatgaaggcacaggttaaagtgtcccttaagttatcattagtgagagtcacaaaatggacattatagacatatttcaatgcacacataaagtatacacttattgcaaaagtgtaaaacaatatttctttaacatgatgaaaccaagaaactgtattctctaaagattttcaagctagggagacatttattggggattttatggtaaaagatcatctcatctaggcaagagtttaagcagctcttatcacatgatgagagtgggcatagcttagcttttccacaccagaacatttcccaacaataaagtcattgatcaggtaccaggataacaggattaaccaaactctccagcttgcctcagttattcatgtattaatatataggacagaaactcccaagaatgctactatttctcagatgaagtctcaataatgctgccttaaggagatgatgaagatgaatacataataatcattcacatttacatgccatgttagaa

SEQ ID NO: 691359 - DNA, 1063 bp, Homo sapiens
tttttccattgcttaagctattactgtcaccaatttactattgcacgtattcaggcaaagccagaatgtaaagtttgctttcctttagaacattctttgcaaattgtaagctgatattggaaaaccaggcgaggtttgcttctaggtctctttgactttcttctctctttagggaagagggaagttataaaagcaaccattaattttgatggaaaagagaacagctttcagattggtacctgaaaggaggaggcaatatttcttcttctttgtagaagtagtttcccctttactttggcaagctttcctgatgtgcgtggctggaactttttctgagattatttcatgctcctacaataggttatgacaagaatcatttaatttaaactggattcaatttttatttacaacaagcaaatayaaaaagagcctaaatgaaccacctaattattttccttatttattcactttacaatagtgataagctagccattcacagggtaaaaaaattaccaactgtagctgggaaaggtagtcaaacttggttgactctaggtttttatgatgaaggcacaggttaaagtgtcccttaagttatcattagtgagagtcacaaaatggacattatagacatatttcaatgcacacataaagtatacacttattgcaaaagtgtaaaacaatatttctttaacatgatgaaaccaagaaactgtattctctaaagattttcaagctagggagacatttattggggattttatggtaaaagatcatctcatctaggcaagagtttaagcagctcttatcacatgatgagagtgggcatagcttagcttttccacaccagaacatttcccaacaataaagtcattgatcaggtaccaggataacaggattaaccaaactctccagcttgcctcagttattcatgtattaatatataggacagaaactcccaagaatgctactatttctcagatgaagtctcaataatgctgccttaaggagatgatgaagatgaatacataataatcattcacatttacatgccatgttagaa

SEQ ID NO: 691360 - DNA, 1063 bp, Homo sapiens
tttttccattgcttaagctattactgtcaccaatttactattgcacgtattcaggcaaagccagaatgtaaagtttgctttcctttagaacattctttgcaaattgtaagctgatattggaaaaccaggcgaggtttgcttctaggtctctttgactttcttctctctttagggaagagggaagttataaaagcaaccattaattttgatggaaaagagaacagctttcagattggtacctgaaaggaggaggcaatatttcttcttctttgtagaagtagtttcccctttactttggcaagctttcctgatgtgcgtggctggaactttttctgagattatttcatgctcctacaataggttatgacaagaatcatttaatttaaactggattcaatttttatttacaacaagcaaatataaaaagagcctaaatraaccacctaattattttccttatttattcactttacaatagtgataagctagccattcacagggtaaaaaaattaccaactgtagctgggaaaggtagtcaaacttggttgactctaggtttttatgatgaaggcacaggttaaagtgtcccttaagttatcattagtgagagtcacaaaatggacattatagacatatttcaatgcacacataaagtatacacttattgcaaaagtgtaaaacaatatttctttaacatgatgaaaccaagaaactgtattctctaaagattttcaagctagggagacatttattggggattttatggtaaaagatcatctcatctaggcaagagtttaagcagctcttatcacatgatgagagtgggcatagcttagcttttccacaccagaacatttcccaacaataaagtcattgatcaggtaccaggataacaggattaaccaaactctccagcttgcctcagttattcatgtattaatatataggacagaaactcccaagaatgctactatttctcagatgaagtctcaataatgctgccttaaggagatgatgaagatgaatacataataatcattcacatttacatgccatgttagaa

SEQ ID NO: 691361 - DNA, 1063 bp, Homo sapiens
tttttccattgcttaagctattactgtcaccaatttactattgcacgtattcaggcaaagccagaatgtaaagtttgctttcctttagaacattctttgcaaattgtaagctgatattggaaaaccaggcgaggtttgcttctaggtctctttgactttcttctctctttagggaagagggaagttataaaagcaaccattaattttgatggaaaagagaacagctttcagattggtacctgaaaggaggaggcaatatttcttcttctttgtagaagtagtttcccctttactttggcaagctttcctgatgtgcgtggctggaactttttctgagattatttcatgctcctacaataggttatgacaagaatcatttaatttaaactggattcaatttttatttacaacaagcaaatataaaaagagcctaaatgaaccacctaattattttccttatttattcactttacaatagtgataagctagccattcacagggtaaaaaaattaccaactgtagctgggaaaggtagtcaaacttggttgactctaggtttttatgatgaaggcacaggttaaagtgtcccttaagttatcattagtgagagtcacaaaatggacattatagacatatttcaatgcacacataaagtatacacttattgcaaaagtgtaaaacaatatttctttaacatgatgaaaccaagaaactgtattctctaaagattttcaagctagggagacatttattggggattttatggtaaaagatcatctcatctaggcaagagtttaagcagctcttatcacatgatgagagtgggcatagcttagcttttccacaccagaacatttcccaacaataaagtcattgatcaggtaccaggataacaggattaaccaaactctccagcttgcctcagttattcatgtattaatatataggacagraactcccaagaatgctactatttctcagatgaagtctcaataatgctgccttaaggagatgatgaagatgaatacataataatcattcacatttacatgccatgttagaa

SEQ ID NO: 691362 - DNA, 649 bp, Homo sapiens
cagcctctcaaagtgctgggattacagttgtaagccactgcacctggccaatacttttcatattttaaaagatcaaaacaattgaaaactaatagttcctttaatctatcatttgttaattgctacttgtcttatttagaaatgagacttttatcaaattatttcaagattctgattcacaacawttttttatcagtttattgacatttatattatcattattattttatttcaatagcttcaaggggacaagtggctttttgtcacaaggatgaattttatagcagtaaagcctgaaattttagtatacccatcacccgaatagtgtacattgtacccaatgtgtagcattttatcccttaccccattcccccaaatctccccgcttctgagtctccaatgtccattaatgactctgtatgcctttgcatacacacagcttaactcctgcttataagttagaacatttggtatttggttttctattcccgagttacttcacttaaaatcatggcctccagttccatcacaatttatagctaaagaaattattttattcttttcttatggctgcacagtactccatggtgtgtgtgtatatatatatatatatatatgtatgtatgtatgtatgtatgtatatatcaca

SEQ ID NO: 691363 - DNA, 649 bp, Homo sapiens
cagcctctcaaagtgctgggattacagttgtaagccactgcacctggccaatacttttcatattttaaaagatcaaaacaattgaaaactaatagttcctttaatctatcatttgttaattgctacttgtcttatttagaaatgagacttttatcaaattatttcaagattctgattcacaacaattttttatcagtttattgacatttatattatcattattattttatttcaatagcttcaaggggacaagtggytttttgtcacaaggatgaattttatagcagtaaagcctgaaattttagtatacccatcacccgaatagtgtacattgtacccaatgtgtagcattttatcccttaccccattcccccaaatctccccgcttctgagtctccaatgtccattaatgactctgtatgcctttgcatacacacagcttaactcctgcttataagttagaacatttggtatttggttttctattcccgagttacttcacttaaaatcatggcctccagttccatcacaatttatagctaaagaaattattttattcttttcttatggctgcacagtactccatggtgtgtgtgtatatatatatatatatatatgtatgtatgtatgtatgtatgtatatatcaca

SEQ ID NO: 691364 - DNA, 649 bp, Homo sapiens
cagcctctcaaagtgctgggattacagttgtaagccactgcacctggccaatacttttcatattttaaaagatcaaaacaattgaaaactaatagttcctttaatctatcatttgttaattgctacttgtcttatttagaaatgagacttttatcaaattatttcaagattctgattcacaacaattttttatcagtttattgacatttatattatcattattattttatttcaatagcttcaaggggacaagtggctttttgtcacaaggatgaattttatagcagtaaagcctgaaattttagtatacccatcacccgaatagtrtacattgtacccaatgtgtagcattttatcccttaccccattcccccaaatctccccgcttctgagtctccaatgtccattaatgactctgtatgcctttgcatacacacagcttaactcctgcttataagttagaacatttggtatttggttttctattcccgagttacttcacttaaaatcatggcctccagttccatcacaatttatagctaaagaaattattttattcttttcttatggctgcacagtactccatggtgtgtgtgtatatatatatatatatatatgtatgtatgtatgtatgtatgtatatatcaca

SEQ ID NO: 691365 - DNA, 649 bp, Homo sapiens
cagcctctcaaagtgctgggattacagttgtaagccactgcacctggccaatacttttcatattttaaaagatcaaaacaattgaaaactaatagttcctttaatctatcatttgttaattgctacttgtcttatttagaaatgagacttttatcaaattatttcaagattctgattcacaacaattttttatcagtttattgacatttatattatcattattattttatttcaatagcttcaaggggacaagtggctttttgtcacaaggatgaattttatagcagtaaagcctgaaattttagtatacccatcacccgaatagtgtacattgtacccaatgtgtagcattttatcccttaccccattcccccaaatctccccgcttctgagtctccaatgtccattaatgactctgtatgcctttgcatacacacagcttaactcctgcttataagttagaacatttggtatttggttttctattcccgagttacttcacttaaaatcatggcctccagttccatcacaatttatagctaaagaaattattttattcttttcttatggctgcacagtactccatggtgtgtgtgtatrtatatatatatatatatgtatgtatgtatgtatgtatgtatatatcaca

SEQ ID NO: 691366 - DNA, 1858 bp, Homo sapiens
catctccatcagaagtacactgtcttttcctgtcactataatcttttatttaagttcctttaacctcactaataactttccctcttattttatattatttttataattttgggggttcagccaaataaacctgaaattgtcatctatattactaattacaggtgattgcagagaacaatgctggtgggcttattacttcacctctgtattaaattcactgtatcacatttacaagctttttcctcccccaccacccttctcccagtaggtgctttctccagtgaaatgcctaaattccaaaataaataaagaaacaattggaattaaggtatgttgtagcttctttccaatttccaattcactattgagataaatcaactctcttcacctagggaagaatgtgagtcaagaggccaagtttttatccgactgaatgatgaaaatctgccctttacatgcagcacttgccctgtctgtcttattctggtcttgagtaaactgtaagttaatttcaatgacatatccttatagcacccagtatagcaccctgtgcccacgaggtatcccaaatgcttctgaataaatggaataaaataatggtcataatgggaacataaaatatagtgaaatcaggtttttgaaactttaaataaaaacaaaatcaattctttttttaccagtatatatatatatatatttttccatatatataatatgtgtatatatatatttatatatatatataatatgtgtatatatatatttatatatatatawaatatgtgtatatatatatatatactaacacaaactcttaaatatcatttacttgatatttaccatgtacatgacttccctcttcctaccaattatgtttcctactaaacaaacgttaccataacgcattatttttagtttttagtcacaagatgtttatgtaacatattattttaaaatacatatttgcatttccaacgtagagaatttgtcactttgtaaggaaatattaaaagcaaacagcaaagaaaccaacacaatttaaaatacttcaattccctaagtcaaggattgagtggaaacgttgaaaatcaggtctttatattgcacccaaagaagtaacaattggcagagcagtaactaaaagtgagaaaagaggagtcccaggcagaaaaaaagatgtaactctccatggatcatgcagtataaaaacccaactctggtaattatattagatatgttctgaataattagtattaaggtgttttaggtcatttatacttttattctcaagaaaaaaatcagaaaatatctggcattagtacaaaatccagctatttccactactgtggaactacctttcttgatcacttcagattgtcttatattattgaacctggcagaattttcatccacctataggcgttaggatagttcagtgttatctccgtttacaaaatagttacttatgggaaggaacgtctctgtctttatcagttttttgccttcaaactggaaaaataaactattaaactatggctttgatgttttcggaagttaatgaagagaccttcttggtcatatatcctctttttgtagattggtggctgtaccatcattaaaatttagccagcctgctgtttgaacttatgtatggcaaagaggggaaggcattggaagaacagcaatctgagtgaggaaaaaacagtgaacaagagaaagccttttagaaattaactgaaagaagggagaactaggtaattcactactaagaacccgttgttagtgctagaaccagtgtcagtctaaataaagagatgctatgcttcattttgaaagatcttctttacacctattttca

SEQ ID NO: 691367 - DNA, 1858 bp, Homo sapiens
catctccatcagaagtacactgtcttttcctgtcactataatcttttatttaagttcctttaacctcactaataactttccctcttattttatattatttttataattttgggggttcagccaaataaacctgaaattgtcatctatattactaattacaggtgattgcagagaacaatgctggtgggcttattacttcacctctgtattaaattcactgtatcacatttacaagctttttcctcccccaccacccttctcccagtaggtgctttctccagtgaaatgcctaaattccaaaataaataaagaaacaattggaattaaggtatgttgtagcttctttccaatttccaattcactattgagataaatcaactctcttcacctagggaagaatgtgagtcaagaggccaagtttttatccgactgaatgatgaaaatctgccctttacatgcagcacttgccctgtctgtcttattctggtcttgagtaaactgtaagttaatttcaatgacatatccttatagcacccagtatagcaccctgtgcccacgaggtatcccaaatgcttctgaataaatggaataaaataatggtcataatgggaacataaaatatagtgaaatcaggtttttgaaactttaaataaaaacaaaatcaattctttttttaccagtatatatatatatatatttttccatatatataatatgtgtatatatatatttatatatatatataatatgtgtatatatatatttatatatatatatwatatgtgtatatatatatatatactaacacaaactcttaaatatcatttacttgatatttaccatgtacatgacttccctcttcctaccaattatgtttcctactaaacaaacgttaccataacgcattatttttagtttttagtcacaagatgtttatgtaacatattattttaaaatacatatttgcatttccaacgtagagaatttgtcactttgtaaggaaatattaaaagcaaacagcaaagaaaccaacacaatttaaaatacttcaattccctaagtcaaggattgagtggaaacgttgaaaatcaggtctttatattgcacccaaagaagtaacaattggcagagcagtaactaaaagtgagaaaagaggagtcccaggcagaaaaaaagatgtaactctccatggatcatgcagtataaaaacccaactctggtaattatattagatatgttctgaataattagtattaaggtgttttaggtcatttatacttttattctcaagaaaaaaatcagaaaatatctggcattagtacaaaatccagctatttccactactgtggaactacctttcttgatcacttcagattgtcttatattattgaacctggcagaattttcatccacctataggcgttaggatagttcagtgttatctccgtttacaaaatagttacttatgggaaggaacgtctctgtctttatcagttttttgccttcaaactggaaaaataaactattaaactatggctttgatgttttcggaagttaatgaagagaccttcttggtcatatatcctctttttgtagattggtggctgtaccatcattaaaatttagccagcctgctgtttgaacttatgtatggcaaagaggggaaggcattggaagaacagcaatctgagtgaggaaaaaacagtgaacaagagaaagccttttagaaattaactgaaagaagggagaactaggtaattcactactaagaacccgttgttagtgctagaaccagtgtcagtctaaataaagagatgctatgcttcattttgaaagatcttctttacacctattttca

SEQ ID NO: 691368 - DNA, 1858 bp, Homo sapiens
catctccatcagaagtacactgtcttttcctgtcactataatcttttatttaagttcctttaacctcactaataactttccctcttattttatattatttttataattttgggggttcagccaaataaacctgaaattgtcatctatattactaattacaggtgattgcagagaacaatgctggtgggcttattacttcacctctgtattaaattcactgtatcacatttacaagctttttcctcccccaccacccttctcccagtaggtgctttctccagtgaaatgcctaaattccaaaataaataaagaaacaattggaattaaggtatgttgtagcttctttccaatttccaattcactattgagataaatcaactctcttcacctagggaagaatgtgagtcaagaggccaagtttttatccgactgaatgatgaaaatctgccctttacatgcagcacttgccctgtctgtcttattctggtcttgagtaaactgtaagttaatttcaatgacatatccttatagcacccagtatagcaccctgtgcccacgaggtatcccaaatgcttctgaataaatggaataaaataatggtcataatgggaacataaaatatagtgaaatcaggtttttgaaactttaaataaaaacaaaatcaattctttttttaccagtatatatatatatatatttttccatatatataatatgtgtatatatatatttatatatatatataatatgtgtatatatatatttatatatatatataatrtgtgtatatatatatatatactaacacaaactcttaaatatcatttacttgatatttaccatgtacatgacttccctcttcctaccaattatgtttcctactaaacaaacgttaccataacgcattatttttagtttttagtcacaagatgtttatgtaacatattattttaaaatacatatttgcatttccaacgtagagaatttgtcactttgtaaggaaatattaaaagcaaacagcaaagaaaccaacacaatttaaaatacttcaattccctaagtcaaggattgagtggaaacgttgaaaatcaggtctttatattgcacccaaagaagtaacaattggcagagcagtaactaaaagtgagaaaagaggagtcccaggcagaaaaaaagatgtaactctccatggatcatgcagtataaaaacccaactctggtaattatattagatatgttctgaataattagtattaaggtgttttaggtcatttatacttttattctcaagaaaaaaatcagaaaatatctggcattagtacaaaatccagctatttccactactgtggaactacctttcttgatcacttcagattgtcttatattattgaacctggcagaattttcatccacctataggcgttaggatagttcagtgttatctccgtttacaaaatagttacttatgggaaggaacgtctctgtctttatcagttttttgccttcaaactggaaaaataaactattaaactatggctttgatgttttcggaagttaatgaagagaccttcttggtcatatatcctctttttgtagattggtggctgtaccatcattaaaatttagccagcctgctgtttgaacttatgtatggcaaagaggggaaggcattggaagaacagcaatctgagtgaggaaaaaacagtgaacaagagaaagccttttagaaattaactgaaagaagggagaactaggtaattcactactaagaacccgttgttagtgctagaaccagtgtcagtctaaataaagagatgctatgcttcattttgaaagatcttctttacacctattttca

SEQ ID NO: 691369 - DNA, 1858 bp, Homo sapiens
catctccatcagaagtacactgtcttttcctgtcactataatcttttatttaagttcctttaacctcactaataactttccctcttattttatattatttttataattttgggggttcagccaaataaacctgaaattgtcatctatattactaattacaggtgattgcagagaacaatgctggtgggcttattacttcacctctgtattaaattcactgtatcacatttacaagctttttcctcccccaccacccttctcccagtaggtgctttctccagtgaaatgcctaaattccaaaataaataaagaaacaattggaattaaggtatgttgtagcttctttccaatttccaattcactattgagataaatcaactctcttcacctagggaagaatgtgagtcaagaggccaagtttttatccgactgaatgatgaaaatctgccctttacatgcagcacttgccctgtctgtcttattctggtcttgagtaaactgtaagttaatttcaatgacatatccttatagcacccagtatagcaccctgtgcccacgaggtatcccaaatgcttctgaataaatggaataaaataatggtcataatgggaacataaaatatagtgaaatcaggtttttgaaactttaaataaaaacaaaatcaattctttttttaccagtatatatatatatatatttttccatatatataatatgtgtatatatatatttatatatatatataatatgtgtatatatatatttatatatatatataatatgtrtatatatatatatatactaacacaaactcttaaatatcatttacttgatatttaccatgtacatgacttccctcttcctaccaattatgtttcctactaaacaaacgttaccataacgcattatttttagtttttagtcacaagatgtttatgtaacatattattttaaaatacatatttgcatttccaacgtagagaatttgtcactttgtaaggaaatattaaaagcaaacagcaaagaaaccaacacaatttaaaatacttcaattccctaagtcaaggattgagtggaaacgttgaaaatcaggtctttatattgcacccaaagaagtaacaattggcagagcagtaactaaaagtgagaaaagaggagtcccaggcagaaaaaaagatgtaactctccatggatcatgcagtataaaaacccaactctggtaattatattagatatgttctgaataattagtattaaggtgttttaggtcatttatacttttattctcaagaaaaaaatcagaaaatatctggcattagtacaaaatccagctatttccactactgtggaactacctttcttgatcacttcagattgtcttatattattgaacctggcagaattttcatccacctataggcgttaggatagttcagtgttatctccgtttacaaaatagttacttatgggaaggaacgtctctgtctttatcagttttttgccttcaaactggaaaaataaactattaaactatggctttgatgttttcggaagttaatgaagagaccttcttggtcatatatcctctttttgtagattggtggctgtaccatcattaaaatttagccagcctgctgtttgaacttatgtatggcaaagaggggaaggcattggaagaacagcaatctgagtgaggaaaaaacagtgaacaagagaaagccttttagaaattaactgaaagaagggagaactaggtaattcactactaagaacccgttgttagtgctagaaccagtgtcagtctaaataaagagatgctatgcttcattttgaaagatcttctttacacctattttca

SEQ ID NO: 691370 - DNA, 746 bp, Homo sapiens
tgaagtgatatgaatctctgcatttcctttatacttgccttttaatagtgacttggtaatatctgctaatgggctttgttgtctgatgaactgaattactgtgttctctgcaaaggactctgctaaatggtccaagatatttgtgaaattaacctccatttaaacattagaattggggaaagagcatgaaaagattacctctgttggcaaagaaaaatcaatgttttataattttcaagaaaataragcagttctaagtttttcattccttattttatttgcacttaaagcaaaactagaaaagcaatttcatgattttaaaaaagaaaaaataatattatctggctctaactctttgaatctagttatttcttttaaaattaaaattttgccttcaaagtgtcgctatttcaacctgtgcaagtaaagttactcataaacacactgtagaatattatttttttcaaggaagcaaattttgtcctaatttacagtagtgaaatcatctaaatatgcacatttccaaattctcaagattcgtaagaggaacttaatgaaatggaaatctcattggtaattatactcagctcagcctgggagttcatggtgctgtcagcctgtgtggtcatgggtagctaagcaacacagccaactagcacctttgtggaggatatttttagcttcattgcacatttttcatttatctattggagattgatttgttttgcaatttattttgaaattcc

SEQ ID NO: 691371 - DNA, 671 bp, Homo sapiens
attaaaatgcaaatgaatgataaatgcaagcccatttgtaacctagaatatgactcatttaaaaaaaaagtaggacaatgagccaatcatgaggaaggtaagatgtcaataggtactcacttttagctcactttgtactcaaactaatgatcaggataataaggcttgcgtgcaccagttgaaaactgtgactttttttttttttttttttttttactgkatctcaaaagaaaacagcataatagatcttgcacggtgggtgagctacatgcaaattagtcaaaaattttggttgactaagaattatatttaccaattgaatgtcatttcctacatgaattatcataaggcaattgaaaagtagtatcataaggcaattgaaaagtagtacttaaagtagtcacgtttagagaggtcgattctaaaaatacaagtttcaagttgaagcggattacttgttgaattaggaagagtgtcaaaatccttcctgttcctaggatggagatacaagagccaatacatcatggatgaactttggagaaaaagggctaaagagtagaaatacaaaatactaaggctttaaaatatttaactatggtttctcaaaaacatcataaacttaaaaaaaaaaaaaaactctaaaagtacaatttggatatgcagtagtatat

SEQ ID NO: 691372 - DNA, 829 bp, Homo sapiens
tggaactgaaaagctttaatttccacaaaaatgtaaggttttgggctacagccttattaaaacaaacaaatatgagcatagtggtctacagatggaatatctggggctctaaacaaactgctccttgaaagtgtaatcactgtctttttgtttgtttatttagcctggtaggacaatgtcagaaatttccttggtcatagggaatataaaacatagtgtgaacaaaagcagcaataaagctacaaactattttttggtgtatttgcttaagtataagatagctgattggggctttatcatgtaacgttagtttgcttagttttcattatgtttgttaaacttgaattgtgaataaatatatggctgattcacattgtaattaaactgcacattgacataaactgtacattaaaagttgctgcacacagtcatccaaaataatacttaggtaaaaccaaaaatactataaaccaatctcaaggaacctaccctaaaataaaaatacagttaaaatggaattgcaaaactagaatgggagaaatatttaccsataaaatcttgtttggaacattgatataacactagaaaagaatttttctaaataaccacaatgttcaacagtgactgtgcatctgtgaagaccaggcattttgaatcattgccctgtggtgtgtggcagtacaattttacagaaatgaactacaataattaataaaattctctaatgggaagattttaatgagtaagtatttacacaataaatatttataatgttggtgctattatttcacaaaataaaaaaagctgtatcacagcctttaaaagcaaa

SEQ ID NO: 691373 - DNA, 1342 bp, Homo sapiens
tcgggaccatgcttgctatcgttggatgagtctctggaaggacgcatgggactccgaaaagctgacctgtcccaccgaggtcaaatggatacctctgcattggcccgaggcctccaacgtacatcaccatcaccaaccgtcaccgtcagcatccttgtgagcctgcccaaggccccgactccggggagactcttgggagcccggccttcataggctaaagtagaaagggattgcgacttccacccacaaggtccccactgaactgcgaagatgtggagcgtaggtcagagaggggaccaggaggtaagatgtcctgacaggcgatgagttaactaggctctggccaccccactcacgtcccacgtcccgggaacccgcggaacactgccgctttatcccctcctctgtccacagccgcccccaccccaccccgcaacccacgcatacacactggaggttacaaaaccacagggtgtgaatagagcctgacggagcaagagctcatttcatgaggcgggatgggtgggttggggtgggggttgggggttctgtagagagcccgattctccctcgtgggtggctacaggacacaaatgaatatcgcttcttgggcggaggggcttccttaggccgtcacgtttgcgggactatctctcaaacccttccttgaggccacaaaatagattccaccccacccctcgacgtttccctgggtgctggatgtatcctgtcaagagacctgagtctgacacattgagtgaaacacctttattggctttgtgtgtttgtttgtttctgagatggagtcttgttctgtcccccacggctggagtacagtggcatgatctcaactcactgcaacctctgcctcctgggttcgwgtgattctcctgcctcagcgccaccaagccaggctcattttttaatttttagtacacacggggtttgaacctgtttcattggttttcactggagattccagattcgagtcacacctcattgtgtgccacataatgacttcttttttttttttcttattttttttaaagcacaatatatctgctttatttgagtggctttatatatggttataattgtgttatagatgaagaaaaggtattaaacacggtgctaatgatagtgaaagtgaaaacaaaagaaaggctatctattttgtagttagaataaagttgctcagtatttagagttacctaaatacgtcagcatttaaactcctcttagtaaaagctggccaatctgaataatcctcctttaaacacaatttttgatatggttaaggtttttaagaatgcaactcctgcagaatagctgaacagacaat

SEQ ID NO: 691374 - DNA, 1342 bp, Homo sapiens
tcgggaccatgcttgctatcgttggatgagtctctggaaggacgcatgggactccgaaaagctgacctgtcccaccgaggtcaaatggatacctctgcattggcccgaggcctccaacgtacatcaccatcaccaaccgtcaccgtcagcatccttgtgagcctgcccaaggccccgactccggggagactcttgggagcccggccttcataggctaaagtagaaagggattgcgacttccacccacaaggtccccactgaactgcgaagatgtggagcgtaggtcagagaggggaccaggaggtaagatgtcctgacaggcgatgagttaactaggctctggccaccccactcacgtcccacgtcccgggaacccgcggaacactgccgctttatcccctcctctgtccacagccgcccccaccccaccccgcaacccacgcatacacactggaggttacaaaaccacagggtgtgaatagagcctgacggagcaagagctcatttcatgaggcgggatgggtgggttggggtgggggttgggggttctgtagagagcccgattctccctcgtgggtggctacaggacacaaatgaatatcgcttcttgggcggaggggcttccttaggccgtcacgtttgcgggactatctctcaaacccttccttgaggccacaaaatagattccaccccacccctcgacgtttccctgggtgctggatgtatcctgtcaagagacctgagtctgacacattgagtgaaacacctttattggctttgtgtgtttgtttgtttctgagatggagtcttgttctgtcccccacggctggagtacagtggcatgatctcaactcactgcaacctctgcctcctgggttcgtgtgattctcctgcctcagcgccaccaagccaggctcattttttaatttttagtacacacggggtttgaacctgtttcattggttttcactggagattccagattcgagtcacacctcattgtgtgmcacataatgacttcttttttttttttcttattttttttaaagcacaatatatctgctttatttgagtggctttatatatggttataattgtgttatagatgaagaaaaggtattaaacacggtgctaatgatagtgaaagtgaaaacaaaagaaaggctatctattttgtagttagaataaagttgctcagtatttagagttacctaaatacgtcagcatttaaactcctcttagtaaaagctggccaatctgaataatcctcctttaaacacaatttttgatatggttaaggtttttaagaatgcaactcctgcagaatagctgaacagacaat

SEQ ID NO: 691375 - DNA, 1342 bp, Homo sapiens
tcgggaccatgcttgctatcgttggatgagtctctggaaggacgcatgggactccgaaaagctgacctgtcccaccgaggtcaaatggatacctctgcattggcccgaggcctccaacgtacatcaccatcaccaaccgtcaccgtcagcatccttgtgagcctgcccaaggccccgactccggggagactcttgggagcccggccttcataggctaaagtagaaagggattgcgacttccacccacaaggtccccactgaactgcgaagatgtggagcgtaggtcagagaggggaccaggaggtaagatgtcctgacaggcgatgagttaactaggctctggccaccccactcacgtcccacgtcccgggaacccgcggaacactgccgctttatcccctcctctgtccacagccgcccccaccccaccccgcaacccacgcatacacactggaggttacaaaaccacagggtgtgaatagagcctgacggagcaagagctcatttcatgaggcgggatgggtgggttggggtgggggttgggggttctgtagagagcccgattctccctcgtgggtggctacaggacacaaatgaatatcgcttcttgggcggaggggcttccttaggccgtcacgtttgcgggactatctctcaaacccttccttgaggccacaaaatagattccaccccacccctcgacgtttccctgggtgctggatgtatcctgtcaagagacctgagtctgacacattgagtgaaacacctttattggctttgtgtgtttgtttgtttctgagatggagtcttgttctgtcccccacggctggagtacagtggcatgatctcaactcactgcaacctctgcctcctgggttcgtgtgattctcctgcctcagcgccaccaagccaggctcattttttaatttttagtacacacggggtttgaacctgtttcattggttttcactggagattccagattcgagtcacacctcattgtgtgccacataatgacttcttttttttytttcttattttttttaaagcacaatatatctgctttatttgagtggctttatatatggttataattgtgttatagatgaagaaaaggtattaaacacggtgctaatgatagtgaaagtgaaaacaaaagaaaggctatctattttgtagttagaataaagttgctcagtatttagagttacctaaatacgtcagcatttaaactcctcttagtaaaagctggccaatctgaataatcctcctttaaacacaatttttgatatggttaaggtttttaagaatgcaactcctgcagaatagctgaacagacaat

SEQ ID NO: 691376 - DNA, 614 bp, Homo sapiens
aagggctggaaatgaggttatttgaggccctttgaaataacacaagtaaacataawatccactggaatactattttactactaggaatcagccacaattgaaatactggaattgggaacatttggggattaaagaatccacagagttgactccacctacttctttcaggccactctatcaaagatacattaatataaatttagagcaattagcagagcattacacattttagagaagaatttctagaattatcaaactaaaaaataatgaaaatttttaaaatgtctactcatcccattgatctgtttagcatcaggtcatcattgtgttttatttttataattaaaggaattgtatacaaatagcaaagtaatagagccaacaagctgagactgatgagaagtaaccaacaacaaaaacaaataaaaagaaaggtaagaatgtacaatttccttcaaaataacgtttccttggaaacccagagtaagataaaagaaggtaaaatattttgcctagaagaattattggcattaccttgatcacataaagcctctatacataggtaatactcaactttttcctccatatgaagagaaattatttcatatgaattt

SEQ ID NO: 691377 - DNA, 614 bp, Homo sapiens
aagggctggaaatgaggttatttgaggccctttgaaataacacaagtaaacataatatccactggaatactattttactactaggaatcagccacaattgaaatactggaattgggaacatttggggattaaagaatccacagagttgactccacctacttctttcaggccactctatcaaagatacattaatataaatttagagcaattagcagagcattacacattttagagaagaatttctagaattatcaaactaaaaaataatgaaaatttttaaaatgtctactcatcccattgatctgtttagcatcaggtcatcattgtgttttatttttataattaaaggaattgtatacaaatagcaaagtaatagagccaacaagctgagactgatgagaagtaaccaacaacaaaaacaaataaaaagaaaggtaagaatgtacaatttccttcaaaataacgtttccttggaaacccagagtaagataaaagaaggtaaaatattttgcctagaagaattattggcattaccttgatcacataaagcctctatacataggtaatactcaaytttttcctccatatgaagagaaattatttcatatgaattt

SEQ ID NO: 691378 - DNA, 653 bp, Homo sapiens
ctgcaatccagcttgggtgacagagcaagaccttgtctcagaaagaaataaataaaaataaaaacaaaacaaaaaaaaaactcttcacaaaacagaactctgtgtgtatttgattgtcttaaaatttatctactggaaacctaaagtaaacatcaaacttaatattgaaacgtaagactcagaggacctggggctttccctaaggatcagcatcatattggatagtggaggaatgaataaactaagtaagatatgttcaataaccatatacaattctgaaagttctctgccctaattttcaccccattactgaatgttctcataaagtagcacaaagcaaggtttagtaactctttcctcagatatgagttactaagtaattatgtaatatgtaaaccaacatgataatcttgcaagaagaaaacagatatctgaggaccacagcaccataaaaaagtaacaaactaaacaattaaatttatatacaggcaaaactacaatttttagaaaacataataartctgcccagaaaaataagagatgagattacaaacttgcgtcaggaacaggcattatgagacatggccaatttaagtactgtgtaaaaaattttaatccctcaagtaaagatctcagtaaataccttacaaaga

SEQ ID NO: 691379 - DNA, 1680 bp, Homo sapiens
  misc_feature 911, 912, 913, 914, 915, 916, 917, 918, 919, 920, 921, 922,923, 924, 925, 926, 927, 928, 929, 930, 931, 932, 933, 934,935, 936, 937, 938, 939, 940, 941, 942, 943, 944, 945, 946,947, 948, 949, 950, 951, 952, 953, 954, 955, 956, 957: n = A,T,C or G
  misc_feature 958, 959, 960, 961, 962, 963, 964, 965, 966, 967, 968, 969,970, 971, 972, 973, 974, 975, 976, 977, 978, 979, 980, 981,982, 983, 984, 985, 986, 987, 988, 989, 990, 991, 992, 993,994, 995, 996, 997, 998, 999, 1000, 1001, 1002, 1003: n = A,T,C or G
  misc_feature 1004, 1005, 1006, 1007, 1008, 1009, 1010: n = A,T,C or G
tccctttcactactctgtattgattaggagtgtatgtggggcttgcattgatgtctatttattaatattcataagttgttttaataatgaaccatgtccacagctattggaaaatattgtgcagaccccagagttcccaaacattgagctagacattaagctggatgcatgcattgtatgggacttttgaaaggtcttccttgatgaggatggagtgtgtttcatgaacaaaaggagcaggcacatgaatacttgagtggccagagagagactattgccaatttagtgactggttttcctagccttcctttaagattcatatggacatgtgagtaaatgggtgttaacaagatctgaacggaaagatgagtgtaacttcaggatcattttattggaaacaatacacttgtcctatactattgttttactttttccctccatagaaatatggatataaaattgagccctaacacaatgtaaatgaagacaaaaacccttggagtttggagagagaaaaggtaaagaaacctggcctcgaataaagtcagaagtagaactattcttttcgctcagcactgtccaactctgtaatgttttgtggaaaaaaaatccaaaccactatactttttgactttttgtaatggcagtttggttgatatgccaattaacagagagtacaattctaaaaatcctttggaaaacagtttgcatttttctcctaaaaatgaacctgaatataacctattagaaaatcagcacaaggaggcacataccataatatttttggcagtttattcatttttgtaaaacacaaaccaacatatccattagcaataaagttgtataatgaaataatgaattacataaaaatgcatcaacattttgcaggatttcatttctacaaattcagnnnnnnnnnnnnnnnnnnnnnnnnnnnnnnnnnnnnnnnnnnnnnnnnnnnnnnnnnnnnnnnnnnnnnnnnnnnnnnnnnnnnnnnnnnnnnnnnnnnnaggcccgataagccgtccataaagtaatttttcttaatagaaagcctttagtaaggataacaaacattctcgggagtacttattttttccaacggtggaaataactcctactacccaaaggtagagaatgttttcctccattcttcattggtgtggtacctgtgtgaaactcttgtgggataaaactcacaaaagtatttcctcctcaactcttctaagacagggctttcagcagtttttaactaaagcttgtccacatacagcaatttgtggattaagtgttcctactttttttctggtttctgctgtttctgctcctgataagytgtgattttctgcatctgtctgacactagttttcaagggaatggtttgcttcatacctcaattctctaatggacctaagaaaaaattttgaattttagtttgttcacctttttctcatcaggtagacaggagtgacaacttccagattcattaaatgatgtagtggaaaacagaagtcaagcttgtctatttctataagaatttctgcatctgtattcaggaagaatattggtaataagactgactcaatcaatattcctattcttttatcttgaaaagacaaagcttccagaaaagttataattttgtgagaacaaataggtcatttgtacattatttatcaa

SEQ ID NO: 691380 - DNA, 1023 bp, Homo sapiens
atcaagttatcaagcgggatttcaatgtaagccaagtaaaatggaaaaacatttttctccagttaccattagtaagtacggcaaaggaaaaaaaatagtttattatatgatctttcacaatttttttttttttgagggggagtttcgctcttgttgcccaggctggagtgcagtggcacaatctcggctcactgcaacctctgcctcccaggttctagcaattctcctgcctcagcctcctgagtagctgggattacagacacagaccaccacacccacctaatttttgcatttttagtagcgaccaggtttcactatgttggccagggtggtctcgaactcctgacctaatcccaaagtgctgggattacagggatgagccaccacactcgaccgatttgtccatttttatctttcataaatgatagcattataaatttaaagtctcactagatggagaaatatgtgcagaaattgaaggtagaaactgtayggtttcttgacagataaaaactataacttagaaatttgtttttcagctaaatctctgatatttttataattttctctttcttccaaagtagaataattgggctctctttaacaaatttcaatctaaccaggattttacaattaatcagtttgtcatggctttttccatttgtccaatagtaacttgtaaaagcctttccatggaaggcctgtaaaaccctgagtgtcttaacttttatcggacaatccagaaaaaatcatatttgggaacaccgataatgaattggcagacaaatagctgagaaagacattttttcttttaaaaaatgatcagaattaaaaaaaaaagaaaagaaaagaggaatgtggggaagtatttaaatgaacacatataatagaatttagtttcccttagcacagctctgattgtttagcttctttcaggaatggtaaaaatgaatactaatgagttttaactttacaagccagcattaatttagacaaatgttgaatatattgctctattctttg

SEQ ID NO: 691381 - DNA, 3452 bp, Homo sapiens
agaacttggaatcaaatactaactgaaaaattccttttgtgtattttcaactaaccatgatgttgaatccattgatctcttgtttttaatgtaattgtttacacagcatatttatagtcacaatcatttctactttcaatttattttttaaattatgaaaaaaatacatatattttggttaggaattcatgctgagggcttgctaatcctttactactacctataagtacagtcaaagatatgcttgtaaaggtgaattcagaaaacttattgaagattttacctcctaagcaaggaccttagattttaataagattaaataatgtaaaaataatgtaaaagcatcaaggatgttcgttgaaagtgcaaattgaaaaataagggctttaaaaaaagagttgataatgggtatgtacatattgagttaattgaattgcttgcacacratcaatttcacaaacatgctggcaagacaaacaagtgctttatagtatatgaagggagcggttcaagtggtcatggcaggcatatttagcacctagtggagccttggacacagtctgggatttcttcaattttatgggtcccaaatcaatgcagaaactgtaaactggttgagaatccctatggatgttagcaagtcttgacagacgtgaggagttccttaagagaggttggtatatatatcactattttttttaaatattaactagtataatttctggtgccacttaaatagacaactatgttgaaaataaatgaaattatatatatacatttagtagattttgatgctcagagaagttttcaaatcgtgaagaaaataaaatgattagataatattttgaatgaaaacaatactacgtaaattttgaaccagtgttatgctatattaaaattacaatattatgaattagatatgactttttctcaattatttatgaactattaactgctgttgtcaaaagcatgtgagtatgtgtgtgtgtgtgtgtgtgtgtgtgtgtgtatttacagtgaatgtgctatactttcagtacaaaaggcatggtgatattttccgataaaagtactcagaattctttttccagaagatataaagctgtaatcctaaagaactgataatgtgatattgtagatgacctcactgccaatatgaaaaatatgagtaatctgtatttttaaaatatattcgtacttactttttctccattatttatgtgtagctcatggatccagaggtatatcaaatgtaaaatgaatcctgtaatcctgtctaatgttcgatgattactttttttgttgggggaggtggggggatagagtctcactctgacaccaggctggagtacagtattgggatcttggctcactgaaatttccacctcctgggatcaagtgattctcctgcctccggctcccgagtagctgggaaaactggcacacgccaccatgcccagctaatttttgtatttttagtagagacggggtttcacccccttggccaggacactctcgatctcttgacctcatgatccatctgcattggcctcccaaagtcctgggattacaggcatgagccaccatgcccagcctatgttcaatcatttcataacaaatacacaaatagaaaaatatgtatttaataaccatttctaccacaaacctgaacatatcctgaatcttaaattttattcatgctttgctaatttgtattaatttgcatgactactatttgtttgtatcttcaaatactgctacatttttgtaaattatattcttcatattttaaatatgtattcattatatcccatccccagtgtcttcttgtaaataagatatttcaatgtgactctttcactttattgttttatattaacaaatccagccagaaaaaatttctttatttttcaatctgctcgataacatgaagaaatgccttataaggtaagattgccagaagatagtgatcttaatgagttgctattttcaaggagcagtaataatcattagacacagcttccctggaaacccaaggaaacgacattcacctggaaaataacacagttcaattataaacaaagtttctgaatggaaaagcattaatttcccattttcatactttccattgccattttgaactcatcatcactttattgctgctctagctttgccaagttaccatatccaaacccgttttcacaagcagcagaaacatctgtgaaaacaggaactaagagtcccctaggagagatcttgttgtatcattataatttcaatacaaactacatgacgaggcaatattagtaccatgatagaagatgctacattcctttgattaaaaagatgacataaaataaatgtaggaaacatggggtcttgatggatatattaaagcagtgaaaaagttactaaacttatttttaatgttttaatgtggacaatttgaacaatctacatttaaaataagtctgtatgcatacaccaagctaaaacagagtttaagcaaatcaatacagactccaaatgcatgtttttctcatcacttaaaatattatttgctttctcttgattctggtaaccaaagcgtatctgggaatctttattgattttaagttttattttaagttgctttctctaaaagagtcttaagagagactcattttgatagtaagttttctgggaacgaagccacacagaattaccctcgtgcatatcacactgtgctcatagcacagacaaaatattcagatggttatttatatagcatgcaacagttggacatttaggagaatctatgcatggatttaccttacttttttaggacatagttggcattgtacaaatatagctgcaatgcagaacaaatggatgaaattaatacctgcttataggaaagcaatagaaaacctatatcttgacccactcaaatttagcagaaactgagtgcgataaattctcatcctaacagacacaacctactccctaacctcagtgatgcaatgcagctttccatggtcatggataggaagaatcaatatcgtgaaaatggccatactgcccaaggttatttatagattcagtgccatccccatcaagctaccaatggctttcttcacagaattggaaaaaactactttaaagttcatatggaaccaaaaaagagcccgcatcaccaagtcagtcctaagccaaaagaacaaagctggaggcatcacgctacctgacttcaaactatactacaaggctacagtaaccaaaacagcatggtactggtaccaaaacagagatatagaccaatggaacagaacagagccctcagaaataatgccgtatatctacaactatctgatctttgacagacctgagaaaaacaagcaatggggaaaggattccctacttaatgaatggtgctgggaaaactggctagccatatgtagaaagctgaaact

SEQ ID NO: 691382 - DNA, 628 bp, Homo sapiens
cacaagaacagaaaatcaaatactgcatgttctcactcataagtgggagttgaacaacgagaagacatggacacagggaagggaatatcacacaccagagcatgttgcggggtgcgaggctaggggagggatagcattaggagacatacctaatgtagatgacaggttgatgggtgcagcaaaccaccatggcacaggyatacctatgtaacaaacctgcatgttctgcacatgtatcccagaacttaaagtataataaaaaagtggtaagaaaaaaaaacaaagatatactccagaaacctcacttgatatactttcttatggctcaaattcataaaatttaattcacactatggcaaagaatcataaaaagtcaataaaattttacttttcatgttgtgtagatgcctcacctttagataaactgttactcttatgtacaattttatttttcaagtgtatttctttttggaaaacatagatggctgttacttttagtatgacagtctcttctttttgattgaaattttagagcatttacatttattattcctatgttggggtttagatatttaattttgctatttgtatttattttgtctcatttattcttttttaaaaatgtttc

SEQ ID NO: 691383 - DNA, 628 bp, Homo sapiens
cacaagaacagaaaatcaaatactgcatgttctcactcataagtgggagttgaacaacgagaagacatggacacagggaagggaatatcacacaccagagcatgttgcggggtgcgaggctaggggagggatagcattaggagacatacctaatgtagatgacaggttgatgggtgcagcaaaccaccatggcacaggtatacctatgtaacaaacctgcatgttctgcacatgtatcccagaacttaaagtataataaaaaagtggtaagaaaaaaaaacaaagatatactccagaaacctcacttgatatactttcttatggctcaaattcataaaatttaattcacactatggcaaagaatcataaaaagtcaataaaattttacttttcatgttgtgtagatgcctcacctytagataaactgttactcttatgtacaattttatttttcaagtgtatttctttttggaaaacatagatggctgttacttttagtatgacagtctcttctttttgattgaaattttagagcatttacatttattattcctatgttggggtttagatatttaattttgctatttgtatttattttgtctcatttattcttttttaaaaatgtttc

SEQ ID NO: 691384 - DNA, 1019 bp, Homo sapiens
aatgggcagagtggaggaaggaaaatggtctaacaaatgtgcgggagtctaaggactacttgttaatagacaagggcatgattaatatgtgattataaatacttgcatttttaaaagctaaagctcctcaattatgccaaattttctagtacatacacaaaaatgttatgctatgtagtcttttaacattttttaaaagtatgcaactgtgcattgcagttatgcaaaaaggggaagggctgaaaaatgttcagataagcctgagtcaaacagaaacagtatagaaattataaaaagtacatgcatttatcaagagccagaatttatagccatatttaactattattattattattattattattgtagagagagaatctctctatgttgcccaggctggtctcaaactcttggactcaagggatcctcccaacttagcctcccaaagtgctgggattacaagcctgagtcactgagcctagccaggtttaattcaaaaattgtaaaaatttctaccctcatttcctggagttcctgaataaatagaaatttataaaatgataatcaatgtaatttggggaaagattggtcaaatgatttgagcctcatgtaatgatgaagatgmtaacagtagttgtagagcatcaacaacatcaataacattcagtaaattttaaatagaggttggattagattgtattttttttatcaagtatgtttcctttctttagtcatggtaacaatgacaatgaaatttccacaagaggtagcatttatttaggttttaaaatttggttcctggtagcattaggaccaaggttctgtgattttgaaatgaccacaagagtgtaattgggtactatagtagattagttgagtaagaatattgtcataaaaactaaatatgtattaaaacaaatacttatttcatatatattcccagaatctaatttcacctttgaaataatccatgaaacttatttttcatggaaagcttgtgttttgagtataagagggca

SEQ ID NO: 691385 - DNA, 1353 bp, Homo sapiens
cctcccccaaagagaagagccccaaattagcagttaaaaataaacatagctctttggcctctgattcttcagagagaatgatttcatgggaacattgattagggaaaagaaaaaaaaaaaaggatctactttcatcactttctcttttcttaattgggcttcatttgcagtaagacctagaaaatagactcactagattctagtagtctcattggaccwtgcttattcgagaactatgaagtaaacacagcctggtggttcatgtaggacatgtgatgaaatttcacctaatttgaactaaaatgatgcaatgattgcatgttcaaagccttaagtatcacaatatgaattttactttcatttgttaatagacagaccttgaataattctatatcttaaagtttcctaatctatttcagtggtcagaagtagaataattttggagtaagcatctctggaaacaggcaaagtaagtcagaatttattattaaatacctagtgtaaaatgataacattgaattaggaatgatgactacagggaggaagtagagtaaagattgtagatgccattttcatcagaggaaaggaaggacagggacttcattttggagcaatttgctaatgatgaggcaccgatggtactgctaagaaaactggttgaggacagtgaagatgttcagtccttaggctgtggatgtgtcagtggttaaagaggtaaaaacacccagtagaactggggttaagttacaatgataaaaatcagataatttaattatatggaagtgattaaaggaaattagaaaaataatttagaatagagggacgacagaagagcaggggagggaatggaaagggaagaggcagaaagagaggaaagggaataaagaaggagggaaaagaaaggaaagaaagaaaagaaaggaaggagaagaggtatgagaaaacctatgaagtggtaagaagagattaatctcagtttgggggcatacaaagttgagagacatgaaaaaggaaaaagaaagcaggatttttttagttgctcttgataatctaaagagtatcaaggtcaagggtcacaaaaaacgtaaaaggagaaaaattttagaaaaatcaaacaaaaatctggtagtgtcaaattctgccaacaaattagggaagatgtagacagagaaaggcccataggatttgggaatttggcaatttgatctgtactgattgaatgagagaggttatgcagtagaatgatgaggaagacagattactgggcatgaggagataatcaatagtgattatttagaagagacaagaaagaataaacttaagatggaaaaataggatatcataaggaagaaa

SEQ ID NO: 691386 - DNA, 1353 bp, Homo sapiens
cctcccccaaagagaagagccccaaattagcagttaaaaataaacatagctctttggcctctgattcttcagagagaatgatttcatgggaacattgattagggaaaagaaaaaaaaaaaaggatctactttcatcactttctcttttcttaattgggcttcatttgcagtaagacctagaaaatagactcactagattctagtagtctcattggaccttgcttattcgagaactatgaagtaaacacagcctggtggttcatgtaggacatgtgatgaaatttcacctaatttgaactaaaatgatgcaatgattgcatgttcaaagccttaagtatcacaatatgaattttactttcatttgttaatagacagaccttgaataattctatatcttaaagtttcctaatctatttcagtggtcagaagtagaataattttggagtaagcatctctggaaacaggcaaagtaagtcagaatttattattaaatacctagtgtaaaatgataacattgaattaggaatgatgactacagggaggaagtagagtaaagattgtagatgccattttcatcagaggaaaggaaggacagggacttcattttggagcaatttgctaatgatgaggcaccgatggtactgctaagaaaactggttgaggacagtgaagatgttcagtccttaggctgtggatgtgtcagtggttaaagaggtaaaaacacccagtagaactggggttaagttacaatgataaaaatcagataatttaattatatggaagtgattaaaggaaattagaaaaataatttagaatagagggacgacagaagagcaggggagggaatggaaagggaagaggcagaaagagaggaaagggaataaagaaggagggaaaagaaaggaaagaaagaaaagaaaggaaggagaagaggtatgagaaaacctatgaagtgrtaagaagagattaatctcagtttgggggcatacaaagttgagagacatgaaaaaggaaaaagaaagcaggatttttttagttgctcttgataatctaaagagtatcaaggtcaagggtcacaaaaaacgtaaaaggagaaaaattttagaaaaatcaaacaaaaatctggtagtgtcaaattctgccaacaaattagggaagatgtagacagagaaaggcccataggatttgggaatttggcaatttgatctgtactgattgaatgagagaggttatgcagtagaatgatgaggaagacagattactgggcatgaggagataatcaatagtgattatttagaagagacaagaaagaataaacttaagatggaaaaataggatatcataaggaagaaa

SEQ ID NO: 691387 - DNA, 1353 bp, Homo sapiens
cctcccccaaagagaagagccccaaattagcagttaaaaataaacatagctctttggcctctgattcttcagagagaatgatttcatgggaacattgattagggaaaagaaaaaaaaaaaaggatctactttcatcactttctcttttcttaattgggcttcatttgcagtaagacctagaaaatagactcactagattctagtagtctcattggaccttgcttattcgagaactatgaagtaaacacagcctggtggttcatgtaggacatgtgatgaaatttcacctaatttgaactaaaatgatgcaatgattgcatgttcaaagccttaagtatcacaatatgaattttactttcatttgttaatagacagaccttgaataattctatatcttaaagtttcctaatctatttcagtggtcagaagtagaataattttggagtaagcatctctggaaacaggcaaagtaagtcagaatttattattaaatacctagtgtaaaatgataacattgaattaggaatgatgactacagggaggaagtagagtaaagattgtagatgccattttcatcagaggaaaggaaggacagggacttcattttggagcaatttgctaatgatgaggcaccgatggtactgctaagaaaactggttgaggacagtgaagatgttcagtccttaggctgtggatgtgtcagtggttaaagaggtaaaaacacccagtagaactggggttaagttacaatgataaaaatcagataatttaattatatggaagtgattaaaggaaattagaaaaataatttagaatagagggacgacagaagagcaggggagggaatggaaagggaagaggcagaaagagaggaaagggaataaagaaggagggaaaagaaaggaaagaaagaaaagaaaggaaggagaagaggtatgagaaaacctatgaagtggtaagaagagattaatctcagtttgggggcatacaaagttgagagacatgaaaaaggaaaaagaaagcaggatttttttagttgctcttgataatctaaagagtatcaaggtcaagggtcacaaaaaacgtaaaaggagaaaaattttagaaaaatcaaacaaaaatctggtagtgtcaaattctgccaacaaattagggaagatgtagacagagaaaggcccataggatttgggaatttggcaatttgatctgtactgattgaatgagagagrttatgcagtagaatgatgaggaagacagattactgggcatgaggagataatcaatagtgattatttagaagagacaagaaagaataaacttaagatggaaaaataggatatcataaggaagaaa

SEQ ID NO: 691388 - DNA, 539 bp, Homo sapiens
  misc_feature 435, 436, 437, 438, 439, 440, 441, 442, 443, 444, 445, 446,447, 448, 449, 450, 451, 452, 453, 454, 455, 456, 457, 458,459, 460, 461, 462, 463, 464, 465, 466, 467, 468, 469, 470,471, 472, 473, 474, 475, 476, 477, 478, 479, 480, 481: n = A,T,C or G
  misc_feature 482, 483, 484, 485, 486, 487, 488, 489, 490, 491, 492, 493,494, 495, 496, 497, 498, 499, 500, 501, 502, 503, 504, 505,506, 507, 508, 509, 510, 511, 512, 513, 514, 515, 516, 517,518, 519, 520, 521, 522, 523, 524, 525, 526, 527, 528: n = A,T,C or G
  misc_feature 529, 530, 531, 532, 533, 534: n = A,T,C or G
gaaagaatcaatgttacctataaaatttttacttgtcaataaatagttacatctatgacaggtggcaaacacacctttatcaggacaggcattaaattctagtgtcaggcaaaggagaatgtaagaaaatatcagacaatrtgtctatggaagcaaagtgtttatagaaatcactggataagcggtctttcatccaagtttcactccaattcaaccttatattagcttctcaggccaaccaacagctgctcaatcacatggctgtgtgatcacaggtattggcttttaatttctgcaggataactgtattttggtaaaaataatatttgagcaatagaataagctactcagggaaactctgagaaaacaataattagaagggttgagctaaggcaaatgttctttgatgggaagtttgggcagagggagagaagnnnnnnnnnnnnnnnnnnnnnnnnnnnnnnnnnnnnnnnnnnnnnnnnnnnnnnnnnnnnnnnnnnnnnnnnnnnnnnnnnnnnnnnnnnnnnnnnnnnnatatt

SEQ ID NO: 691389 - DNA, 539 bp, Homo sapiens
  misc_feature 435, 436, 437, 438, 439, 440, 441, 442, 443, 444, 445, 446,447, 448, 449, 450, 451, 452, 453, 454, 455, 456, 457, 458,459, 460, 461, 462, 463, 464, 465, 466, 467, 468, 469, 470,471, 472, 473, 474, 475, 476, 477, 478, 479, 480, 481: n = A,T,C or G
  misc_feature 482, 483, 484, 485, 486, 487, 488, 489, 490, 491, 492, 493,494, 495, 496, 497, 498, 499, 500, 501, 502, 503, 504, 505,506, 507, 508, 509, 510, 511, 512, 513, 514, 515, 516, 517,518, 519, 520, 521, 522, 523, 524, 525, 526, 527, 528: n = A,T,C or G
  misc_feature 529, 530, 531, 532, 533, 534: n = A,T,C or G
gaaagaatcaatgttacctataaaatttttacttgtcaataaatagttacatctatgacaggtggcaaacacacctttatcaggacaggcattaaattctagtgtcaggcaaaggagaatgtaagaaaatatcagacaatgtgtctatggaagcaaagtgtttatagaaatcactggayaagcggtctttcatccaagtttcactccaattcaaccttatattagcttctcaggccaaccaacagctgctcaatcacatggctgtgtgatcacaggtattggcttttaatttctgcaggataactgtattttggtaaaaataatatttgagcaatagaataagctactcagggaaactctgagaaaacaataattagaagggttgagctaaggcaaatgttctttgatgggaagtttgggcagagggagagaagnnnnnnnnnnnnnnnnnnnnnnnnnnnnnnnnnnnnnnnnnnnnnnnnnnnnnnnnnnnnnnnnnnnnnnnnnnnnnnnnnnnnnnnnnnnnnnnnnnnnatatt

SEQ ID NO: 691390 - DNA, 539 bp, Homo sapiens
  misc_feature 435, 436, 437, 438, 439, 440, 441, 442, 443, 444, 445, 446,447, 448, 449, 450, 451, 452, 453, 454, 455, 456, 457, 458,459, 460, 461, 462, 463, 464, 465, 466, 467, 468, 469, 470,471, 472, 473, 474, 475, 476, 477, 478, 479, 480, 481: n = A,T,C or G
  misc_feature 482, 483, 484, 485, 486, 487, 488, 489, 490, 491, 492, 493,494, 495, 496, 497, 498, 499, 500, 501, 502, 503, 504, 505,506, 507, 508, 509, 510, 511, 512, 513, 514, 515, 516, 517,518, 519, 520, 521, 522, 523, 524, 525, 526, 527, 528: n = A,T,C or G
  misc_feature 529, 530, 531, 532, 533, 534: n = A,T,C or G
gaaagaatcaatgttacctataaaatttttacttgtcaataaatagttacatctatgacaggtggcaaacacacctttatcaggacaggcattaaattctagtgtcaggcaaaggagaatgtaagaaaatatcagacaatgtgtctatggaagcaaagtgtttatagaaatcactggataagcggtctttcatccaagtttcactccaattcaaccttatattagcttctcaggccaascaacagctgctcaatcacatggctgtgtgatcacaggtattggcttttaatttctgcaggataactgtattttggtaaaaataatatttgagcaatagaataagctactcagggaaactctgagaaaacaataattagaagggttgagctaaggcaaatgttctttgatgggaagtttgggcagagggagagaagnnnnnnnnnnnnnnnnnnnnnnnnnnnnnnnnnnnnnnnnnnnnnnnnnnnnnnnnnnnnnnnnnnnnnnnnnnnnnnnnnnnnnnnnnnnnnnnnnnnnatatt

SEQ ID NO: 691391 - DNA, 2338 bp, Homo sapiens
tggtctaatcataagaatagcatctgacaaatcccaattgagggatattctacaaaatgcctgatgttagagaatgtcaagctcatcaaaaataaggaaaatctaagaaacagtcacaggcaagagaagcctaaagaaacacggtgactaaatgaaatgtggtggatcttgcataggatcctggaagagaaaaacttcagttaatcatcatgtgtcaaaatcagtttattagttataacaagtgtaccatactaatataagatgttaataatcagggaatctggacttcctttgcaatttttttattctaacaccttcactctgaaataagcagcttatttttgtgtgtgagagatagtagaatatagtataggagatctgtatatatgaagacagtacatggggtaatctttacttcaggaagagtgaacaaagggatcttcagggagagtgagcagtatcactcatttaaagctttttgaatgccttgagactcccactttgtgattggagaaaagtgttcagcctccttgagctaatttaaagacaaatggtagagggataggctttcagatattatcctygttttgaacattttacaacatgtcctgttttctttggcctttctaaatttagagcttctctgagattctggaaggaggcccaagtcacatgtgcacagttttcccaatggcacttccctttacccatgtagcttctctaccacttctgcatcagttcttcatctcctatagtattttttaaacatttcttgtctcctaatgaccctccatcctttgtgctctctctctctctctgtgtgtatgtgtgtgtcctttgtcaccatttattagtgttttaggggaagaagagatacccttaattaatgttcaatatggcaccttaattctgcttgacctataaatctggaattatttttcttaaattgatattctattttttcaatgatttttttcttattgttggtgcagttttagaattgctttagaaagtcatcacagtaaagaaaggagaattaaatcaggaatatatggctctttcctctgttgtgagtgaagacgaggtggctgttaaacaggttgagagttgtggtacttaactcaatctcaccctactcattctgcctataaagataggacacgatcagttatgagttctggatgccacacatgtgagtatctttcaatccataggcccagcctcttgccacttacatcctaagtctaacctcttcttcagggcataaatccaccaaacatttgcttaccagggctgttttattattttttgtaaactcaggaaatgagaagagaggttgatacattttccagtaagattgctaggcttttcttctaccagcatcacccagtaaaattactcttctgaaatgcacactctgagctaggttttttctacacttcatctttggatcactggagagatgagtctcagcacacatggtgattctcggtgtggagacaaggaaaagtcttcactccacatccagtggatttcaaagccatctatctgatcaatattcacttaagcacatcttccttttactgaaatgtttataattttccttgatggtacacctcagccttcctgcttccagaaagaatcactatccttttgtgagccatggttactggtggcggtacccctcaggtgacatatcatggtcagtaaatacaatcaagtggctctatagtgagaattcctgtgatcatatgcaaggaatttaatactctaagtggtatatgaaaacaattgtatttttttcattagtaaaatgggaataatgtgtaacacacagatttgctatgtttggtgatacatacagagtgcctggtatgtaagcaatcaatacatattagctactataattttggtagaaaaaagattacaatccacaaatataagcagagcatggggatatattaagagagttcagttctacaaatatttatcaagtaactgctgtgtactgggaaaacaaggtgaattagatatcattcacctcaaagttttgaagtcattcggaaagatctttgtataagaggatagtcataatacattgttgcatgatgcattgggttgctagaggtatgcataggttgctacagtagcaaggagaagaggcaaataattcggctatggtaggagtgtgagcttaggaaagatttttaggtggagatagtgttcatgtgtggtgttacaaacaggtaaagatgggtgaatattaaggggagagagtatccacgtagcagtgaaatgagacacaataggtatgatcctctaattttattttttaaat

SEQ ID NO: 691392 - DNA, 609 bp, Homo sapiens
ctctatggttacctaaatatagaatttttgcacacatgtttaaatatatctgtaaaatcattttctcaaatggaaattttagaggaaaatatctgcagatgttttgacagatattactgcattgctttcctaacaattggtaccaatgtaagcaatcaccagtaatgtataacataacctatttcccataaatagttgtcaacacatgtacacttaaacttaattttccttgtctaattgaaaggttaaaagatgctatatatctttaaacataccttgcattaattatraaagaggctgagttggtttccatgcatttaatgtcttttctgggaactgacatttcttatctgttgatttggaatgtcacctacatgttatgttgagccatatataattaccatttttataaggaagcagacatgaaaattagtaattttatatagtgtaactcagatagatatataggtagacagagtatatatagctgcatcaaaaatttaattaatatggcttaaaaatacataatgacatgccttattattcatctttttcagaaatatctcagccattcttgaatgttatttttctacctataaagatatcatc

SEQ ID NO: 691393 - DNA, 929 bp, Homo sapiens
atgactccttcaaataaaaaatactgtcagtaagttagaagattttaaaaattttttcttcaatatatcaatataagtaactacattaaaaaataatttgtgtacattatagttaagatagattcataataactgacaattgactttaaccaatcatttgtaatggctaaaaaagagaataatcttagttgtcaaaatacatgcaataactttcttttctattatcattctcttttttgagccattatggttggtattgggttaggtaaagtaagaaacatacagctgcggtttcataggtacagagagctcagaattctgtgagaattgagtgatgagccactcattcctgccatagcttgaggtagtcataagaatattttataagccaaccttcaccagcatctttcttggtaactacctgcatcayataacagctgggaagtgtgtgagggtgggggaaagatacggaagagactgactcaagaagattctgatcctatcttttcagatctcgaatctttttaatattttaaatatgccatagctaaatgtctctatgccccatatcaaacattaaattcagaatgatcagaatgagccacataggacaaataagccttcttcactttcttatttcacctacactcatgtgtggctctaagtaatactgaagcaggagaacattctcagggacatgctcatgctgtcagctgtgactgaaaaatctatagaactggcaattatagaaattttcctttacaaaacttcagttcctggaggaagacatacttgtatttttctgcctgtttgtgttatttaccactttctaattaatataaatttctgtctgaataatacaattcctcaagcgtgaagttatctgactttattacttcagttacaaagcttggttattgcatggtgga

SEQ ID NO: 691394 - DNA, 685 bp, Homo sapiens
cagccagctaactaaagcagaacatatccaaattgttgatagacgatcggcattttctcatttaatttctggcttaaataattgaaataaaaagaaaccttgtatctagtagagattcctttctacctttyaaaattagtaaatacataatttaataataaacaaaaataggatatatgtgtacatgtagatgtatttctggccaaaatctctgaaaggcaaacacaagattataacctgtattaggccccagtgacaggcaaactgtgatcttcatctaaaagtacagcaagcaattaaaaatatcaatagaaatttttaaatggtagttgttaaaagtacagaaacctacataatcaattaaatatttttccatgtaacagactgaagatctcacacatattgtagaagatgtatgagatgtactggataatattatttcaattgatgtttatattactataaatttaataggttaaaacaacccacagttatcttatagttctgtaggtcagaagtccaggcaggatctgtcagattctctgctcagtctctcaaggctgaaatcaaggtcttggctgagggagctgttatctggaggctcttgggaataattagtttccaaagtcacttgtgtgttgtcagaattcaggtttttaaggttataggtctgagttttcccttt

SEQ ID NO: 691395 - DNA, 685 bp, Homo sapiens
cagccagctaactaaagcagaacatatccaaattgttgatagacgatcggcattttctcatttaatttctggcttaaataattgaaataaaaagaaaccttgtatctagtagagattcctttctacctttcwaaattagtaaatacataatttaataataaacaaaaataggatatatgtgtacatgtagatgtatttctggccaaaatctctgaaaggcaaacacaagattataacctgtattaggccccagtgacaggcaaactgtgatcttcatctaaaagtacagcaagcaattaaaaatatcaatagaaatttttaaatggtagttgttaaaagtacagaaacctacataatcaattaaatatttttccatgtaacagactgaagatctcacacatattgtagaagatgtatgagatgtactggataatattatttcaattgatgtttatattactataaatttaataggttaaaacaacccacagttatcttatagttctgtaggtcagaagtccaggcaggatctgtcagattctctgctcagtctctcaaggctgaaatcaaggtcttggctgagggagctgttatctggaggctcttgggaataattagtttccaaagtcacttgtgtgttgtcagaattcaggtttttaaggttataggtctgagttttcccttt

SEQ ID NO: 691396 - DNA, 645 bp, Homo sapiens
tatgaggcccgtgcagctgcgcagctgcctgcccttgaagctcggatttcaccaggtaaagcgcgatcactttctccaatcttatgtaagcatgttgaataatttaggggacaaccaaaattatagaacctccagctgtaattccaaacctccaagaaaaaatgggggaagagaaaactttcaaaatcacgtgatgcggtgtggactgaaatgattyactctacattcatgttaatggttgtcgttagaaagatttcaggatataatcaaggactcagtcagggaaaagatgaattgactaatttgtaaatttttattttttaattaaaaatctgacaaaatacaatataaaaatatttgtttatttgcgttggtaaatacttgtgtgtaaacagtagtctctaaaaatgtatgtgtgtatgtgtatagtaaaaatataataaaataacttcagcctgtaatcccaccaactcgggaggctgaggtgggagaatcgcttgaacccaggaggcagaggttgcggggagctgagatcacgccactgcactccagcctgggcaacagagtgagactccatctcaaaagaaaaaacaataaccaaacaacttcaaatcacttctgatgtccattaaaaaacaaataaag

SEQ ID NO: 691397 - DNA, 645 bp, Homo sapiens
tatgaggcccgtgcagctgcgcagctgcctgcccttgaagctcggatttcaccaggtaaagcgcgatcactttctccaatcttatgtaagcatgttgaataatttaggggacaaccaaaattatagaacctccagctgtaattccaaacctccaagaaaaaatgggggaagagaaaactttcaaaatcacgtgatgcggtgtggactgaaatgatttactctacattcatgttaatggttgtcgttagaaagatttcaggatataatcaaggactcagtcagggaaaagatgaattgactaatttgtaaatttttattttttaattaaaaatctgacaaaatacaatataaaaatatttgtttatttgcgttggtaaatacttgtgtgtaaacagtagtctctaaaaatgtatgtgtgtatgtgtatagtaaaaatataataaaataacttcagcctgtaatcccaccaactcgggaggctgaggtgggagaatcgcttgaacccaggaggcagaggttgcggggagctgagatcacgccactgcactccagcctgggcaacagagtgagactccrtctcaaaagaaaaaacaataaccaaacaacttcaaatcacttctgatgtccattaaaaaacaaataaag

SEQ ID NO: 691398 - DNA, 613 bp, Homo sapiens
ttttaaaattaatttgtgtaaagaagcaccaactgttttaataatttttacatgcttttatatctatagttatatcattctttctaaatgttgctaatttctgttttgtgtgtttttataaaaacgattgctacagttttgtttgccttttaattgtctaactatggtattaatgtatttttcccattacttttcatttttctttttctatagctccttttggtttatccttttaattgtctaactatggtattaatgtatttttcccattacttttcatttttctttttctatagctccttttggtttattagtggggktttttttggtttatttatctgtttttccacactctatataaaagcttacgttttcttgcttgcttttacattattgactttcaacgtataaattttcttctgactattgctctgttcacattttatagtttttacatatgaagtatttattgttgtttgctacaagataacatgtaatttttatttcaatatactttattaactaacaaatatttgggattatatcatcttagtccattaatattttgatttttcctgttgtcattgatattttctttatttatataacattc

SEQ ID NO: 691399 - DNA, 609 bp, Homo sapiens
taatttttttgttttgccagccgtaagccttttctgcacaattatttttataattttagagcctagaacagtgaatgacacttaagttaggtggatgtgatggttaattttatgggccatggggtgcccagatacttggtcaggcattattctgggtatttytttgtgggtgtttttaggtgttattaacatttgaatcagttacctgcataaaactgattgtcctccctaatgttggtgggccttgtccaatcagttgatagcctgaatagaaaaaaaggttgactgactcctccaagtaggagacagctcttcctgcctgactgccttcaaactgggacactagctttttcttgccttcagatttaaactgaaacattgcctcttcctgggtcttgaacatgccagccttcagcctgtaactacaccattggctcttctgggtctccagcttgtcaactcaccctgtaggtcttaggacttgtcagcctccataattgggtaagacaatctttatgataaatctctttaaatacacacacatacagagacacacacacacactcatcacatctgttttgtttcacacacacacacacacacacacac

SEQ ID NO: 691400 - DNA, 3090 bp, Homo sapiens
cacaaaccaagtgtgttggtccatttgtgttgctgtaaagaaatatctaaggctgggtaaattataaagaaaagaggtttatttctcttatagttagttaggctatacataaagcacactgccagcatgtgcttctggtgaggactttaggaagcttacaattatggtggaaggcagaagagagcctgcatgtcacatgaagagagagcaagaaaacacaaaagtatgtgtataagactattttttgttaagcaaaacctgtatgcatatacattgtagatgtttctgtgtcagcaaattgttacatgaacacaaaagaaaaaatgaaaaataaaactagggattctgatttgcatggaaggaaacacaaaaattattaaaaagagtaagtaaaatctttagcagtggaataaaaatgtcaagaaatacaaaatttacaactgtaattcattattttgggggatcaagtttctttatcacagaaattctttcaacttttaaagctgtaaaagctcccgttttgacttattgatgctcaagccactgagagctatcataagatcatcttgacttgagattctcaatgaacacagtgaaaaaattagatatgtaaagtaaatgaagaaagtgaggaatgtgaagtcaaaataacatgatataaccaaaaagatagaggactgatatcttcatgtgagtaagccagtctaataacttcataatattatactccattgcttttaaattataagaaataattgttgctaaaataattctagtgataaaatatagccagtatgcttttcaaatgaaaaacttctaaatgtattgaatatataattataataattacaatttagtttaccttacaggaccattcatttcaagaattcttggtcatctcagcagaccgctgggttcctttgtgcataagattccctaggcaatttggaagagtcaaggaaagccggtaattgatgattgtatgagcaaatatcaggattaagggacatgggtaataatggtcggtccacaccaggtcagagtctcttactatggcaggagaaagaaggcaaaacacagctcaagtttcagtacactctcaaggggacaaagtaattgctttagagtaagtctaaacatgggaggcaggggcgtgtcacacaaagaactctttagcccgctccttgacaaatgcaacttaccctaaaagaatatggctactttgggtagaatgaaagaattttatcacttagaaatccaattatctaacgtggattgaaatcactgtcacacagagagaaatttctctgtcgggtggaaggagctatggctcctaggtgataagctggagcagggatggtaacgctcacctgactgagtaattaggagcaactggagaggagtcataaactgcagtaatggttgaggctgggaaatgtaaggtatgggagcaatagtgagttgatattgggaattgagatagtgtgaacccttggaaaagttgccactgggtattttttcccttctaacctttctagtctcttgggaggagttggaggagttaaaatttttctaactgtgggtctggagctcagtgtttccaggataacagcttaggccattgattttcctcatgactggtgtgtaatagaaataatatctctgcattcatttattaatttgttcaacaaatatgtattaagcttgtccatggcagattttactttgtgtatatgtaaaccaagcagatagattagctatgcattcacccatgctccctaggccccaacccgggagcactagctcttcctaagtataatattctgtgtttccagaaagtactcaatcttgatttatgccacagttccctcacctgtccttcataccaggaacagcttttgtctttgatccatctttctttgtatctattcaagatctacctccagccctggcttatctgtcaacacagtccctttatcccctgttgcataaattcatcatgatcttaggtcttctgatatttctaacttcaatcctcawtgctgttatggattaaatcttttaacccacttgctattatattgatgggattttgaaaagaggaatgataaatatgacaggaaggtattttatattggaaatagaacaggtgatggttagggtaagaaaaggagcagaggtgaggagattagatgaagagactactgtaatagtacaagccaaaagattttgcttctgttttatttgaaatatgatttttcttttaatagctaggaggaaaattggattcaagtatgtaaaacagtaaaaaagttaatttaattattaaacactgtgtaacagtcttatttcagagtttttattaatagatttatcatgttttgtcatgttttaatggaatcacttctcagttgaaaatattactgctgatactattaaaagtacatatttttaatatctgagtctatataattatctcaaacttccattttgaaaggacttactttggcagttacataaattcctgcaattatactagacagacaaatatttgtacagttaacaaaaacaaatactttttttaaataaagaggcaccaactagtgaaattgaaaagcaaagtaaaatgtaggctgagtttcagaactggatcttcaaaaatgggaactcagttagggcccagttagaaacagtatcaaaagtcttcatattcaatcagaacctaaactctacccataactgccacttgtaaaaccatgtgcctctttcttttggctatttagtccaattccattatactcactataggtgtttgaagaaagaatgggaaagcccaaactaatcagtttttatagtgttgtaaatctgtgcaatggccaaaagctattgctctgctgttttctgcagcagcacagaccacttttcctctgggcagtcactgcttgaaataattactgacattaatgatgcaagctcctgaatttaatagatctaggtttatgttgtcatccatcactgtgcaacatcttctatcttctctgctattaccaaaagtttctttaagtgttttaagatattttatttgaccca

SEQ ID NO: 691401 - DNA, 1940 bp, Homo sapiens
  misc_feature 661, 662, 663, 664, 665, 666, 667, 668, 669, 670, 671, 672,673, 674, 675, 676, 677, 678, 679, 680, 681, 682, 683, 684,685, 686, 687, 688, 689, 690, 691, 692, 693, 694, 695, 696,697, 698, 699, 700, 701, 702, 703, 704, 705, 706, 707: n = A,T,C or G
  misc_feature 708, 709, 710, 711, 712, 713, 714, 715, 716, 717, 718, 719,720, 721, 722, 723, 724, 725, 726, 727, 728, 729, 730, 731,732, 733, 734, 735, 736, 737, 738, 739, 740, 741, 742, 743,744, 745, 746, 747, 748, 749, 750, 751, 752, 753, 754: n = A,T,C or G
  misc_feature 755, 756, 757, 758, 759, 760: n = A,T,C or G
gcctatagctgatcataataccctgtgataagtgctgcaagaggtgtaagaacaagacacgggaggcctagaagaaacgcattaatacagccagagaaagtatcctaggcgaggcgtcctttgagcaaggctttgaaggttgaataggtgttcatcaggtttaaaaagagagaaaaggcgttccaagtggagggaaacacatgtactaaagtatacagtgtgaagctaggaaggtcagtatatgaagggtcttggacaccggactaaggaacctggggactagctgcagggatggggcagggctgataatgggatcagattcgtaaaccagaagatgactcgctcatggggcctctgggaaggacggagttagtgaaagacactccaggcaggaagatggtaaaacattcccaggatatcccatccttcctcagtggatgctctatgaccaagtgttaaagccattgataaaaatggggccaaaccaagcacaaagaattcctctgccaatctctgaatgacaagatgctttgtagggaaagaaaacatgtacagtttggaagctatacatcagaagtggcaaaatgggtcaaaactggcccatatgggctatgatatatttggcatgagcaaaaaaaagggtacggagcactcatccccnnnnnnnnnnnnnnnnnnnnnnnnnnnnnnnnnnnnnnnnnnnnnnnnnnnnnnnnnnnnnnnnnnnnnnnnnnnnnnnnnnnnnnnnnnnnnnnnnnnngttggttgcaacaccgtaccaggagaaagggtcaatgagcttgaagacaaatcaatagacattttccaatctgaagaacaggagaaaaagaatatattagttagcttgattgaatcttcctacggggtatacatagatcgaaacatcatagtgtaccccataaatatacacaattattatttgtcaattacaaataagtaaaaaaaaagtgaataaaaacaagatagcaaaagaaaatgaacagaggcacagtgaccagtccaatatgcatgtaattgaaactttagtaggaaaagacagaacgtgtcaggaaaaacctgggcatagtggctcaggcctgtaatccagcactttgggaggcggagatgggaggatcgcttgtaggccaggagtttgagaccagcctggccaacatgatgaaaccctgtccctagtaaaaacgcaaaaattaaccagatgtggtggtgcgtacctgtagtcccagctactcgggaggttgaggtgggagaatcagttgaacttgggaggcggaggttgcagtgaaccaagatcactggtgtgtgtagtataacaacagggagggtggggactgtggccaaaaggagtttcaaccaattgttgccatgcagaagtgaggactcaccattgtcagatctcactttccagtagaaacaaggaattcagatttgtatttaaaatgcccgtataatttaggttgattgctaattactaagaagacagaactatatgcgttacactatccaggcaaacaaaaaccttgggcagcagtatgcaactctcgtttacagacatcttaaaatgtgctacctaaaactggatgtgacactcagaggtggtggctaacctgtcccatcaatccttccttgggaaagcctatttcctccctctcaatatccactatatcacgtcttcatctcccgtaccaggcacaggcccacagtgtcctgaccagtcagctctttcttttttttaaaattatattttaagttctagggtacatgtgcacaacgtgcaggtttgttacatatgtatacatgcaccatgttggtgtgctgcacccattaacttgtctttacattaggtatatctcctaatgttatccctcccscttcctcccaccccatgacaggccccggtgtgtgatgttccctatcctgtg

SEQ ID NO: 691402 - DNA, 607 bp, Homo sapiens
gattccagtctagtgtgggatggtttgggaaggtttcctcaaggaagcgccatttgaactcaggtctgaaggatgagtaggagctgtctggatggagatgtggggcatagctttgagtggagatacaagggtagcaaaaatgaaggctacttttgcttgcctgacattcatttcaacttctttgggtgacagaacctcaattttcatttgggaaacttcccctccttcactcatattcaatatggttgggtggggctccctcctcctggagacagacatgtgacccagggcacagataatcagagcacatcactctgacctcaatgaggggacrtgtgacatatgctgggccaatgagaactctgtctgggacttttgctaaaactattgtcaaacagaaactcaatctccaccaaagctcctaagcatagaggtgttggcagccatctttgcagaacttgagcagacccgacctaaaatgaagccaacatagaggagagcagaactgagagacagagagtggagtgagtcttgatgtatatcaggtccctggatccagccatacctgaaggcagtgtcagctatttatatcattaaattgtttttc

SEQ ID NO: 691403 - DNA, 2294 bp, Homo sapiens
  misc_feature 947, 948, 949, 950, 951, 952, 953, 954, 955, 956, 957, 958,959, 960, 961, 962, 963, 964, 965, 966, 967, 968, 969, 970,971, 972, 973, 974, 975, 976, 977, 978, 979, 980, 981, 982,983, 984, 985, 986, 987, 988, 989, 990, 991, 992, 993: n = A,T,C or G
  misc_feature 994, 995, 996, 997, 998, 999, 1000, 1001, 1002, 1003, 1004,1005, 1006, 1007, 1008, 1009, 1010, 1011, 1012, 1013, 1014,1015, 1016, 1017, 1018, 1019, 1020, 1021, 1022, 1023, 1024,1025, 1026, 1027, 1028, 1029, 1030, 1031, 1032, 1033: n = A,T,C or G
  misc_feature 1034, 1035, 1036, 1037, 1038, 1039, 1040, 1041, 1042, 1043,1044, 1045, 1046: n = A,T,C or G
tgggactattgggccagtttcagattcagttcttcctcaggctcctcacctgatttcagctcagcctctctccttgggaagcagagatagttccccagctctccatataaggaggagaaggttttatgactatatatatatatatatatatatatatatatattttttttttaaactagctgggcatgatggcacacatctgtagtcccagccactggggaggctgaggtgggaggatcccctgagcccaggaatctgaggcagatattgagagctgaagccagctggacttgctgggtccagtggggacttggagaacttttttgtcttacaagagggattgtaaaatgcaccaatcagcgctctgtaaaaacgcgccatcagcactctgtagctagcaagaggattgtaaaatgcaccaatgagcactctgtaatacacaccaatcagcaggatcctaaaagtagccattcgcagggaggattgaaaaaagggcactctgataggacaaaaatggaacatgggaggggacaaatgagggagtaaaagctggccacccagccagcagtggcaacctgctggggtccttttccacactgtggaagctttgttcttttgctcttcataataaaccttgctactgctcactctttgggtctctgccatctttaagggctgtaacactcactgtgaaggtctgctacttcaaccaactcccgacacaataggagctatgattaccccactggactccagcctggctgataaagcgagaccttctgtttaaaaagaaactataatagccggttttaggtgtttatgcctttagtatcatcactttggttaagcgggactgttgggttcgatgatgagggtagttattcgcacttgtctaagacgtggttatagctgggttataatgcgtacgattcaagaacttattttcnnnnnnnnnnnnnnnnnnnnnnnnnnnnnnnnnnnnnnnnnnnnnnnnnnnnnnnnnnnnnnnnnnnnnnnnnnnnnnnnnnnnnnnnnnnnnnnnnnnnccgcgctacatcactcgtaccatttggccttgatactgattgaaaataaagaaaactttacataaatttaaatcatgtacaaaaatttacataaaattaaattaaaatcatttacataaatttaaattttcaggttttcatgaaaacccaggatatctggccacactgagctttcattcttaaatagcaacaatcactagatcctaacagcagaaactctcaagttcttcccattcaccaccagtccctattgccctacacatggcccgatccctccagacattttagccagcctgtctaggaataggttcaagaggacttactatggcaaaaaaaggacctgaacctcaaaggtttttattcagaatggcaaacaaggctgagycatggtggaaatcacaagccctcaactctggggatgtcatggatagtggtatgtaagctgggatgggaaattggactggagtgttcaggtagcatcagcatacacacaggctctggggccctcaggatgaaactaccaggtatggagcctcaggaacataaaccaccccagttaagcctccaacacaggtgtcctggctgcctctccaaggccacatccacctctccagcttgcctgactcagagcattctcagagctcacttctcccctaagatgttcttggctctcctagaactctgggcttgtcttctcagacttggcattaaataattaattattcagtttgtggctaaaggtctatgcttcagttaagggtcttagggtgcaagcaacagaagtggactcaggctaatattaatatatgccaaagggaacttactggagtcatactaggggctcataaccaagtgaagactaaagaacctggctggaaccaaggcaggaagcaaagaaatgtctgagggctggctgacgggccatgggtcagccccttcagggaagaaggagggtcctaggctttactcccatcagctgtagccaaagagtggaggtaagccctcaaagggaaattgtcagggaattaatctggatgtgccctggtatagatttcagctgggaagtatccatccaagtattttatacaaatgtaagacaaaaccaaagtttaaaaaaatacactaaaagtaaaaagtaaaatgaaacaaacctacaaaaaccaaccacacaaatcattttttaaaaaaaagagtaatttgattatacatccttggtaggatataccctgaaatccttaagaagaaaaa

SEQ ID NO: 691404 - DNA, 2294 bp, Homo sapiens
  misc_feature 947, 948, 949, 950, 951, 952, 953, 954, 955, 956, 957, 958,959, 960, 961, 962, 963, 964, 965, 966, 967, 968, 969, 970,971, 972, 973, 974, 975, 976, 977, 978, 979, 980, 981, 982,983, 984, 985, 986, 987, 988, 989, 990, 991, 992, 993: n = A,T,C or G
  misc_feature 994, 995, 996, 997, 998, 999, 1000, 1001, 1002, 1003, 1004,1005, 1006, 1007, 1008, 1009, 1010, 1011, 1012, 1013, 1014,1015, 1016, 1017, 1018, 1019, 1020, 1021, 1022, 1023, 1024,1025, 1026, 1027, 1028, 1029, 1030, 1031, 1032, 1033: n = A,T,C or G
  misc_feature 1034, 1035, 1036, 1037, 1038, 1039, 1040, 1041, 1042, 1043,1044, 1045, 1046: n = A,T,C or G
tgggactattgggccagtttcagattcagttcttcctcaggctcctcacctgatttcagctcagcctctctccttgggaagcagagatagttccccagctctccatataaggaggagaaggttttatgactatatatatatatatatatatatatatatatattttttttttaaactagctgggcatgatggcacacatctgtagtcccagccactggggaggctgaggtgggaggatcccctgagcccaggaatctgaggcagatattgagagctgaagccagctggacttgctgggtccagtggggacttggagaacttttttgtcttacaagagggattgtaaaatgcaccaatcagcgctctgtaaaaacgcgccatcagcactctgtagctagcaagaggattgtaaaatgcaccaatgagcactctgtaatacacaccaatcagcaggatcctaaaagtagccattcgcagggaggattgaaaaaagggcactctgataggacaaaaatggaacatgggaggggacaaatgagggagtaaaagctggccacccagccagcagtggcaacctgctggggtccttttccacactgtggaagctttgttcttttgctcttcataataaaccttgctactgctcactctttgggtctctgccatctttaagggctgtaacactcactgtgaaggtctgctacttcaaccaactcccgacacaataggagctatgattaccccactggactccagcctggctgataaagcgagaccttctgtttaaaaagaaactataatagccggttttaggtgtttatgcctttagtatcatcactttggttaagcgggactgttgggttcgatgatgagggtagttattcgcacttgtctaagacgtggttatagctgggttataatgcgtacgattcaagaacttattttcnnnnnnnnnnnnnnnnnnnnnnnnnnnnnnnnnnnnnnnnnnnnnnnnnnnnnnnnnnnnnnnnnnnnnnnnnnnnnnnnnnnnnnnnnnnnnnnnnnnnccgcgctacatcactcgtaccatttggccttgatactgattgaaaataaagaaaactttacataaatttaaatcatgtacaaaaatttacataaaattaaattaaaatcatttacataaatttaaattttcaggttttcatgaaaacccaggatatctggccacactgagctttcattcttaaatagcaacaatcactagatcctaacagcagaaactctcaagttcttcccattcaccaccagtccctattgccctacacatggcccgatccctccagacattttagccagcctgtctaggaataggttcaagaggacttactatggcaaaaaaaggacctgaacctcaaaggtttttattcagaatggcaaacaaggctgagtcatggtggaaatcacaagccctcaactctggggatgtcatggatagtggtatgtaagctgggatgggaaattggactggagtgttcaggtagcatcagcatacacacaggctctggggccctcaggatgaaactaccaggtatggagcctcaggaacataaaccaccccagttaagcctccaacacaggtgtcctggctgcctctccaaggccacatccacctctccagcttgcctgactcagagcattctcagagctcacttctcccctaagatgttcttggctctcctagaactctgggcttgtcttctcagacttggcattaaataattaattattcagtttgtggctaaaggtctatgcttcagttaagggtcttagggtgcaagcaacagaagtggactcaggctaatattaatatatgccaaagggaacttactggagtcatactaggggctcataaccaagtgaagactaaagaacctggctggaaccaaggcaggaagcaaagwaatgtctgagggctggctgacgggccatgggtcagccccttcagggaagaaggagggtcctaggctttactcccatcagctgtagccaaagagtggaggtaagccctcaaagggaaattgtcagggaattaatctggatgtgccctggtatagatttcagctgggaagtatccatccaagtattttatacaaatgtaagacaaaaccaaagtttaaaaaaatacactaaaagtaaaaagtaaaatgaaacaaacctacaaaaaccaaccacacaaatcattttttaaaaaaaagagtaatttgattatacatccttggtaggatataccctgaaatccttaagaagaaaaa

SEQ ID NO: 691405 - DNA, 654 bp, Homo sapiens
cacaaatgtaggtagataattaaatgacagagcattctcccaagctttgaaagcaatggttctcaacactggcttcaggttggaaccacctaggcctccatctcagatcaatcaactcggaatctttagcggtggggctgagcttcacctttttttaagttcctggtgattctagcatacagtcagggttgagtggttcccaaagtgtagtcccagagcagcagtgtgagcgtcacctggggacctcagagtttctcaagcttcatagaaatcactggaattgggaggcctgggktgaggggggagcctgactatgtgtgtgtctaacaaattctcagatgctgctgaggctgctggttggggggtcgcactttgagacccacaggtccagaggtcttctttctctctagtcctttagtgaaagaagggttggaggaggtgacagatactgcttcctggtccagggatgagaagccctaaaagggtgggacagagattgctctaacaattgttctttttctttactttcccgtttttgtggattaggaacctgagaccttgggaggagcagaaacttgcccaaagcccaggatcaatcttggaaacactgacttagcaggatatttcctgagcacttgtgacgtgccaggggca

SEQ ID NO: 691406 - DNA, 1173 bp, Homo sapiens
tcagtgaatgtaaccagaagcgctttctcttgaagaaaacatgtgcaccacccaagaaagagaaaaatttttattaattcattcatcaagtactttgtgagtgcctactctgtcctcattgcagctaggggttttgagtaatcaatagtgagtagtttgtatcctcatggagcttatactaacaggcaaagacaataaataagtaagtgaataaagcagcttaaggggagacagtagaagtgctgtgtgttggatgttattttagacagggtggttgggaacacctctttgaggaggggatatttaaataaagagatgaattaaatgaggaactgaactatgtgaagaactgggagaaattattccagatagaaggaaaagcaatgttccaagaccttgatgtaagcgtgtcttgttactttcaaagaaagtatctcattatgtggaatgatttagttgaagtcatgcttatgccccattctttaaaaagtttcttggatccctttttaaaatgtgttttgaatatttgaaagaaaatgctaattcctgaggtactaatttaacctcatttccagtgttcaagtcatcttgacatcatccctatcagagaacttttgtaaagcccctgtgataaacatgcaagggaccatctcacagattcttccatccatggtttctatgtttatcaaaaattaaaaccatagccacatgcagtggctcacacctgtaatcccagcactttgggaggctgaggtgggcagaacacttgaggccaggagttcaagaccagcctggccaacatggtgaaacyccatccctactaaaaatacaaaaattagccaggtgtgatggcatgagcctgtagtcccagctacttgggaggctgaggcaggagaatcacttgaacccaggaggcagaggttgcagtgagccaagatcacgccactgcactccagcctggacgacagagcgaggctccctctcaaaaaaattaaaaaacataaaaatcacaacctagagtcaaacttagcctatgtctagctctggacacttgcattggtgaaggaacaaagaatgctaagacttctcaaagtttcacttcttcagagttgtcactcataccttgaaccatctgtcccacatgacatccccactatgtctctaacttcacca

SEQ ID NO: 691407 - DNA, 630 bp, Homo sapiens
gtcaagtagggctgagagtcatcagactgtgatgcaaatctgaccctgagtgaaagagagagtgatgaggttgcataaagtgtttcagactgtcctgcacctaaggatagttcacgaggcaatcaaggagtcatagaatcaaagtaagccatcagagaacttcatgtttccaggagcaggcctagcctggtattccttccatgattagttattctctgtgagcaacctgcgggaagaatgcatttagggtaaatgccagaaaggtttccagaggcatctggggtccttgatcaattcagcttcctgaacttggagatctgctaggcataatcmtatggccaccaaaccttcaatattgccgtgcctcatgccttcgctatttggttcgtcttatatcatcaccatagagttttttaaataaaatattgatatgtgatcaagttattcctctcctcacataactgagtggctcccagttgctttcagaatgatcctcaaactttccaacacaacagagacttggaatttggtctaagttttccttactattttcagctacctataccttctatgctctaactccaccctacttctctttgcccattgtgttaggccattcttgcattccta

SEQ ID NO: 691408 - DNA, 666 bp, Homo sapiens
gttttgattgttagttttattgcaaagaaatatttttacattaataacaaaattattaattttaatcttaagtgtatgagtcrtctagctttcacaatgaacttatagtcacaaaatgtattttattgtgcacaaagagcaattgaatgattaagataagcatttgattacactgctaaactctagacatgtgctggagacaataattgatacgtcattaatgctcagaacaccaggagaatcaggcaaatatgtttgacagagcttatatatactaatatcttctccctactcccttttcaaaaaaaacctcagtatttcagcgtttcaaggctgtggaatgctattagaagaaatataaggtggtgatgtaatagaggggttgtattagtttgcttggggcctgccataagaaagtgccacagactgggttggttaaacaacagaaattgattttccctcggttttagatgctggaagtccaagatcaaggtgtcaacaggtttggtttctcctgacacctctctccttggctcatggatggccaccacttgctgtgtcctcatgtagcttcttgactgtgcaggtgtaaccccagtgtctctttctcctcttataagaacgccagtcatattggaccagagcctactctaacggcctcacttt

SEQ ID NO: 691409 - DNA, 1433 bp, Homo sapiens
tttttagctcctgtgtcagagatagggtcttgctctgacacccaggctggagtgcagtgatgtgatagaacttctgggtctcccaagaggctaggattacaggcacttccaccaccatgccccactcacatctcagtgtctatatcctggggctacgaccttcatgatctagcttttatccccctacttctccctattcccttccctggctgcagcatcctcggtgtatttccttgaaaccttgattgctgttgacttgttttcccttcttaggtgagaccaggaggctaaagggagcttcagtgggaggaatgcctctactgtgataaactcttagcagagtctttcttttggagtatcagcctttattaaggagaagactgagctatttcacaatgattaatcttctcttccacctgccagagccatgaaaaaacatcttttcagatgtttactgtgagaacctggtggggttcctaaatataaagccctttaaagtgtgggagacccttgggaggccgaggcgggcggatcacgaggtcaggagatggagaccatcccggctaagacggtgaaaccccgtctctactaaaaacacaaaaaattagccgggcgcggtggcgggcgcctgtggtcccagctactcgggaggctgaggcaggagaatggcgggaacccgggaggcggagcttgcagtgagccaagatggcgccaccgccctccagcctgggcgacagggccagactccgtctcaaaaaaaaaaaaaaaaaaaaaaaagtgtgggagacccctacccctaaatatccagctcctaatagtttctcactctcacagtaattcatacacagcccacagcaattcattacaattaccaaatgaatgttcctatcagtgtatggcaccagcttgttctcttccaggtaagtagatctcaggtatgtctctctggatgcacccgatgagtccaagaaaagttactgattttcagttggttcaactgtttcttgtcataggccaagtatgacgtccaaattctttatatgtcagagctgaacgagactcctaaggcttttttttttttttaacttttttcttttcttttttgatgtttagaagatatggcagtattccagtacgtgttaagagtatcctggatgggaggatggcaaccactaaagccagtctctagtcttttcaattccaccaagttcttcgaagaatgaaatgacttcttccggcaatcacagccttgcagaaaatctgtgctcctcgagcataaatgctagttgaagctaacagggacagagttgattaatgaactaaaggtacactgctgctcctgttaatacatgcaaagtttacatgttcccarcatcaatgggcttttgcataactgtgatatcttctctgagctaataatctaggttgaggta

SEQ ID NO: 691410 - DNA, 651 bp, Homo sapiens
taaatcaattatgatttattcacgtgatgtaatgcaaaggagccatttaaatcatattttggacaaatgtttatgcattagggaaaagttcacaatatgctttaagtgaggataaccaattttaaaagcaacaaacaaaatggcattctacatttctaaaatttagcaatattttatagctgtctttcacctatatgtttccattaaaagaactaaaagaaaccattgcaaaccagatgtcaaaagaaaggaaaaaaattacctttcccactgccttaacaaaccaatcattttcatgtttctgtgttcgtttcyagttcaaaatgacagtcatgcagtgcttttcagtgctatattatgtgattttaatttttcatctttacacttttctacattccccatctgttctacaacacaattatactccccacatattcaccacgctgatattattaacattaccagtcagctgggacccacctccccttccacaggaaggtcatctccttcaccttatcctcactgaaggatttcctatttgttgtctaagtgtaatctccacctgacctgggaaatcccaaaaaagggtctcccattactacttgctggtgaaatcctaggcccatgcttcagtcttcccatagccatctg

SEQ ID NO: 691411 - DNA, 641 bp, Homo sapiens
tcactacactctcccagtatcaccatcagctctgagggactgtcttctttctaaaatgacccacaggaagccaagaatttttaggactgaagggtcaatcacagtcactcgttcattcagctgaagagggaactggagcactgggactgggcgaggagcagtgggctggaggcaccgctggctctgatccaatgtaggaagtgggctgaccaaaggctccaggccagctccaatgggtaagagtgggcagcccgcatcctcaccacaccaaggcctggcagctcatcattcattctggcacctgccctctagccaggcactgtcccaggctctgggaatacagcagtgaaaaactagacaggtaaggcccctgcccgcacggggcttccattccatagggagagacaggtggaaaaaattcaggaacraggggacatcaaaggctgtgaagcggaatgagggaaatgaaacacggtgatgggctagagaggaacaggggcaggaaagtcctcttgatttcaaagaggtgccacaggagcttacctgaaggactgtgacagacagaataatacccttggaaaacatccacatcctaagccccgagacctgtgaatatggtaccttacatagcaaaagggact

SEQ ID NO: 691412 - DNA, 641 bp, Homo sapiens
tcactacactctcccagtatcaccatcagctctgagggactgtcttctttctaaaatgacccacaggaagccaagaatttttaggactgaagggtcaatcacagtcactcgttcattcagctgaagagggaactggagcactgggactgggcgaggagcagtgggctggaggcaccgctggctctgatccaatgtaggaagtgggctgaccaaaggctccaggccagctccaatgggtaagagtgggcagcccgcatcctcaccacaccaaggcctggcagctcatcattcattctggcacctgccctctagccaggcactgtcccaggctctgggaatacagcagtgaaaaactagacaggtaaggcccctgcccgcacggggcttccattccatagggagagacaggtggaaaaaattcaggaacgaggggacatcaaaggctgtgaagcggaatgagggaaatgaaacacggtgatgggctagagaggaacaggggcaggaargtcctcttgatttcaaagaggtgccacaggagcttacctgaaggactgtgacagacagaataatacccttggaaaacatccacatcctaagccccgagacctgtgaatatggtaccttacatagcaaaagggact

SEQ ID NO: 691413 - DNA, 607 bp, Homo sapiens
ggttaattggtttctttaagtctttggcaaagacttattgtttgagagcacagattctctctgtgcttcagagaaccaggagttctagtgtttgaggacaagggaacagctatgtttaagctcaaaaaaagagaaagaaagaacttgcccttcctctgccttttcatactaatccatatcagtgaggaggcatcttctttactggtaatgcaaatgctaatgtcttctagaaatacccttacagacagactcagaaaaaaatgttttaacagctatctgggtacccctaagcccagtccaactgacacataaaattaaacagtrcacgaggtatgtatgcttatccaaacatgtattcttaatttctatatttatcttattgtgaactgttaatagtttaccaattggccatgacccagtccatgggttacacttcaagtggcagtgatgtaaatgacaatatgcactatttaaaatcagaacaacaaaaggtggttatttagttgaaagaatctacatccaagcaaatgaagttccaaaattccaaaactcaactctaaattctccatgtttttctttcagacttgaaatactggtaagtatttta

SEQ ID NO: 691414 - DNA, 1519 bp, Homo sapiens
  misc_feature 934, 935, 936, 937, 938, 939, 940, 941, 942, 943, 944, 945,946, 947, 948, 949, 950, 951, 952, 953, 954, 955, 956, 957,958, 959, 960, 961, 962, 963, 964, 965, 966, 967, 968, 969,970, 971, 972, 973, 974, 975, 976, 977, 978, 979, 980: n = A,T,C or G
  misc_feature 981, 982, 983, 984, 985, 986, 987, 988, 989, 990, 991, 992,993, 994, 995, 996, 997, 998, 999, 1000, 1001, 1002, 1003,1004, 1005, 1006, 1007, 1008, 1009, 1010, 1011, 1012, 1013,1014, 1015, 1016, 1017, 1018, 1019, 1020, 1021, 1022: n = A,T,C or G
  misc_feature 1023, 1024, 1025, 1026, 1027, 1028, 1029, 1030, 1031, 1032,1033: n = A,T,C or G
gagccagatcattttatggatgccaatagttggagttctttggtcagctattgattccgtcagtcaattggcatccaagttacaggagtgatgccatgaagccaagcagaaaatccaaaaaagtggcctttggaaggccttgcttgacttgtgcagcccctatatcttaaccataaatgtatatattagaataataaaaaatatttcgtaaaatataagrtgcattttaaaaataccttattttgttaaaatttcctagcacagtattttaatttctccaagaaataatataaaaaaattaaaagaggaataatttgtatcattgctattttttctgtctctgatggtaactaattcttactgagggtattgtgttgatataattgcttctctgttccagtaagcataatggatttatcctgttttatgtgtgtataaatatgtgtgacatacagggggaaaggtccagtatttcccagtgttaggaaatatctttgtttgtctattgacctaactgatcctaaggtagcttcatccaaagactcccaccatttccattatttttgtgggtgatatgtatttgatgattttagaactgttgataatcacaaacaggagacttacctttttgtctcccacactcaaaaagtgtgatttgccaattcacacacaactaaattgtgacagaaataaaaaaaatattgaattagagaagaatttaggaaccccagaggtaatatcataggactgttaaacattatttggtattattggatataaaaactaactttaatttttatttgtatccatcaaaactgcttaatttttataacttttaaggcagtgtttatttatgctatatttgattgtgaagtttatttgcctacgcttatacattgcagaagcgagttagttactacagggctttaaaacnnnnnnnnnnnnnnnnnnnnnnnnnnnnnnnnnnnnnnnnnnnnnnnnnnnnnnnnnnnnnnnnnnnnnnnnnnnnnnnnnnnnnnnnnnnnnnnnnnnngcagctccgtatggtcaagtataacagctctgaaaagagaggggtagcgagaagtttcaggggagtaaaatgaactagtccaaagtagagaaggccttcctacctgtgcgttcattcttactccaacaggaatatgaaagcacagctgccacctgggcaccaaggggacaaaagctaccggctaagaatgacaaagatgaaaaagatagagagatgccttaatgatatctttacgccctggctagatagtctatctctggacttcgtgttttataagaaaatgattctcttcagtttttaagctgaagctttctgctactcatggctcaagtcattcctatcttagtctcccaaattaacttctagaattcttgctttattttttacatttgtctttaatccatcttaatttatttttgaatatgctgagagatatgggtccaattttatattcttccagatggataaccagttgtgccagcacca

SEQ ID NO: 691415 - DNA, 1519 bp, Homo sapiens
  misc_feature 934, 935, 936, 937, 938, 939, 940, 941, 942, 943, 944, 945,946, 947, 948, 949, 950, 951, 952, 953, 954, 955, 956, 957,958, 959, 960, 961, 962, 963, 964, 965, 966, 967, 968, 969,970, 971, 972, 973, 974, 975, 976, 977, 978, 979, 980: n = A,T,C or G
  misc_feature 981, 982, 983, 984, 985, 986, 987, 988, 989, 990, 991, 992,993, 994, 995, 996, 997, 998, 999, 1000, 1001, 1002, 1003,1004, 1005, 1006, 1007, 1008, 1009, 1010, 1011, 1012, 1013,1014, 1015, 1016, 1017, 1018, 1019, 1020, 1021, 1022: n = A,T,C or G
  misc_feature 1023, 1024, 1025, 1026, 1027, 1028, 1029, 1030, 1031, 1032,1033: n = A,T,C or G
gagccagatcattttatggatgccaatagttggagttctttggtcagctattgattccgtcagtcaattggcatccaagttacaggagtgatgccatgaagccaagcagaaaatccaaaaaagtggcctttggaaggccttgcttgacttgtgcagcccctatatcttaaccataaatgtatatattagaataataaaaaatatttcgtaaaatataaggtgcattttaaaaataccttattttgttaaaatttcctagcacagtattttaatttctccaagaaataatataaaaaaattaaaagaggaataatttgtatcattgctattttttctgtctctgatggtaactaattcttactgagggtattgtgttgatataattgcttctctgttccagtaagcataatggatttatcctgttttatgtgtgtataaatatgtgtgacatacagggggaaaggtccagtatttcccagtgttaggaaatatctttgtttgtctattgacctaactgatcctaaggtagcttcatccaaagactcccaccatttccattatttttgtgggtgatatgtatttgatgattttagaactgttgataatcacaaacaggagacttacctttttgtctcccacactcaaaaagtgtgatttgccaattcacacacaactaaattgtgacagaaataaaaaaaatattgaattagagaagaatttaggaaccccagaggtaatatcataggactgttaaacattatttggtattattggatataaaaactaactttaatttttatttgtatccatcaaaactgcttaatttttataacttttaagkcagtgtttatttatgctatatttgattgtgaagtttatttgcctacgcttatacattgcagaagcgagttagttactacagggctttaaaacnnnnnnnnnnnnnnnnnnnnnnnnnnnnnnnnnnnnnnnnnnnnnnnnnnnnnnnnnnnnnnnnnnnnnnnnnnnnnnnnnnnnnnnnnnnnnnnnnnnngcagctccgtatggtcaagtataacagctctgaaaagagaggggtagcgagaagtttcaggggagtaaaatgaactagtccaaagtagagaaggccttcctacctgtgcgttcattcttactccaacaggaatatgaaagcacagctgccacctgggcaccaaggggacaaaagctaccggctaagaatgacaaagatgaaaaagatagagagatgccttaatgatatctttacgccctggctagatagtctatctctggacttcgtgttttataagaaaatgattctcttcagtttttaagctgaagctttctgctactcatggctcaagtcattcctatcttagtctcccaaattaacttctagaattcttgctttattttttacatttgtctttaatccatcttaatttatttttgaatatgctgagagatatgggtccaattttatattcttccagatggataaccagttgtgccagcacca

SEQ ID NO: 691416 - DNA, 610 bp, Homo sapiens
gagaaaactgtcctgctgccacactcccagaagcgcttacgttcaagctagccacaaaaacctatttctggttctaacagcagatgtgaaattgtgaaacacatgcacacaaaaggcaggcagcttgaggacctgcgtggtggtctagggacatcctaagggctgccagagtgatggagagaaaatctgtgattgctgctctcatccctggggaattgggggaatcagrcaagaattctgcctctctccctcttgtgtatgactgcagattgaaagcaactgtttccaacccaatgacaggatcataaggctgtttagataaaatgttttatcttctaaagatgatatttacattgtctactatccaataccagaggccagcaacaaggctttacaaatcccactttcccagttcccaaatgctgcgagaacacatgtgaaacacaatttagtttttgatagaatataaacaccttgcatgcttccagatttctagcgcatgatatagtagaaataaagtggataaagtaagagacaagctaaagccatatctttctggggaaatgcctctggaaattgttttcttctggaaatatgggccctgtctcca

SEQ ID NO: 691417 - DNA, 700 bp, Homo sapiens
tctgttgtttaagccatgcagtctctggtattttgatatggcagctcatgcaactaagatactcaatatctttattttaaaatttattgtgagttgaaaaagaaggtgatcatggctgagaaccaagttaatgacccaaaagaccaagagctcaaccaaaagcaaggtttttgcacaaccaaaagcaaaaacacagtaagatgaaaatcctaagggaaaagatcagagttttaaagaaggtttatccatgctatcaggccatgatatctcttactcgctgcctatatgcaaggattcaggatatcttaacatcagtgttcctagccaatgaaaatagaaaacagttaaccaaatgtcaactgactcaaatcagacacctgaagacaggaaaagatcaggggaaaggaaatgggggcgagcaatgaaactttcgatctgtagctacaccagatggaccacagcagtgtgtcagggggtctataatggaatagtggagaagaatacttcawatagaagacatatacttacggaactgcaagaaaaactttttgaacattataaaaggaaatttcaatatgcatctttcagattttgacaaaccaagcagagaaaaatcaataatgatatagaggatttgaattatgtaattgacaagaacagtaagcatggagggagagctgtgtttcctacaagcagaaaa

SEQ ID NO: 691418 - DNA, 1366 bp, Homo sapiens
tgtaaagaaaacgtagatctctaaaggcaatctgcattagtagaatatctgtaacaagcaagagggctgctttgtgatcatttscattacctgagataaatttatctgtgtagcaggagggcctttgttcagattgcatttactccttttaccctcccgtggtttattgccaccttcctttaatttgtttgcccagattgtttagctggagatcaactcttcaatcttgtagttcccaataaaaaagaagtctcagtgttcaaagatattctggtaaacactcatagagagcttcttgagttatgctaccctgagatagagcttgcctcactggaagcagaaaacagtatacaaaagagaaaagactctctctggcctttgagggtaaagtaattgagtctatgaaataaactgacagtaggcaggttaacgagagaaaaagaatacacatttattatgtgtatttgatagcacaggaaaaaaaaagtgaatactccccataacccagtgagatctagaagcttatgtattagcttgggctacagaaaggaataggtaactggggcctgaaccctaacaacagcatggggatgaccacagaatatacgactgacctcatggaacagtaggtgatatggaaatctctggtaaagagcaaatgattatgtcaaagataaatagtatagacaaaaaaaaactgtattctttctttgattcctaatttatttgtattttactctatgaaaatgctgaaaataaatgatcatatgttttcaaattgtattctgcagtttctgagaataaccaactcaaaatatgccaaagaagtatactttggggtggctgggcgcggtggctcactcttgtaatcccagcactttaggaggctgaggcaggcggatcacgaggtcaggagatcgagaccatcctggctaatacagtgaaaccccgtctgtattaaaaatacaaaaaaattagccgggcgtggtggcaggcgcctgtagtcccagctactccggaggctgaggcaggagaatggcatgaacccgggaggcggagcttgcagtgagtcgagatcgcgctactgcactccagcctgggcgacagagcgagactgtctcaaataaataaataaataaataagtatactttggggtggcacattctggcctgctatagtcatattttggcatggtgtgtccaaagcaatttggaatgggcacatacttgttttctattcatatttgcatgtagtacctctcattaataggctttgaagtattcatatgtgattaataaatttatgtagtgcatttgccagttgagttttaaactttagtccataaatcataaactacgttcagaa

SEQ ID NO: 691419 - DNA, 1366 bp, Homo sapiens
tgtaaagaaaacgtagatctctaaaggcaatctgcattagtagaatatctgtaacaagcaagagggctgctttgtgatcatttccattacctgagataaatttatctgtgtagcaggagggcctttgttcagattgcatttactccttttaccctcccgtggtttattgccaccttcctttaatttgtttgcccagattgtttagctggagatcaactcttcaatcttgtagttcccaataaaaaagaagtctcagtgttcaaagatattctggtaaacactcatagagagcttcttgagttatgctaccctgagatagagcttgcctcactggaagcagaaaacagtatacaaaagagaaaagactctctctggcctttgagggtaaagtaattgagtctatgaaataaactgacagtaggcaggttaacgagagaaaaagaatacacatttattatgtgtatttgatagcacaggaaaaaaaaagtgaatactccccataacccagtgagatctagaagcttatgtattagcttgggctacagaaaggaataggtaactggggcctgaaccctaacaacagcatggggatgaccacagaatatacgactgacctcatggaacagtaggtgatatggaaatctctggtaaagagcaaatgattatgtcaaagataaatagtatagacaaaaaaaaactgtattctttctttgattcctaatttatttgtattttactctatgaaaatgctgaaaataaatgatcatatgttttcaaattgtattctgcagtttctgagaataaccaactcaaaatatgccaaagaagtatactttggggtggctgggcgcggtggctcactcttgtaatcccagcactttaggaggctgaggcrggcggatcacgaggtcaggagatcgagaccatcctggctaatacagtgaaaccccgtctgtattaaaaatacaaaaaaattagccgggcgtggtggcaggcgcctgtagtcccagctactccggaggctgaggcaggagaatggcatgaacccgggaggcggagcttgcagtgagtcgagatcgcgctactgcactccagcctgggcgacagagcgagactgtctcaaataaataaataaataaataagtatactttggggtggcacattctggcctgctatagtcatattttggcatggtgtgtccaaagcaatttggaatgggcacatacttgttttctattcatatttgcatgtagtacctctcattaataggctttgaagtattcatatgtgattaataaatttatgtagtgcatttgccagttgagttttaaactttagtccataaatcataaactacgttcagaa

SEQ ID NO: 691420 - DNA, 1366 bp, Homo sapiens
tgtaaagaaaacgtagatctctaaaggcaatctgcattagtagaatatctgtaacaagcaagagggctgctttgtgatcatttccattacctgagataaatttatctgtgtagcaggagggcctttgttcagattgcatttactccttttaccctcccgtggtttattgccaccttcctttaatttgtttgcccagattgtttagctggagatcaactcttcaatcttgtagttcccaataaaaaagaagtctcagtgttcaaagatattctggtaaacactcatagagagcttcttgagttatgctaccctgagatagagcttgcctcactggaagcagaaaacagtatacaaaagagaaaagactctctctggcctttgagggtaaagtaattgagtctatgaaataaactgacagtaggcaggttaacgagagaaaaagaatacacatttattatgtgtatttgatagcacaggaaaaaaaaagtgaatactccccataacccagtgagatctagaagcttatgtattagcttgggctacagaaaggaataggtaactggggcctgaaccctaacaacagcatggggatgaccacagaatatacgactgacctcatggaacagtaggtgatatggaaatctctggtaaagagcaaatgattatgtcaaagataaatagtatagacaaaaaaaaactgtattctttctttgattcctaatttatttgtattttactctatgaaaatgctgaaaataaatgatcatatgttttcaaattgtattctgcagtttctgagaataaccaactcaaaatatgccaaagaagtatactttggggtggctgggcgcggtggctcactcttgtaatcccagcactttaggaggctgaggcaggcggatcacgaggtcaggagatcgagaccatcctggctaatacagtgaaaccccgtctgtattaaaaatacaaaaaaattagccgggcgtggtggcaggygcctgtagtcccagctactccggaggctgaggcaggagaatggcatgaacccgggaggcggagcttgcagtgagtcgagatcgcgctactgcactccagcctgggcgacagagcgagactgtctcaaataaataaataaataaataagtatactttggggtggcacattctggcctgctatagtcatattttggcatggtgtgtccaaagcaatttggaatgggcacatacttgttttctattcatatttgcatgtagtacctctcattaataggctttgaagtattcatatgtgattaataaatttatgtagtgcatttgccagttgagttttaaactttagtccataaatcataaactacgttcagaa

SEQ ID NO: 691421 - DNA, 1236 bp, Homo sapiens
ttgcattccctagtaaggcttacagtagttgatacaggctttattaagtaaaaaatatcactccagtctagttattgaatttatgtatatggatgggaatttaaatatgttgtatttgtttcctttattgtcccaaatgtaatccacatttacctgtttttggtaccacaccatctgtattcattagatagctaatctctgtttacactattttgctaatcctactgtgtctgtttttaaacattggctatttgctatattattactgaaaaaagaaaaattaaaaaaatcacactataatgctaataaaaaaaaagatggcagctgcttttctgtacwtgcctatactgaatgtaaaataatggaaactctccttatcttatttgttttgtgaccaatatttgaaattcattatcaaattttaaaataaatgtatttaatttttttctatgtaatattttcttcattgatgtgatttaactacataaaataattgaccatctaaattatttttctcatggaatttatctttcattgtgtttaaaaatagtctgcttattcatcagaatcaaaggaggttttttttttttacaaataatagtttgtgtgtagattacagcagaaactttaaaaaaaaaagatgtactcaatgaaataaaaagtcacagtgagaaagaaaaccaaacttttacagaaaactgttcctgtgtaagaatctagatcaaaagagaaaatatatttaatatatgtacctgacatcaccacaagtgaatacttggagaaacatttagcataatatacttcttaataagtattcattataaatgtacatagaagttatttagaatacaagtaggacaagaaaaaatccattagttatatatttactatgacccaggcatatgttaccaagcaaggtacatccatgttttaattaattcttattagttaggtataagatttttcaatttttatataagatcatacaaagacttagaaaagttagttatttgaaaaactaagaaattgaatgtgaagatatattcaaacccagtttccatcttactacaatatattttctatggtcaaattaaaaatattaagattaaataagtctgctattctacctacacttaaccatcatagctcttaacttttacatatgataaatcacataaatgtacagatgaacacatgtatgaggttccatataaactgagttaaatgcacatacac

SEQ ID NO: 691422 - DNA, 1207 bp, Homo sapiens
gcctaaaacacgaaatgaaatggctatgtatagcacgtttataaagttctgaatattatcacacagccacaatcttgttcattccacttaggaaacacatcagttgttttaaaaaattctttgttctgttgagaaacaatttatcatgattcttgtgcttctgtataaaatggcccagcctagtaaatatctgatgatgggtatgaaaaacaaagatgatattttcatacatttttttctctttcctaaggaacaaaactgcagagcttgtatttctcagacacctaggtcatgagactttatccagtgacaccttcccagtgggagctgttctctctaaaatgagctaagtttagtcgggttctcagatggaacttgaatgcagagaaactcacagctaatagaaatagaaaaccgcagatgaattccacaccgctggcaaagagcaactgaaatcaccagtgcaacatcctgagaaattgaacttgccacctccttacacctgggggaaaatgtcaaatgtcctctgttacaatatctgaacagcttgtgcaattttatcaatagagaacagtctgcaatcggtttttttctagtttcctttctgttagctatttaagtgaattcattgtgtgatggtgagtaaccagaattaagtgatgaaagtatcaaactgtttttcatcaaaactctcactgatggcagagactctcaaaatttgaagtcatccatagctttacaaatagctgctcacatactctaattgaaaagtgttattttgtgtaaaaaaaatagtaaataattttgtttaaatatgtttatgtgatcatagtattttcaggttgaaaggacttcccaactactaccgaatattagcccaacaacaggtgctggcctcagaggaagtttttcaggttcacaataaaacaagaactctaagaacaatgtagtcagttcttcaataaaaactaaattattatacagatgctccttgacgtatgatggggtatacactgatgataaacccatcataagttgaaaatattgtaagttggaaatgcatttaatacacctagcctaccaaagatcatggcttagcttagcctactttaaacatgctcagaagacttacattagyatatggttgggcaaaatcatctaacacaaagcctacttaatgacaatgttgagtaactcatgtgattta

SEQ ID NO: 691423 - DNA, 591 bp, Homo sapiens
aaacagtgcattgggatacagcacaagaggaggtgagactcaccatttccagctccttgtgagcatccaaagcagtgcactcccgctcagacctctcttctaccctcttcaggatgttctatgcacagagaaaggctgcgttaactttaatcttttctggtctttcctcccatttcccaccttgaccgtgactacctccctactgcaccagtccagccccatgctgcagcatgcacacacacacrcacgcacgcacacgcatacatgcatgcacacatgcatacagacctgcgtgtgcacacacgtgcatacatgctcgcacacacatgcacaccatgcacatgatgcacacctgcaagcagtgtgcacacatgcacacacgtgtagaaacatgcatacaagcacacgtgcacacatgcatgcacacacgtgcatacatgctcacacatgcacaacacgatgcatgcacacttgcaagcacagtgcacacacatgtacacacgtgtacaaacatgcatacaagcatgtgtgcgcacacatacatgcatgcacatacacacatgcatacctgcacacacacacacatgcacg

SEQ ID NO: 691424 - DNA, 591 bp, Homo sapiens
aaacagtgcattgggatacagcacaagaggaggtgagactcaccatttccagctccttgtgagcatccaaagcagtgcactcccgctcagacctctcttctaccctcttcaggatgttctatgcacagagaaaggctgcgttaactttaatcttttctggtctttcctcccatttcccaccttgaccgtgactacctccctactgcaccagtccagccccatgctgcagcatgcacacacacacacacgcacgcacacgcatacatgcatgcacacatgcatacagacctgcgtgtgcacacacgtgcatacatgctcgcacacacatgcacaccatgcacatgatgcacacctgcaagcagtgtgcacacatgcacacacgtgtagaaacatgcatacaagcacacgtgcacacatgcrtgcacacacgtgcatacatgctcacacatgcacaacacgatgcatgcacacttgcaagcacagtgcacacacatgtacacacgtgtacaaacatgcatacaagcatgtgtgcgcacacatacatgcatgcacatacacacatgcatacctgcacacacacacacatgcacg

SEQ ID NO: 691425 - DNA, 631 bp, Homo sapiens
ttttctaactgcacagtgctctgctcagccattggatccaggtccagtggatgctacgctgattctcttggggtctggctgggctaatgtttctctagtgacaccaatacaccctagaacgtgctgggttgggatactgtcaccagtatccctggccaactccggtggctcatgtggaccttgggaacgcagaggtaaaggaccatgaagtgtcaccgtgtaaggagcctgggccagcactggtatggctgccccgggcacctccccctgcccctgagccccttgccggatacactcacagcagctgcttataggtccgctcctggtaggtctgattgctgacgtaggtgatgtagacagagaagtggtcrgccgcataacggtacacgatgtcacacacgtcagagatgacgatgttctcctccatccggtgctccagctccaggaggaacctacgagaggcagcggcttgaggcggagggtgcccggggggtagggtggggaattgtctcaccaagggcagcatgcgagcctgacttggacattggacatagcagtgtgcacggtgagcgtacaggccgacaagatccatcggcaggggcaccgagcactggtggtgtatttggtcatc

SEQ ID NO: 691426 - DNA, 633 bp, Homo sapiens
tgtttccttttaactgcttcaacaatagtgcacaaactaaataatgttgttctgtcaagtaaactgagaaagaattggaaattatatggtagcaacatcaatctaactaccacattatgtaattgattttgccttggtaacagtgatgaaaatgggacttttttttcaataaagcaacatattttattaccttgagtgactagagtatatgtatctagcatttaaaacaatatctatttatctatttattcattatccaatcagtttacctactcatctgtcaattgatgacacatgtaataaaaagccttgtcaaaaagtaatattgtcaaaatttgatttcttatatttttcctactcttttaaattttcagtttttccttttttcattamatttaccaatgacacccactggccaaaacataaagtaatagaataagaccatttttatttagatcactaatggttaagatattacaatatgatactatttaaaatatgtacaacttacattagaaaaaataaatataatttttctaataatgacttataaagcaacatggatgagaataatatacctctttgtaattggaaattattattttaataatttactcacaaattttcttaagg

SEQ ID NO: 691427 - DNA, 989 bp, Homo sapiens
ccacacatggtttaagaggctgttgtttattgtggaaccctcagtcctctggtactgtggagaaggtatcaggtgacatggctgcagagcttgttcagccccctcgaggattcctttgggtcctatatcttgagaagtagctgtcgtaacccatctccccatgccccccgaaaaacccatggctgacagatgaaataaatgttgcttgttgccatggcccctaggtatctttgcttttctttattttagcaaaaggaagtcatgttaaatatttcaggagagtctgattttcagtatcttcattggattgaaaaagacaaggcacattgggttaatgataaggccttatctgcccattagattcatagaactgggaagggtcttgggaattgactagtcccacttctgaccctccttctcagaaagtgaagctcacagaggctaaggggcttgcctagggtaacagagccaaccaaggttctcagcgactggaacccagtctttccatcccccmcttccacatgcagccgtcattccgccctgcccattcttttttaagatgctcccttttctgctcctctcgcccaaagtctcctcctgttttgtgccccatcctcttctgctgccttctctctctctgacccggtgtcttttctttaatacaacagacaacagaaacaggtgtcaaaaagagataggcgccgggcacagtggctcacgactgtaatccagcactttgggaggccgaggcaggcgaatcatgaggtcaggagatcaagaccatcctggccatggtgaaacccgtctctactaaaaaaacaaaaattagctgggcatggtggcatgtgcctgtagtcccagctacttgggaggctaaggcaagagaatagcttgaaccagggagttggaggttgcagtgagccaaaatcgcaccactgcactccagcctggcgacagagcaagactccatctcaaaaaaaaaaaaaaaa

SEQ ID NO: 691428 - DNA, 1010 bp, Homo sapiens
cttgctgtgcaatattagtacccaaggcaattcagatttcacttgagaagcaacatgtgttcactgtgaactttttcccctctttctgttttccttttcttcctgtttttcttttcttatatttttttctaacaatttaatttgaagaatataatcatggcaatttttaatatgttgattcaatatccatgatgggctaaaaaatatcttaagtgcagctctgtacctgaatatattattgtgcttgaggcagtagtaagccaaaacctcttcagatggccagatgcctagaaaacacaagaggataaaccttttgattatagaagtcattcttttaagaaacggcttttaaaaataatgttcagtacaagytatttcaacttcaatcaaacaacattgttattacttataatatgtcatgtcacgggtgtcttttattgttgttatttttatagtggtgagatttataactctttcccaaggataatagaaaaatatcctaaataaattatactaaattttgatcacaagatagccaaaacagtaacaaccaaaatcacaaatatcaagttaaattttgatggtacttcacatagatcttcatcttgtgcacataaaattaattagtatcagttgaagacttgcttatatatgcagcccatattaggcaaaaataaatgggacgatcacacacaggagcaaacaaaaccactgacgtcactacacttttttgtttgattccatgctaatatttttaaacatgcacaattctgtcttttttttttttttttttttttagagtcttgctctgtcgccaggctggagtgcagtggcgagatctcagctcactgtaaagtctgcctcctggattcaagtgattctcctgcctcagcctcctgagtagctgagattacaggtgcacaccaccacgcccagctaatttttgtattttcagtagagactgggtttcaccatgttggtcaagctggtctcgaactcctgacctcgtg

SEQ ID NO: 691429 - DNA, 1010 bp, Homo sapiens
cttgctgtgcaatattagtacccaaggcaattcagatttcacttgagaagcaacatgtgttcactgtgaactttttcccctctttctgttttccttttcttcctgtttttcttttcttatatttttttctaacaatttaatttgaagaatataatcatggcaatttttaatatgttgattcaatatccatgatgggctaaaaaatatcttaagtgcagctctgtacctgaatatattattgtgcttgaggcagtagtaagccaaaacctcttcagatggccagatgcctagaaaacacaagaggataaaccttttgattatagaagtcattcttttaagaaacggcttttaaaaataatgttcagtacaagctatttcaacttcaatcaaacaacattgttattacttataatatgtcatgtcacsggtgtcttttattgttgttatttttatagtggtgagatttataactctttcccaaggataatagaaaaatatcctaaataaattatactaaattttgatcacaagatagccaaaacagtaacaaccaaaatcacaaatatcaagttaaattttgatggtacttcacatagatcttcatcttgtgcacataaaattaattagtatcagttgaagacttgcttatatatgcagcccatattaggcaaaaataaatgggacgatcacacacaggagcaaacaaaaccactgacgtcactacacttttttgtttgattccatgctaatatttttaaacatgcacaattctgtcttttttttttttttttttttttagagtcttgctctgtcgccaggctggagtgcagtggcgagatctcagctcactgtaaagtctgcctcctggattcaagtgattctcctgcctcagcctcctgagtagctgagattacaggtgcacaccaccacgcccagctaatttttgtattttcagtagagactgggtttcaccatgttggtcaagctggtctcgaactcctgacctcgtg

SEQ ID NO: 691430 - DNA, 758 bp, Homo sapiens
ggttaccatggatattatataaaacatcttaattatatcaatccattttaaagtgataacaatttaacttcaattacatacaaagctgtactctttcacatcccaccaccacccactttgtgtcattgatgtcataaattacacctttttattttttgtattcattaacatggtgtcctagtccatttgggctactataataaaataccatagattgagtggcttataaacaacaaaaacatatttctcacaattttggagtctgggaagtctgagatcaaggcctggcagattctgtgtctggtgatgggccacttccaggttcatagactgctgtcttcttattgtgtctttaagtagtagaagggaatttggacttgctccaaattacaccaccaccctttttggctctccaatttgtggacagcagattgccagcctgaataatcatgtgatatgattcctaaaaccrttcaatcaatcaatcaatcaatcaatcctgctagttctgtttctctggaaagccctaatacatgcagttttatatagatttttaaaaatgcttttatgttttgaattctataccagaatttaaagtgatttatatgccaccattacaaaattacaggatgctatatttgtctatatatttacctttactagagagctctatattttcatatgctttcatgttgctgtctggtatcacattcttttttttcatcttgaaaaactccatttagcatttcttttaacgt

SEQ ID NO: 691431 - DNA, 1494 bp, Homo sapiens
taaaagatattcaaataggaagagaggaagtaaaattgtctctgtttgcagatgacatgattgtatatttagaaaaccccatcatctcagcccaaaatctccttaagctgataagcaacttcagcaaattctcaggatacaaaatcaacatgcaaaaatcacaggcattcatatacaccaataatagacagagagccaaatcatgagcgaactcccattcacaattgctacaaagggaactaaatacctagaaataaaacttacaaaggatatgaaggacctctgcaaggagaactacaaaccattgctcaaggaaataaaagaggacacaaacaaatggaaaaacattccagactcatgtaattagattaggcctatgccctgtcatctccgttttgccagattactgtaacagtcacagaagtaacactgggcagtaaaggtcatgggaaccactttaaaattcttcctatgacatttttttctgttgttccatttttttctgttctattgtgtttcagaacagattactttccttaaataaaaacctatttatgaaaagtaaatatatgtaatattttaaaaagtttctaattatcttatgtttaaaatggaataataacagtaaccagtcacaggattggaattaggaccaaataaggtaatgtatatgaaacatttataaactttgaagctgtcagtaagcattagttatacttaatttaacttttgtctagattcatagagatgaaaaagatagtcaaatggtcatatggtttagtagtttctaaagttttagaaattatagaatgtctcctaccatgctattttaatatcacaatagatccttgaagtaagggcagctatcatcaatatcacatatttttacttggtttcagtgtcttgaaatttcgtagaacaggtattgcaagatatttcaaaaactatctttttttcacacaaagaatttaataaaaattgtttttaatacagcatttcgaacatgggaaactcaaggatggcatgacagatataatatttcttacaatatgtctgaaatatatgtttgggagagagaaaatgaagtcaacattccagggctttgggacgtctatcctcttaggagggagatggctaatgtgaaggaataataacggaacaaaaggtcctagcatgttctgatgggttccayttggttcagacaaccaaaataagtgattaagtcatgtctcaaatcattgaggtttattgagccagcttgagggtgcaactgggaaaaaactccagtcacagaagcatctgtggccattttttccaaagaggttctcaggagatttagtatttatacgttttccttaaaaaggggccaggggtggcagtgagacaaatgattatatacttctgagactttagtcagtgcccagtaaatctacattctatataaggtaaggtgcatcttggggatgggtgaaggaaggattaattttatttttg

SEQ ID NO: 691432 - DNA, 665 bp, Homo sapiens
gtagtgtttgatggtaaaaagcaaattttcattttcattcaagcccccaaaagaactggagcataatcccacagtagcactgaaagtctatagtagtatctctcccactggaagataagaaggcaacacaaccaaaagctttctcatctggagtgaactgagtaacagatgtacagtrgccaatcaccaacagactttgaaggaagtgacatgacagatcacccatcatgatgtgcccattcttttctaaaggtgatctgtggactgaagagctaacagtgaaggctttgctttatagttactcagttagtagaccacggtaactgaaatatgagctgtgctgtcaggggactggtatttacctaaactgcggtaactaaaccggtgcctattgaagccaccctaaggatgggctgtctaggctgaaaacagtgaggttaaaatatgtggtgaccacttccccctctgagtcctagaacgttcattagttaggcttttagccttctgaagcttttctggggttcctccaaggaaagagcccaaccagatcaccctatgtcagggttctgcaacctcagcactactgacatttcagcccaggtattttctgttgtggagttgccctgtgtactgtaggacgcttacagcagcatctctggtcagta

SEQ ID NO: 691433 - DNA, 619 bp, Homo sapiens
taacgggcaccctctgctaactgacaatactgggcaaatacagatgttctccacgccagtttcatcatgtacaaaatcaggataagatctaccacaaaaggccaygaggattaaatgtagtcttctgcaagaccattaaactgacagcaggatgcaacggcatgtacccagccagtggcctaaccttgcaggcacaggttagactaggcactgccttaccctgttcgattcttagtgttggtttctagtgaaacgctccaaataaactcaaaattcaaaagtattgttccaaaccctcaggacaggaactatcaatctagtttgccaagaaatgtacttttcattaacttctgatcaggggcaaaaatataatgggtcagaactgaagaatcccatactgagaacttttaaacaaaacttagctacacattgcctcccactcatttttgctttccttgtactgatgtcctttgaacactagtctgaactgcagaatccacttatacacagacttactttcacctctgccatccctgagacagcaagaccaactcctcctttcctcctcagtcaactcaagatgacaaggatgaaaacctttatgatccatttccactta

SEQ ID NO: 691434 - DNA, 1268 bp, Homo sapiens
ccattttaaagtgttaaatttttcaaaaatgtgcagtttagtggtattaagtaccctcacattgtggcacagccaccactactgtcctttccagaactttttcatcttcccaaatgaaaccctgtacccgtcactaactccgcactcctccctcccccagccccaggcaatcaccattctagtttctgtctctatggatttgacaactgtaggtgccatgtaagtagaatcatgcagtatttgttctgtgactggcttgtttcacttagcataaagtattcaaggttcatccatgtgtagcatgtgtcagaatttcctttccttttaagggggaatagcatttcgttgtgtggagatgccacattttgcttcttggtccatccctctccggacacttgagttgcttccactttttggctattgtgaataataatatgaacatgaatgcacaaataactctttgagactctccttttcattcttttgggtatataccacgaagtggtattgttggatcaaacggcaattctatttttaattttttgagaaactgccttactcctctcacggtgatctcttgttcaaggtatattttcgatttcacctgatcagctgactataaggccataaggctaacggagaaacgcaggcctagtttctcctagttactaggagatcgcaggcctcgttgtcctgaatccctagacacacttcattccccttgttttaatcctaaattttttttcttttgaagtttgtcctgtttcatctattctccagtttcttaaagaggtctggaaaatgcttttggctccttgtgtatgaaggttcctcttccatggatgctggagaagtcgtgtgtggaggggcagtcatatctgggcacctgttggccaggttcagcttaccagttgggtactcagcagggcatgaagccactgcagcagcccttctctttagccgtaaatagggagtttggaagagagccagggtttctggatttatgcattttgatattttcaatagtgtattaaatgtttaaaataggaaaactgatcattatttttgttaatgactgagaaagggactccttcaccaacagtttcagaaaagtgaaggcggttttgttttggtctttgtagaatctaggtggttgaatgcatgtcagttgtagaagtcaccttgcctgatatcccacgyagtgctggagtattccacagaccccatgtaggtactgcacctttgcaggtatactgctggtgttggtg

SEQ ID NO: 691435 - DNA, 591 bp, Homo sapiens
cctgggagatgacaaggtccaaggtgtcaccaacagttcacatgggttattctaaaacagttacagaagactatttttgaaagtggatggggctgtactattttttcacagactctgccctatgaggctgccagtcccagctgccccttctccamctgtccccaattctgctccctgactccattgcagcttcccccgtggacactagaccctggactctcactcactcacactcagacatgcacaccacaccgcacagcaccccacaccgcacactgcacaccctcacaagggccagacctggataaagatgtgagtgaaacagcacgtggggaagcagaccaggaagtctctactgaaggcctctctattgggtcaagctggttgtgccaagctccttttgcccttgggatgagctccttcccaggcggcttttccagctgtcacaccagcttgacttctgagaactctccctctccctctgtccacacaccagtcactccagagcctgaatgcatgtgacacaggacatacagggaaggccataggaaacaatgaacagtagctgcctggcaccgcagctattgttca

SEQ ID NO: 691436 - DNA, 591 bp, Homo sapiens
cctgggagatgacaaggtccaaggtgtcaccaacagttcacatgggttattctaaaacagttacagaagactatttttgaaagtggatggggctgtactattttttcacagactctgccctatgaggctgccagtcccagctgccccttctccaactgtccccaattctgctccctgactccattgcagcttcccccgtggacactagaccctggactctcactcactcacactcagacatgcacaccacaccgcacagcaccccacaccgcacactgcacaccctcacaagggccagacctggataaagatgtgagtgaaacagcacgtggggaagcagaccaggaagtctctactgaaggcctctctattgggtcaagctggttgtgccaagctccttttgcccttgggatgagctccttcccaggcggcttttccagctgtcacaccagcttgacttctgagaactctccctctccctctgtccacacaccagtcactccagagcctgaatgcatgtgacacaggacatacrgggaaggccataggaaacaatgaacagtagctgcctggcaccgcagctattgttca

SEQ ID NO: 691437 - DNA, 639 bp, Homo sapiens
ttttccctagccgtgcagccttgggcaagttacttcctttgtcagaacctcagtcaacttgaatcaaatgtgaataaaagtggcagctactgtatacggttttgtgaagcttaaatcgtgcatggcaaactcttagcaggaaaattagtaaatgttagctgtttgtatcgagtggcagagcagagatatgaccttggatctgtctagtatcaacgctgagtctttgctgatatgttaaactgtcttaggggcattctgacccagtcctctcccactccattttgaaacggcagaatttttccacccctaagagagatacatggaatttttgcccgctccctttttgaaatgcacgttycttctctgcacacctcacactcctcatcgcccccatctacccatctgctgctgggctacggaagtgatatgcagggtgtgagagacaacaaaagaagccttcctgcacagcccccgtccctcagggactggcagcttcccagcctgtaaggtgttaaatcccagctccctcagcaaacctcctgctggggatcccaatttagaaccagcagcaaatcctgccagcctgctcccagtttcttctctccatatggaagctggaagcagccagctgtgcctcag

SEQ ID NO: 691438 - DNA, 2021 bp, Homo sapiens
  misc_feature 1262, 1263, 1264, 1265, 1266, 1267, 1268, 1269, 1270, 1271,1272, 1273, 1274, 1275, 1276, 1277, 1278, 1279, 1280, 1281,1282, 1283, 1284, 1285, 1286, 1287, 1288, 1289, 1290, 1291,1292, 1293, 1294, 1295, 1296, 1297, 1298, 1299, 1300: n = A,T,C or G
  misc_feature 1301, 1302, 1303, 1304, 1305, 1306, 1307, 1308, 1309, 1310,1311, 1312, 1313, 1314, 1315, 1316, 1317, 1318, 1319, 1320,1321, 1322, 1323, 1324, 1325, 1326, 1327, 1328, 1329, 1330,1331, 1332, 1333, 1334, 1335, 1336, 1337, 1338, 1339: n = A,T,C or G
  misc_feature 1340, 1341, 1342, 1343, 1344, 1345, 1346, 1347, 1348, 1349,1350, 1351, 1352, 1353, 1354, 1355, 1356, 1357, 1358, 1359,1360, 1361: n = A,T,C or G
ggataaataacttttctgctgtcatacaacttgtaagtggcagagccaagatgaaaattcagaagccagccccagagccccttcttttatcctctccacgaaaccatctcttgatgtgagagcccttagggtcttcatcatctaatccttggctctgctatcactgtctgggatgctaaacctgttgggtttagggttctagccagtgaagagatgaggctctcatgagccctggagcagtgggtcagaacctgagctgtcccctgtgattcctggaccaaaacaatcagtgcctcagatccagacaagactcgagaaaaataataatatttgttgccacttattgagcatttttatgtaccaggtgctgtgctaagtgctttacatacaatatctcatttaatccctaagacaagtgagaaaaacacattgttgcaggtacaaatattctcatttccaaatgagagaccttggctcagaaaatatagtggccttttttagagtcacacaactagtaagtggccgaactaagattcggaccccggctggcatcacagactgtgtcatctttgaaggaggaaagaaaatgcaaatgcctctctctgaatttttttaagtcctccttttctttctaagaggaaacagtaaagaaaaacaaaacccaaccacttcttagaagtgtgtgtgtctctcccacaatcccctcccctgcaccaaatgctgaagataagaagacttttgtctgaggctaagggtgttcatttttgttgagagccktttccagctgtcttactggtctagaaattaataaagatttcctttcagttctgtagaagcagggactatccagccgcccctcctgtttgggcacgtagccatggggaaagatcggcaatgaggccaggatttgagagctcagggcacagtccagcttcactgacagatatcactacacacacacagacacacacacacacacacacacgcccacacacctatacccctcttctcctgcagtaagacattgttaaggaatctgagcacatcttccaggctctttgcctgctctggtctttaagactcaggaccacctgctaggttggccaacgatacttccttggcagggacactcagctgtgttcactgttctgccctagacagagaggtgtagtcaggctgcccctgcacccagcctcgccagctctccaagtagaggcaagagtggagagggaattgaaggcattccttgatgtggggggagnnnnnnnnnnnnnnnnnnnnnnnnnnnnnnnnnnnnnnnnnnnnnnnnnnnnnnnnnnnnnnnnnnnnnnnnnnnnnnnnnnnnnnnnnnnnnnnnnnnnattctatacttggatttgcatatattaaactcagccctgtcatctttcctaaactgctctgataactacattcctcttcttgatcacctcaaggtgttgtgattagggaaagcaggtcctcttgaggtcaaaaaaaaaaagaagcaaatatttttaggatggtttccaacctcagagatatatggtttcagaaaggacttaaaagagaaaggcatttttccaggggcttaaaaacatgcaaaggagctaccaaaaagtctagcaacttcatcaatgtccgtagacttcagaaacaattgtaagttaccttttatgcagatgggctgtttccctgaccactctccattctgctggcaagttcttttctcattgccactaagaacataggagttgttacaaaagaaagacaccacggtgccaattttagcatggcgtccgttgataagcccagggccccctgttattttctggtacccattgactgggcccccagggtctgagcagtttctttcttcaaggactaaaagaaagtaaaagaaaaggagaattgttaaaagtctgagttattccattttagaatagaatctttcatgtttcattgaactaaaaatacaatgatataggatctggtgctcaaaagaattactaaaataaatctca

SEQ ID NO: 691439 - DNA, 2021 bp, Homo sapiens
  misc_feature 1262, 1263, 1264, 1265, 1266, 1267, 1268, 1269, 1270, 1271,1272, 1273, 1274, 1275, 1276, 1277, 1278, 1279, 1280, 1281,1282, 1283, 1284, 1285, 1286, 1287, 1288, 1289, 1290, 1291,1292, 1293, 1294, 1295, 1296, 1297, 1298, 1299, 1300: n = A,T,C or G
  misc_feature 1301, 1302, 1303, 1304, 1305, 1306, 1307, 1308, 1309, 1310,1311, 1312, 1313, 1314, 1315, 1316, 1317, 1318, 1319, 1320,1321, 1322, 1323, 1324, 1325, 1326, 1327, 1328, 1329, 1330,1331, 1332, 1333, 1334, 1335, 1336, 1337, 1338, 1339: n = A,T,C or G
  misc_feature 1340, 1341, 1342, 1343, 1344, 1345, 1346, 1347, 1348, 1349,1350, 1351, 1352, 1353, 1354, 1355, 1356, 1357, 1358, 1359,1360, 1361: n = A,T,C or G
ggataaataacttttctgctgtcatacaacttgtaagtggcagagccaagatgaaaattcagaagccagccccagagccccttcttttatcctctccacgaaaccatctcttgatgtgagagcccttagggtcttcatcatctaatccttggctctgctatcactgtctgggatgctaaacctgttgggtttagggttctagccagtgaagagatgaggctctcatgagccctggagcagtgggtcagaacctgagctgtcccctgtgattcctggaccaaaacaatcagtgcctcagatccagacaagactcgagaaaaataataatatttgttgccacttattgagcatttttatgtaccaggtgctgtgctaagtgctttacatacaatatctcatttaatccctaagacaagtgagaaaaacacattgttgcaggtacaaatattctcatttccaaatgagagaccttggctcagaaaatatagtggccttttttagagtcacacaactagtaagtggccgaactaagattcggaccccggctggcatcacagactgtgtcatctttgaaggaggaaagaaaatgcaaatgcctctctctgaatttttttaagtcctccttttctttctaagaggaaacagtaaagaaaaacaaaacccaaccacttcttagaagtgtgtgtgtctctcccacaatcccctcccctgcaccaaatgctgaagataagaagacttttgtctgaggctaagggtgttcatttttgttgagagccttttccagctgtcttactggtctagaaattaataaagatttcctttcagttctgtagaagcagggactatccagccgcccctcctgtttgggcacgwagccatggggaaagatcggcaatgaggccaggatttgagagctcagggcacagtccagcttcactgacagatatcactacacacacacagacacacacacacacacacacacgcccacacacctatacccctcttctcctgcagtaagacattgttaaggaatctgagcacatcttccaggctctttgcctgctctggtctttaagactcaggaccacctgctaggttggccaacgatacttccttggcagggacactcagctgtgttcactgttctgccctagacagagaggtgtagtcaggctgcccctgcacccagcctcgccagctctccaagtagaggcaagagtggagagggaattgaaggcattccttgatgtggggggagnnnnnnnnnnnnnnnnnnnnnnnnnnnnnnnnnnnnnnnnnnnnnnnnnnnnnnnnnnnnnnnnnnnnnnnnnnnnnnnnnnnnnnnnnnnnnnnnnnnnattctatacttggatttgcatatattaaactcagccctgtcatctttcctaaactgctctgataactacattcctcttcttgatcacctcaaggtgttgtgattagggaaagcaggtcctcttgaggtcaaaaaaaaaaagaagcaaatatttttaggatggtttccaacctcagagatatatggtttcagaaaggacttaaaagagaaaggcatttttccaggggcttaaaaacatgcaaaggagctaccaaaaagtctagcaacttcatcaatgtccgtagacttcagaaacaattgtaagttaccttttatgcagatgggctgtttccctgaccactctccattctgctggcaagttcttttctcattgccactaagaacataggagttgttacaaaagaaagacaccacggtgccaattttagcatggcgtccgttgataagcccagggccccctgttattttctggtacccattgactgggcccccagggtctgagcagtttctttcttcaaggactaaaagaaagtaaaagaaaaggagaattgttaaaagtctgagttattccattttagaatagaatctttcatgtttcattgaactaaaaatacaatgatataggatctggtgctcaaaagaattactaaaataaatctca

SEQ ID NO: 691440 - DNA, 2021 bp, Homo sapiens
  misc_feature 1262, 1263, 1264, 1265, 1266, 1267, 1268, 1269, 1270, 1271,1272, 1273, 1274, 1275, 1276, 1277, 1278, 1279, 1280, 1281,1282, 1283, 1284, 1285, 1286, 1287, 1288, 1289, 1290, 1291,1292, 1293, 1294, 1295, 1296, 1297, 1298, 1299, 1300: n = A,T,C or G
  misc_feature 1301, 1302, 1303, 1304, 1305, 1306, 1307, 1308, 1309, 1310,1311, 1312, 1313, 1314, 1315, 1316, 1317, 1318, 1319, 1320,1321, 1322, 1323, 1324, 1325, 1326, 1327, 1328, 1329, 1330,1331, 1332, 1333, 1334, 1335, 1336, 1337, 1338, 1339: n = A,T,C or G
  misc_feature 1340, 1341, 1342, 1343, 1344, 1345, 1346, 1347, 1348, 1349,1350, 1351, 1352, 1353, 1354, 1355, 1356, 1357, 1358, 1359,1360, 1361: n = A,T,C or G
ggataaataacttttctgctgtcatacaacttgtaagtggcagagccaagatgaaaattcagaagccagccccagagccccttcttttatcctctccacgaaaccatctcttgatgtgagagcccttagggtcttcatcatctaatccttggctctgctatcactgtctgggatgctaaacctgttgggtttagggttctagccagtgaagagatgaggctctcatgagccctggagcagtgggtcagaacctgagctgtcccctgtgattcctggaccaaaacaatcagtgcctcagatccagacaagactcgagaaaaataataatatttgttgccacttattgagcatttttatgtaccaggtgctgtgctaagtgctttacatacaatatctcatttaatccctaagacaagtgagaaaaacacattgttgcaggtacaaatattctcatttccaaatgagagaccttggctcagaaaatatagtggccttttttagagtcacacaactagtaagtggccgaactaagattcggaccccggctggcatcacagactgtgtcatctttgaaggaggaaagaaaatgcaaatgcctctctctgaatttttttaagtcctccttttctttctaagaggaaacagtaaagaaaaacaaaacccaaccacttcttagaagtgtgtgtgtctctcccacaatcccctcccctgcaccaaatgctgaagataagaagacttttgtctgaggctaagggtgttcatttttgttgagagccttttccagctgtcttactggtctagaaattaataaagatttcctttcagttctgtagaagcagggactatccagccgcccctcctgtttgggcacgtagccatggggaaagatcggcaatgaggccaggatttgagagctcagggcacagtccagcttcactgacagatatcactacacacacacagacacacacacacacayacacacgcccacacacctatacccctcttctcctgcagtaagacattgttaaggaatctgagcacatcttccaggctctttgcctgctctggtctttaagactcaggaccacctgctaggttggccaacgatacttccttggcagggacactcagctgtgttcactgttctgccctagacagagaggtgtagtcaggctgcccctgcacccagcctcgccagctctccaagtagaggcaagagtggagagggaattgaaggcattccttgatgtggggggagnnnnnnnnnnnnnnnnnnnnnnnnnnnnnnnnnnnnnnnnnnnnnnnnnnnnnnnnnnnnnnnnnnnnnnnnnnnnnnnnnnnnnnnnnnnnnnnnnnnnattctatacttggatttgcatatattaaactcagccctgtcatctttcctaaactgctctgataactacattcctcttcttgatcacctcaaggtgttgtgattagggaaagcaggtcctcttgaggtcaaaaaaaaaaagaagcaaatatttttaggatggtttccaacctcagagatatatggtttcagaaaggacttaaaagagaaaggcatttttccaggggcttaaaaacatgcaaaggagctaccaaaaagtctagcaacttcatcaatgtccgtagacttcagaaacaattgtaagttaccttttatgcagatgggctgtttccctgaccactctccattctgctggcaagttcttttctcattgccactaagaacataggagttgttacaaaagaaagacaccacggtgccaattttagcatggcgtccgttgataagcccagggccccctgttattttctggtacccattgactgggcccccagggtctgagcagtttctttcttcaaggactaaaagaaagtaaaagaaaaggagaattgttaaaagtctgagttattccattttagaatagaatctttcatgtttcattgaactaaaaatacaatgatataggatctggtgctcaaaagaattactaaaataaatctca

SEQ ID NO: 691441 - DNA, 2021 bp, Homo sapiens
  misc_feature 1262, 1263, 1264, 1265, 1266, 1267, 1268, 1269, 1270, 1271,1272, 1273, 1274, 1275, 1276, 1277, 1278, 1279, 1280, 1281,1282, 1283, 1284, 1285, 1286, 1287, 1288, 1289, 1290, 1291,1292, 1293, 1294, 1295, 1296, 1297, 1298, 1299, 1300: n = A,T,C or G
  misc_feature 1301, 1302, 1303, 1304, 1305, 1306, 1307, 1308, 1309, 1310,1311, 1312, 1313, 1314, 1315, 1316, 1317, 1318, 1319, 1320,1321, 1322, 1323, 1324, 1325, 1326, 1327, 1328, 1329, 1330,1331, 1332, 1333, 1334, 1335, 1336, 1337, 1338, 1339: n = A,T,C or G
  misc_feature 1340, 1341, 1342, 1343, 1344, 1345, 1346, 1347, 1348, 1349,1350, 1351, 1352, 1353, 1354, 1355, 1356, 1357, 1358, 1359,1360, 1361: n = A,T,C or G
ggataaataacttttctgctgtcatacaacttgtaagtggcagagccaagatgaaaattcagaagccagccccagagccccttcttttatcctctccacgaaaccatctcttgatgtgagagcccttagggtcttcatcatctaatccttggctctgctatcactgtctgggatgctaaacctgttgggtttagggttctagccagtgaagagatgaggctctcatgagccctggagcagtgggtcagaacctgagctgtcccctgtgattcctggaccaaaacaatcagtgcctcagatccagacaagactcgagaaaaataataatatttgttgccacttattgagcatttttatgtaccaggtgctgtgctaagtgctttacatacaatatctcatttaatccctaagacaagtgagaaaaacacattgttgcaggtacaaatattctcatttccaaatgagagaccttggctcagaaaatatagtggccttttttagagtcacacaactagtaagtggccgaactaagattcggaccccggctggcatcacagactgtgtcatctttgaaggaggaaagaaaatgcaaatgcctctctctgaatttttttaagtcctccttttctttctaagaggaaacagtaaagaaaaacaaaacccaaccacttcttagaagtgtgtgtgtctctcccacaatcccctcccctgcaccaaatgctgaagataagaagacttttgtctgaggctaagggtgttcatttttgttgagagccttttccagctgtcttactggtctagaaattaataaagatttcctttcagttctgtagaagcagggactatccagccgcccctcctgtttgggcacgtagccatggggaaagatcggcaatgaggccaggatttgagagctcagggcacagtccagcttcactgacagatatcactacacacacacagacacacacacacacacacacacgcccacacacctatacccytcttctcctgcagtaagacattgttaaggaatctgagcacatcttccaggctctttgcctgctctggtctttaagactcaggaccacctgctaggttggccaacgatacttccttggcagggacactcagctgtgttcactgttctgccctagacagagaggtgtagtcaggctgcccctgcacccagcctcgccagctctccaagtagaggcaagagtggagagggaattgaaggcattccttgatgtggggggagnnnnnnnnnnnnnnnnnnnnnnnnnnnnnnnnnnnnnnnnnnnnnnnnnnnnnnnnnnnnnnnnnnnnnnnnnnnnnnnnnnnnnnnnnnnnnnnnnnnnattctatacttggatttgcatatattaaactcagccctgtcatctttcctaaactgctctgataactacattcctcttcttgatcacctcaaggtgttgtgattagggaaagcaggtcctcttgaggtcaaaaaaaaaaagaagcaaatatttttaggatggtttccaacctcagagatatatggtttcagaaaggacttaaaagagaaaggcatttttccaggggcttaaaaacatgcaaaggagctaccaaaaagtctagcaacttcatcaatgtccgtagacttcagaaacaattgtaagttaccttttatgcagatgggctgtttccctgaccactctccattctgctggcaagttcttttctcattgccactaagaacataggagttgttacaaaagaaagacaccacggtgccaattttagcatggcgtccgttgataagcccagggccccctgttattttctggtacccattgactgggcccccagggtctgagcagtttctttcttcaaggactaaaagaaagtaaaagaaaaggagaattgttaaaagtctgagttattccattttagaatagaatctttcatgtttcattgaactaaaaatacaatgatataggatctggtgctcaaaagaattactaaaataaatctca

SEQ ID NO: 691442 - DNA, 623 bp, Homo sapiens
ttttgatgtcattatagatgaaatcrttgtcttattttctgattgttcttgctagttatagacatacaattaatttttgcatattgatcttgtatcctgcaactattctgaacatatttattatgcccaatttttgtgcttttcttaggatttactatatgcaagatgatttcatgtgcaaatatgagctagttttactttttccattccaatctggatgctttttatttctttttctcacctaattaccgtgaattagataccctgaattagatgttgaatggaagtgctgcgactagacatccgtgtcttgttcttgatcttaagggggaaatatccagtctttcacccttaagttggtgttaggtgtgggtttttcacagatggctgtattattatactgtattattagagtttttcatagatgactgtattataatagttctctattgcttctataactcattatgataaattggcttaaaacgacataaatttcttatctcccagttcaatggattcaaagtccaacatggtgtcaccaggctagattggagtgtgttgtctgggatctgctcctttctggaggctctagggcaggttccatttccttgcttttgtca

SEQ ID NO: 691443 - DNA, 666 bp, Homo sapiens
atgacattacctaaatttcaggcagtctaggggtaaaagctagaggacagtgattacattggagaggttaatatcaggagaacttaatgggcctttgtatagtggatttttgataaattttggttgaatcagagaggactagaatcatgtcctcaatgtctgagatgctcgtataaaattcttagctttttctaaaatcaagraagaacacctccatgtgtcaacttcaggaaccagctcccaacctttgagaaggcatagtgagctctcacctacttcgtcctgtgaatgaaactgagtgtggtgtaggaggttgccccatcttgataacacaccaaggcttggcctccacattgaagatgggatgaaatctacatatggtatctagtctttagatgactctttaaaattgaagttttggggaggggcaggggaagcggaaattcctggccttagggggagacatttcccatcagcagcaacatcatcttccacagtgagaagaagacagctccacccagttctctggtctcagccttcttgctgcactcctggatgaggcttctcatgtgacaggacccaggagaccccagcaccctgctgcaatgctcatttccttctacctggcagtctcattccattgaatgcttccccgggatatttatg

SEQ ID NO: 691444 - DNA, 666 bp, Homo sapiens
atgacattacctaaatttcaggcagtctaggggtaaaagctagaggacagtgattacattggagaggttaatatcaggagaacttaatgggcctttgtatagtggatttttgataaattttggttgaatcagagaggactagaatcatgtcctcaatgtctgagatgctcgtataaaattcttagctttttctaaaatcaagaaagaacacctccatgtgtcaacttcaggaaccagctcccaacctttgagaaggcatagtgagctctcacctacttcgtcctgtgaatgaaactgagtgtggtgtaggaggttgccccatcttgataacacaccaaggcttggcctccacattgaagatgggatgaaatctacatatggtatctagtctttagatgactctttaaaattgaagttttggggaggggcaggggaagcggaaattcctggccttagggggagacatttcccatcagcagcaacatcatcttccacagtgagaagaagacagctccacccagttctctggtctcagccttcttgctgcactcctggatgaggcttctcatgtgacaggacccaggagaccccagcrccctgctgcaatgctcatttccttctacctggcagtctcattccattgaatgcttccccgggatatttatg

SEQ ID NO: 691445 - DNA, 651 bp, Homo sapiens
tttaatttcccttcatgattagctataaaatggtggctgcagctccagccaacgcactccagtttcatttagaaaagagagagggaaacagaaaagggtaggatctgcatatcatgaaaayaaaactttctgagaaatcttcagccttggtgttttggtcagaactgtgacacatgactatctctagcagcaaagaaagctggaaaatatgatttttcagtgaggacctttctaccacatcacctccctgctcccctgaaaacaaaacaaaacaaaacaaaaacaaaatttctcttaataaggaaaagaaaatggatgtttgataggcaaccagaggtgtttgccatgtcagctatgacaagattgaatccgagaaagaaccaagttggagccaggaggtcttaagcctgacatgactagaagatgcgtagacaataggcccccatgtttagtatgaaattgccctgccctgtgtctcgttctcaagactgagtgccaggaaaccaggtttacaaacatgtggtcttcaggacttcacctaccctccatctctgaaaacaaaaggctgcaatgaagatcgtgttttatagattgggcgtcacttttaatctctacatgtattagtcagttttcatcctgctgatgaagaca

SEQ ID NO: 691446 - DNA, 651 bp, Homo sapiens
tttaatttcccttcatgattagctataaaatggtggctgcagctccagccaacgcactccagtttcatttagaaaagagagagggaaacagaaaagggtaggatctgcatatcatgaaaacaaaactttctgagaaatcttcagccttggtgttttggtcagaactgtgacacatgactatctctagcagcaaagaaagctggaaaatatratttttcagtgaggacctttctaccacatcacctccctgctcccctgaaaacaaaacaaaacaaaacaaaaacaaaatttctcttaataaggaaaagaaaatggatgtttgataggcaaccagaggtgtttgccatgtcagctatgacaagattgaatccgagaaagaaccaagttggagccaggaggtcttaagcctgacatgactagaagatgcgtagacaataggcccccatgtttagtatgaaattgccctgccctgtgtctcgttctcaagactgagtgccaggaaaccaggtttacaaacatgtggtcttcaggacttcacctaccctccatctctgaaaacaaaaggctgcaatgaagatcgtgttttatagattgggcgtcacttttaatctctacatgtattagtcagttttcatcctgctgatgaagaca

SEQ ID NO: 691447 - DNA, 651 bp, Homo sapiens
tttaatttcccttcatgattagctataaaatggtggctgcagctccagccaacgcactccagtttcatttagaaaagagagagggaaacagaaaagggtaggatctgcatatcatgaaaacaaaactttctgagaaatcttcagccttggtgttttggtcagaactgtgacacatgactatctctagcagcaaagaaagctggaaaatatgatttttcagtgaggacctttctaccacatcacctccctgctcccctgaaaacaaaacaaaacaaaacaaaaacaaaatttctcttaataaggaaaagaaaatggatgtttgataggcaaccagaggtgtttgccatgtcagctatgacaagattgaatccgagaaagaaccaagttggagccaggaggtcttaagcctgacatgactagaagatgcgtagacaataggcccccatgtttagtatgaaattgccctgccctgtgtctcgttctcaagactgagtgccaggaaaccaggyttacaaacatgtggtcttcaggacttcacctaccctccatctctgaaaacaaaaggctgcaatgaagatcgtgttttatagattgggcgtcacttttaatctctacatgtattagtcagttttcatcctgctgatgaagaca

SEQ ID NO: 691448 - DNA, 652 bp, Homo sapiens
ggaaaaaaagccattttataaataaaaacccacttcagaaataaaggctaacttaagaaaaaaataagaacaaaatgcacaccataacaagtacagtaaataaagtagagaatgaaaagggaaaataatcttaataaaaatttaaaaggacaaacatgatttgaagtaaatgatacatgcagagcataattgaaatgcagtacacgtatttgagatccttgcaaagtaaaaccaatgaaataaatcagggcagatatttagctaatagaaataaamggaaattgtttttatataatacatggtatattataaaaataaatgttcattaaacatttattgaattatttgactaaattaaagtttctaattcagtttcttgtctctttatacacagacagatctcacattcatgttaactggtttattttgaagcataacatttcatcaaggtgtatacctgtatgtgaatatttaacaatttgtaagtagttggcatctctatgggaactataataacttggttatgtttaaatgtataagaattaaattcttcatgagaatgaaactgctttaaagctttcttcataataaccaaagaaaattaaaatcagagatcatttgataattttgaaaaatctgttttcttatagtt

SEQ ID NO: 691449 - DNA, 2180 bp, Homo sapiens
ttgcacataagtaagctgtttattcacaaaayttcgttgtatactgtaacagttacaggttacatgatatttcttataaagtcatactccatgaatcgatggatttcgggtttcttcaccataagcaattctcaagagaccagggttatcttgctaaagcattctatatgcagatacgtccaccacaacataccaacaatgtatttggcaaggaaatttgattgggtcacttctctttgcagagaatctcccagtaaatgaagagagtagattacaggcaagctgctaatctctttctatcaaatactgggtgaggtcataaaaagtgatttttgtcttagtggtttagcagggcatcttctcaagagcagctgtgagtttcttggttagattcctgtttagtatagagtcatgaagtttagccatagaagcctttgatgagtgactccttcatttgcatttagaatctgggatgtaagtaaagatgatcattagattttcatgctttttaattagacacactaaaatcagtaaaactagttctctctctaaatttattaatactttaaattttcttaattgtctctaccttcattaatggatatacccttacattctatttgaaggaaagtcattttctctcacccaatgtatatttcttttaccttgttttttgaggttgacaattggtgaattagctttgtcattcaggagtgtgtttaaaggtttaggagactgatatccaaattaacataacttccaagaacaatttaaaatttcacaggaaaggcaattctagtgaaatttccagaaatttaattgcaattaattttgcaactgactgaacacatatattcccaataaataaaatgattacagatatttatacttttagatttgttagtattttgcttggagtaattttaagacattcgaagatgaaaaccaatgaacagtctaccaatcatattatccagttgttctaattgtactctatttcatgctgtgtaataacaaagaacccagcctccagaaatattacttgtttttttcttcatatcaccttaaaacgatgatcatggaaggctttactttttcactataggccactaactataatgtcaaaatactgcctatctaatgtaaagaaggctaaaatttgcttgaaatcttgatacacaattttgacttctctgcattcagaattgctataaaaaccactcccattatgactatgtgttttgaatttgaaaaatcatcttatatttatacaaagataattagaaatgtacaaaggcaaattgaaagcctactccaactctgccagttactttcctccttttcttctttcttacatttctaccaaaaatttacatgttctttataacaattcaaacatatataactctgctctgatacttttaggtactggtatgatggtataagcctatctgactctgaatacactccatgctaccatctaactgaaaaattgcttgatgggatatttatgttcatttccattaggatatgagtaatagaaaatagtgagtgatttagcatgaattatacacattatcaaactgatattttctgtcttttctctgtgtcatctgtatcatattgatagcctctataaataaatacatgaaactacattaatccacttgaggcaacaggatgtgatacttattaaagcagttcctcataaaatataattatgactagcacaatcactgttttgacaatgaaattaagaataataatacaattttctaaaaacctctagaacaaaacaactggatcataaatcaattcataacaatttatatttgttgagaacatatcaaattgcttactctactttttcatgaattttacattgtaagtgtcattatctagatgagaaaaagtcttgcaagagaaaagattttactaaactataatataaagttacagctagtaggtttatgaaagaaaaagaaagaaaaggaaagagagagagaaggaaggaaggaaggaaagagagaaagaaaggaaagaaagaaaaagaaagaaagagaaagaaagaaagaaagtttctgtatagtagtttaaaacctacattgcaaatattgaattagtgataatgctgacttatcaagaaaaggttcatgtattttctgtgcaatgcgttcaaa

SEQ ID NO: 691450 - DNA, 1611 bp, Homo sapiens
aacatgaaaaaggctagttcagctttagatgtaacaagaaagtgaagcataatgcaaaatcaggacaaagatattattttagcaactcaggactaaatgttgtwctcataatctagtgataagggattggtaaaacagactcacattatagaaaggcatatatatttttccattcattttagattactataaccaaagctacagacattatctatcaatttcttaattttagatctcaaactctaaagtagaatctcatgtttccttagtttcctcataatttgcaaaattataaattttcctatttaataatccagcatttctggactgaaggtttgtgatattctaacataaacaatgtattacaatggtttttatttgattttcaccctaagcattgggccttttcaagatagagatgaaagcacatttaaaactagtttaagtaatgtagcagcatgattacaaaataaatttcaagttcctgatcttgcgtcattaattgcaactttgctttttggacaatcatggtaccagacagccaggtgccattttgaatttggttttctggaaggtgcattactttttcttcctgttgttgcctcagaaatgacattaacttgatcggataaaataagtaaaactacctttgataagagaaggcacaagcaggcatgacagtcacagccatggcatcttaaacttggagagtctccagtatttctatagaattactgcagggcattcagggtcttgctgcttaaacactcaaacagtcaacagctgtcaggctgccaacaaactgcctttttctggtagcagctgtgtctgccatcactagcttccttcacacaattgtagtgaaccaatagcaagcattattttcccctggagtattaacagattactgcaggggacacatgaatgagaaggaatgctcctttattagacaattgaaggaagtggggagaaggaaagattaaaaggtgtattttattaactacatgagaaaattatcattgatacctacttgagaaacatttagtttctaattctattgctcagtttttattacatgcttgcaggtggaaatgaggtatgaatattcaaatacctttcacatgtaagttgccgtccttccaaccaccaccaatttacactctgccttcattgtctcccttctcttcatttaaaacatgaatccaatttcctccaaggcagtgacagctcttggcattaaggaaggtgaataggttatgagagatccctatgaatccataataaaaatgaaaaagaagataactggcttattttctccatagtatagttttacccttccatttgttcattctcctttatctttctccatttagtctcttctatcctgaatagaaatggagctatgttccatcagtgaagcagcttgatgaagtggaggacattagacaaacttttagtagggagacaatcaattaatataagcatggttttccatttttaaggtttcataatagtctcgacatccagattcatgtcttggcaactaactgtaacacacatggtaaaggcagaaggaaatgattttcagtggctcacaaactatcctcagga

SEQ ID NO: 691451 - DNA, 586 bp, Homo sapiens
ttttgagatggagtcttgctctgtcacccacactggagtgcagtggcatgatctccgctcactgcaagctccgcctcccaggttcacgccattctcctgcctcagcctcccaagtagctggaactacaggtgctcgccaccacacctggctaattttgtttttgtatttttagtagagatgggatttcaccatgttaaccaggatggtctcgatctcctgacctcatgactygcccacctcagcctaccaaagcgctggaattacaggtgtgagccactgcacccagccacgatcttaaaaaggtgatagcttttctcctatgagctttcttatgtatgaatgtgaggccagattaactaaatccgtcttcctgccctcttagaatttaaagaatatctaagaggaaaaatggagttatgtcactaattagaacatttagaaagccctaacagtggactaccaattttgtgaaacaataaatgtctttattttaaaagtcagtttaaattgacttttatattacttgtagctaaaggcattctgacaaactaatacatacatacaatgctgtgctaacatgttaaa

SEQ ID NO: 691452 - DNA, 2242 bp, Homo sapiens
tgcacttctgtcagtaggtttttttagtgtgtcaggcagttcagctcccaggccagcaggtggcacctgtgagcaacaacaaggtgccgcagaaacacttggatgtatgctggacctttgtttactaggatgtactctgtattgttctggtgatgggctagtctctgtgttcatcctggtggggaggtcaaaactaggtggaactggactaccaagatcacctatgaatgtcccaatgaccagctcacacaccagccctgatgcaagtgtttgagggagcccttggtgaaatgtgttgaggttaccataggttggggagggagctgcaccagatccatatcctgggcaggtargaatctaatgtgttttcctatcacacctctgtcccagggctcatgactctcagatcagacagacagtttcctatacctccagtccagaatgtagctaatagccatggaaaatgccggtctcaaagtactctgtggtagtgggacagggtgagacttcttccctcagcccgatacagacagcattgtggcttgcttgttctccagtgcagatatgctactacttcatgtagataaaggtaagcgttctaccttatggcacatatgtagatcaaggtaagtgttctaccttgtggcacatatgagtggtagtcagctatggtggtgtcagatggctggactggcccaatctcagaccccaggagcagtgatcaggttccaacagtggtggactggactaggcaatccctcaatctttagattcctagatggtcccccagaccttgtgcttgagtcctagagtgtctggactggactggactggaggacttgtcctcaggtcctcatgatccaggtgctgactgtgataaagatgggcaggttggctccaagagtgctggccgaatgctgaggcagctaaagcctgaaggtggtaacagccaggacagattgaaggcttctggggcctgagatcccaggagggtgctgggctgcagcttaaatgattagataggggcagggcagctgcactaggatctgtccagagggaatacagacaccccatctaccaactccccagtcactgggagtagtgggaacagcagctgtgagatgcatggcccactcacacctccctcttgcaggatcagtggtggtacatgtcatgggggtacgagaaggtgtctggtctcccctctccctctctaccccagtggtgggagacccttggcagagttcaggtctctgtgggctgggccctctgaagggcacccagccacagctaaaatgcttaggcaggggcaagatggttgtgtgtcaatggggagggcaggcccccacagcactagcaatggaagctgacaactgtggagcatgcggcccattcacagataatttgtttttaatttaaaagatatctcaaagatcaagtgtatatttcctccaaagttaaaatataaaatattttgaaatattctgaactttttttggttaaaatgctgacacattccttaatgtggagcccttctcactatgctgggccacagtaatgaactgtaaatcccaagttataaaaaatgaaattgtgctggaagtatctatcctagtagatgaggcaaaagacatgccctgacaatgcatgctgacttgtaaagtcctttttaattgcactgagcatcatttaatatattcactaaataccatccaattataaataatggaaagcaaagaattattcattgtcaatatgccattatatatatatttaaaaatgataaacatttaaatactttgatttaactaaaaactgagtgtatataataatgtataatttctaataacatgacaaaataaaaattgtcatagtgtgatactttgttttatatattaataacatagtatataacataacactacaatattatgactgtggttacatatattaattaaatctaatgttaataatccattaagactatggctttttacatcttaaaaggaatcttcccccaattctgactgtagttttacaaaatgttgttattaagtacttcctagatactttttggggaggtgaatgtatgtgaagtaatgagtagagtatgtttgcaaatatcactgataccggaaaaataatcattggcctaggatagtgacatcatctgctaccttttatgtaataatttattattcatcccatccagcaattttagttcaaaatcaagtctgtagcg

SEQ ID NO: 691453 - DNA, 2242 bp, Homo sapiens
tgcacttctgtcagtaggtttttttagtgtgtcaggcagttcagctcccaggccagcaggtggcacctgtgagcaacaacaaggtgccgcagaaacacttggatgtatgctggacctttgtttactaggatgtactctgtattgttctggtgatgggctagtctctgtgttcatcctggtggggaggtcaaaactaggtggaactggactaccaagatcacctatgaatgtcccaatgaccagctcacacaccagccctgatgcaagtgtttgagggagcccttggtgaaatgtgttgaggttaccataggttggggagggagctgcaccagatccatatcctgggcaggtaggaatctaatgtgttttcctatcacacctctgtcccagggctcatgactctcagatcagacagacagtttcctatacctccagtccagaatgtagctaatagccatggaaaatgcckgtctcaaagtactctgtggtagtgggacagggtgagacttcttccctcagcccgatacagacagcattgtggcttgcttgttctccagtgcagatatgctactacttcatgtagataaaggtaagcgttctaccttatggcacatatgtagatcaaggtaagtgttctaccttgtggcacatatgagtggtagtcagctatggtggtgtcagatggctggactggcccaatctcagaccccaggagcagtgatcaggttccaacagtggtggactggactaggcaatccctcaatctttagattcctagatggtcccccagaccttgtgcttgagtcctagagtgtctggactggactggactggaggacttgtcctcaggtcctcatgatccaggtgctgactgtgataaagatgggcaggttggctccaagagtgctggccgaatgctgaggcagctaaagcctgaaggtggtaacagccaggacagattgaaggcttctggggcctgagatcccaggagggtgctgggctgcagcttaaatgattagataggggcagggcagctgcactaggatctgtccagagggaatacagacaccccatctaccaactccccagtcactgggagtagtgggaacagcagctgtgagatgcatggcccactcacacctccctcttgcaggatcagtggtggtacatgtcatgggggtacgagaaggtgtctggtctcccctctccctctctaccccagtggtgggagacccttggcagagttcaggtctctgtgggctgggccctctgaagggcacccagccacagctaaaatgcttaggcaggggcaagatggttgtgtgtcaatggggagggcaggcccccacagcactagcaatggaagctgacaactgtggagcatgcggcccattcacagataatttgtttttaatttaaaagatatctcaaagatcaagtgtatatttcctccaaagttaaaatataaaatattttgaaatattctgaactttttttggttaaaatgctgacacattccttaatgtggagcccttctcactatgctgggccacagtaatgaactgtaaatcccaagttataaaaaatgaaattgtgctggaagtatctatcctagtagatgaggcaaaagacatgccctgacaatgcatgctgacttgtaaagtcctttttaattgcactgagcatcatttaatatattcactaaataccatccaattataaataatggaaagcaaagaattattcattgtcaatatgccattatatatatatttaaaaatgataaacatttaaatactttgatttaactaaaaactgagtgtatataataatgtataatttctaataacatgacaaaataaaaattgtcatagtgtgatactttgttttatatattaataacatagtatataacataacactacaatattatgactgtggttacatatattaattaaatctaatgttaataatccattaagactatggctttttacatcttaaaaggaatcttcccccaattctgactgtagttttacaaaatgttgttattaagtacttcctagatactttttggggaggtgaatgtatgtgaagtaatgagtagagtatgtttgcaaatatcactgataccggaaaaataatcattggcctaggatagtgacatcatctgctaccttttatgtaataatttattattcatcccatccagcaattttagttcaaaatcaagtctgtagcg

SEQ ID NO: 691454 - DNA, 1144 bp, Homo sapiens
tagaggaagaaaacaaaggtatgggaacattcaaaaaccatgtcgccaaataaaaggcacagattaagattttcacaaggaattttcatttatagggtggagagttgagtgtcaggaggwgggttgtgtggtcctgaaatgtgaagcaggatttggcctggggacccaacatggggctaaaagcctgcaggggaaacagagaggaaacaaatggaagggcttacggtagacagacagttgatctgctggtcctctgggggctttggtttcagtaaacatacacgtagttttggtctttcttatatgaaggaagggtttggaattatcaagagttgaagatagattggatttgtgaactgtgggctttagggtctgagtgatgtactagaaggcttttgtttctgttgatgacccagttgggagagataagaggcattctgggagcctcctaagagtgtgttgggtgaagggagctgatcagctcaccctggaccggtagtttcttctcttttttaaatttttattgattttaattaattaattattattattattgagagagagagagagtcttgctctgtcacccaggctagagtgcagtggcgtgatctcagcacactgcaatctctgcctccaggttctagtgattctcgggccccagcctttcaagtagctgggactataggcaccggccaccacacccaggtaatttttatatttttagtagagacagggtttcgccatgttgccaggctggtctcaagctcctgacctcaagtgacccactcacctcggcctcccaaattgctgggattacaggcatgagccaccacgtccgacctagaccagtagcttctaaggcagcattattcccccaacagatcctaaatggattacaaaggactgctatcttgagtaaactgaagcacaggtgatgctgtgagagcctcttattactggtggggttgtgctctgcatggctcacagagaggagagtaaaccaggagcatgaagccaggagctgtctcagaagcaggatgctgaggtggctggagcatgagctacacgcatacgatctgcctcagctttgcaactatggatctacatagaggaatcatacccatagaactggaaaagtaataac

SEQ ID NO: 691455 - DNA, 1144 bp, Homo sapiens
tagaggaagaaaacaaaggtatgggaacattcaaaaaccatgtcgccaaataaaaggcacagattaagattttcacaaggaattttcatttatagggtggagagttgagtgtcaggaggtgggttgtgtggtcctgaaatgtgaagcaggatttgkcctggggacccaacatggggctaaaagcctgcaggggaaacagagaggaaacaaatggaagggcttacggtagacagacagttgatctgctggtcctctgggggctttggtttcagtaaacatacacgtagttttggtctttcttatatgaaggaagggtttggaattatcaagagttgaagatagattggatttgtgaactgtgggctttagggtctgagtgatgtactagaaggcttttgtttctgttgatgacccagttgggagagataagaggcattctgggagcctcctaagagtgtgttgggtgaagggagctgatcagctcaccctggaccggtagtttcttctcttttttaaatttttattgattttaattaattaattattattattattgagagagagagagagtcttgctctgtcacccaggctagagtgcagtggcgtgatctcagcacactgcaatctctgcctccaggttctagtgattctcgggccccagcctttcaagtagctgggactataggcaccggccaccacacccaggtaatttttatatttttagtagagacagggtttcgccatgttgccaggctggtctcaagctcctgacctcaagtgacccactcacctcggcctcccaaattgctgggattacaggcatgagccaccacgtccgacctagaccagtagcttctaaggcagcattattcccccaacagatcctaaatggattacaaaggactgctatcttgagtaaactgaagcacaggtgatgctgtgagagcctcttattactggtggggttgtgctctgcatggctcacagagaggagagtaaaccaggagcatgaagccaggagctgtctcagaagcaggatgctgaggtggctggagcatgagctacacgcatacgatctgcctcagctttgcaactatggatctacatagaggaatcatacccatagaactggaaaagtaataac

SEQ ID NO: 691456 - DNA, 775 bp, Homo sapiens
ttttacattaaatcatgtttaagaaagccaagagtctttcaaatcaggaatgcaaaagatcttactcctgaggcctatagagctgtggatgtgtggctatgactgtgtgcattggtgggttgttggtgagggtcagatgtgatctggaataagcaaggagttcagaaacaacttttaacaagcaccgttgtaaaagtgcatatatgttgtctggattatgcatcttgtatgcaattcttaaatgtrtagtgaattattaaatctatgtaaaatacctgatacttgtgcctatcagactcaataaatgactgatattttattttatttattttttgaaacagagtatctctctgttgccccgggctggagtgcagaggcaggatcttggctcactgcaacctttgcttcctgggttcaagtgatcttcctgcctcagcttcccacatagctggggttacagatgcacaccaccatggccagctaattttgtatttttagtagacagggtttcaccatgttggtcaggctggtgttgaactcctgaactcaagtgatctgcctatcttggcctccagtagtgctcaataaaagactgatattttaaatcattactattcacattgctttcctgccttccattgaaatcacagttttgactgggaataagataagtagatttagggcaggtgtggatctgaggtggaggaaggttgaaccactaggggacagtctgagatctctgaatgtcagggaagactctgacagaaagagatca

SEQ ID NO: 691457 - DNA, 1824 bp, Homo sapiens
gggactacaggcacccgccaccacacccggctaattttgtttttgtatttttagtagagatggggtttcaccgtgttagccaggatggtctcgatctcctgatcttgtgatctgaccgccttggcctcccaaagtgttgggattacaggcgtgagccaccacacccggccacaagtggggcttttaagagttccacccatttggaaatcaactgcgtggcaggcctgagtctgaggtctttatttggtctagagaaatcttaggagagtttagaatgtggcggtaacagacagttgtgcctatgttttttaagctgggggagaaattggatggatgggagggatcatgaaagctgctggtacttgttatagtaatatgttattcctctttataaaataaaaaaagaaaccttaaagcattatctatgaagtgggtctagatatccttgagtgaataaccaccacagatattccattgtttcctcccttcttatgtgagcacagtgggcttgtaccaggtggcagttttagtaaatacctatttgtggtaaatgtcaaagagggattatatcactcccattatggccctgtgctagagcagataaaacttatttaaagatactttggttcctaatctttagggtttacaatctaacagaaaagaatggttcaaacagagtatataacataaatgtgactgaatgattatgtcaatcaaaaaactgtctgataataagaaattatgctcaccctattttttacttcactattttagtgataataatcacatttaaatgttatgtctaaggaaggtttggtttagaaattctatgttctttgacctgatgtgaaggtctaatgctaactgcttttagacttactattaagaagagacctgtgacgtggtatggtatttttgtggcctcattcctgaaatttttgttgctgccgtaatggaaaagaaacattttcgttttatagttttcattagatagtgccagaaggctgtaaaacagaccgaatgcattggagacaggtgctcatgggtttgcaggacatgcaaagtaatgtagaagattaatcaataaagccaaggcaacatacaagctacccatatccaccaagacaagcccccatcagttatatttagtgtactgtctcagtacatttacacagtacatctgtgaaaacacaactcttagaattatgttgaytgtttcttcaccagaattccctagagatgagcatgtacagatttgggtattttacgatgatgccacatggcatattatatagcacaatttactggagaaatgttttataaaagatttttagggtaaataagatttgtgtacaatacaaatctcaaaaaagtccagattatttcaaaatgggataaaatacagctatgcaaacagaccaagaaaatccttttatgatataatcaagattgaattttaaaatttatggttatttccataaattgtccagtgggataaaaatcattgtttatttttctttgttcccttgttaaactggcagcctgatacccagtaaagctaagaggaatggagacaggatgtctatatcccaaggctgtcaacggagttacatctatttcttcttcccttctctcaggttgtttaccagggaaggtgatttaaataaaacaccctgtttcattagagagtaagaaaacctgatttccttgccaggatttggggtgaaaagtggcttaaggaataaaatgtggtcaacatgttcttatgatgaacatgttcacagaccaacttcatttttataaagcgccatgagttcccagaat

SEQ ID NO: 691458 - DNA, 625 bp, Homo sapiens
tgctgcctgaaacctttagttgggtgttttaaaataaaataaaatagcaaatattcaaaacactttcaccagtgttatctcatctgatccattacatccttctaacaaatcgttaaatcaacagatgtcaaattaaacaaaaygaagcacaacaaaatgcttatctatttattgctgcaaaagtacttaaacaggtgtcatatattcaagattctaatcgctgttccagagagcaagcttttagtgaaaatatttgtaagtgttatgaccaaatgtaacaaaggcataaataaaatccaggaaaattataaaattcaaattaagaggaaacactaaggaaagtataaaggtatcttaactttcctggtaatgttctgtttctgaagctggatgatatcaacacaagtatttacatatatgctttataatttctcatatttgtaaaatactttttaaaaattaaaacctcagtgctttttttttttttcatttctacagtggcacataaaaaaggattaccactctaaagcttaatgatcacatccaaggggttcaaatgccaatgcattgggcataaattcagtgcagggtttgctgagccaattctccagttctgagtagcctc

SEQ ID NO: 691459 - DNA, 665 bp, Homo sapiens
caggtaccacagcagaaatttaccctgtagcagcattgctttggtatgatgttcaacattgctatcagtggtcgttaacatttatggcacaattcatttaggtttttacgagtccttcatattccctttatgatcccaaacaggaaatgtccatgtgggaaatgagtaacactatacaccaaaatctctttgattttcatttttatgttaatagtcactacatttctaaacccaggatgtgtagttttctgaatcttaagtattatatatatatcttggaggtctctaagagtcatctgaatggaatttctcactgcacactgatattgtcktctttgacccactttgaaagaatatagtttagggctaaatatttgatataatatgacacataataccattaatttaattattttgcttatttaactaatatctgttgcacatttattgaggacctactatgtgccaggcagttttctaggtcctatagtgtatttgttctgctattcacatggccgattgctgttataaattaaaaaatctcagaggctaaacaaaaatagaaatctatttattattcatgtgaagtccatttgggggtcagaagttttccactcaggaattagggtactagtttcattatatatcccaaacttgcaaccccc

SEQ ID NO: 691460 - DNA, 597 bp, Homo sapiens
caaacagattggtataaagtgaaggtggtaagacataaaagtgaaatatttataagatttgtatatgatattgtgattttacaacttcacttattttactagtcttagcactatttagtttattgccatctttttactagcttactagttttctatataaagacaaccaaaatgttaacaaccaaatatcaattcgtggtggatattttgaaagaaaagcattgatatttaaaatgttattttgatattggaatataaattaaaaagatgagaaatatttgtaaaccatttcagattaatttattatttattcttattttcaagaatcccataccaatagcaatatataattacatgttctttttgtttgatttgccacactttgtcaaatagtaacttaaaatagcagacagttatttaaaaacacgtttaacagatggaaagatcrcctaggcgtgcaagaagtcatcaatatgtgattcatcagtttgccttcagattattttcttacactgagagatttaaataatttccaaaccactgaaaaataggcagaggcagcaattttggaaaagcatgaattatgggaggattaag

SEQ ID NO: 691461 - DNA, 1732 bp, Homo sapiens
gcaaacctgaaatctgaacaacatcaaaaatgtaagttgcaacccttggacagaagctaaagcttctattcatagagggaatttcttcttcctgtaggaaatcttgtctctctaattttaaggttttttatccgactggaagaggcctgcacagatttcttagaataatctcctttaattaaaatcaactgattatgcacttcaatttatacttataaaagtaaaggaccaaaatctagcttaagttaacaccgtgaaagagagggacaccattctggagttgtgggactaaggcatctatttcctataggccagagtataccctgaaaaataaagatgaggcgcaaggaaagtttaaaggcctatctccccaagctgataagttgacgtgtcccagttacaccaaacacagaaaaccagaactgagatgttctgaattagttgcagccaactaatggagatatcttttatactagagaacaattaacataatatccagcagacaaatttctgagacaattacaaaatcaccctacaaaaatttgtcatatatagagggacaatgctgcagtcatgaaagtgactgtgctgctctaacactctcaatgatgcttccaattggtagagtgagaggggatattgtatccatatagggtgaaatactaaaatctaacattttgtatagtagaatagactgggttgtaaagcatttgataataaccagaaaaaaagaaaaacatgaaatctgttggtgtttcatctaggggcaagagtccctagggaagacaataggggcagttttgacaaaaaattgtttcttcttgcacctaacaagtctagatcattcaataaataagctaaattaaattcctagcttcaacctagcatgatgccatgaagagagttctctttccataaatagtaggttctaaaaagtaatatggatagcaaacattaaattaaatttaaaggtaaaatttgagattgataaaaattaaaaaggaggatagagtacatattcacatagaaaaattaactccatatactgaaaacataaaaccatatagagaataaatatgaaaattaaaagcttaaggatgctattttaatcaataaatatatagatgggtaattaacaattctgttttgcaaaamgttaccaaggtcagatgcagttttattagcgtttgaaaataagtaaaaagcaagatatgatggatatctttagttcatttctactcttacaagtacctaacatttctgataatatgatatttacccataaatatatgtatgcatgtataacttctcaacactgcttctcatgccatgagacaagagaatcctattgttggtaaactctttaacttctttgcatgtccatcacatttttacattttgctgtagtcttgctaactacggtagtgtggcataaagcaagaaaatattttgttcttgtcaattatgcagcaatcacattaaagggaagatatcacccaccagccattcttgttgatatttgttaatgaggtaataaggactaaggggtcagagatatctttgcaagccctccttgtaaccattgaactggatgccaaagaccagagttctaattatttcccagttgtaacttctctggttagatagttgtttctgccagcataattgcctcaaacttcgactactgcaggaagtttacctgctctctggcaaataaacctctggtagcaat

SEQ ID NO: 691462 - DNA, 1972 bp, Homo sapiens
taacaatcttgttataaaatccttgaacttctcagtcatggtatcagtctcacatcatcttacttggattcttcactttctcctattgttctccacacttagagaaagattttttgaacctttagaatccacaaagacagaaattcaaaattacatttgtctgtctggtaaaggtacttaaatattatttagtttacctagataccaatacagattctataatacatcccattattaagcataagtaattagaaactttatttattttggtcagtctacatatacatttagaacttctttggcctcatgactccttctgctgaccctttctcccaatattgacctttactgtagcactatataattttcctctgtattagggaatgttagcgtttatccaattatctaattatttcattttttccagagtacttttcaaatctctatgatttcagccttttttccctgcttaagcaatgcaatgaagttgacgtcaaccatacacacatatttatacacatacacccacacattcacatccttatctttttaatagacaaatagaaaatgttgattaaaatgatatcactttgcaacgttaattggaccgtgatctcactgtataataagcttccatttagaaaacatttgctatgtgaggtgtttttggacactgcattttagattagaacctaattgaatatatagtatgtggccttaaaaagtacaattaccactttttaaaagaacaacataaattgctgtgtaatctgacaaagtgagtgttgttcatctagaagcaatgtgtgtgcgttgagagtgatgtgaggagaaagggagagcaaagacgtatttctattttgtttgtttttcctcctttcatatttctttttaaaatttttttctacttccatagcttttggtggagcaggtggtatttgcttacgtgtgtaagttctttagtggtgatttgtgagattgttggtgcacccatcacccaagcagtatacactgaacccaatacccaatttgtagtcctttatacttcacccccttcccatcgtttccccccgagtccctaaagtccactgtattcttcttatgcctttgcatccttatagtttagctcccacttataaatgagaatgtatgatgtttggttttccattcctgagttacttcacttggaataatagtctctaatcctatccaggttgttgcwaatgcaatcaattcattccttttttatagctgagtagtattcaatggtatatattcaattcaatggtatattgaattggtatatatacacacacaccattgaattggtatatatatatatatatatatatatatatatacacaccattgaattgtgacatatatatctatatatctgtatctctatatatctatatctatatctatatctatgtatcacaatttctttatccactcgttgactgatgggcatttgggttggttccacatttttgcaactgtaaactgtgctgctataaacatgcgtgtgcaagtatctttttcatataatgacttcttttcctctgggtagataccctatagtgggattgttggatcaaatggtagctctacttttagtttttcaaggaacctccacactgttttccataatggttgtactagtttacattcccgccagcagtgtaaaagtgttgcctttcactgcatccatgccaacatctattttgccaataagcacatgaaaaagttctcagcatcactaatgatcagagaaatgcaaatcaaaaccacaatgccatagataccacctcactcccacaagaacggcctccttttctatttctaataatttttatcaataagttgagcacttttcatgtcttcttttcttatccattcttttaaaattatttttctattacctttctttttctcttgcttcttttttactgtctattccttttttatt

SEQ ID NO: 691463 - DNA, 1972 bp, Homo sapiens
taacaatcttgttataaaatccttgaacttctcagtcatggtatcagtctcacatcatcttacttggattcttcactttctcctattgttctccacacttagagaaagattttttgaacctttagaatccacaaagacagaaattcaaaattacatttgtctgtctggtaaaggtacttaaatattatttagtttacctagataccaatacagattctataatacatcccattattaagcataagtaattagaaactttatttattttggtcagtctacatatacatttagaacttctttggcctcatgactccttctgctgaccctttctcccaatattgacctttactgtagcactatataattttcctctgtattagggaatgttagcgtttatccaattatctaattatttcattttttccagagtacttttcaaatctctatgatttcagccttttttccctgcttaagcaatgcaatgaagttgacgtcaaccatacacacatatttatacacatacacccacacattcacatccttatctttttaatagacaaatagaaaatgttgattaaaatgatatcactttgcaacgttaattggaccgtgatctcactgtataataagcttccatttagaaaacatttgctatgtgaggtgtttttggacactgcattttagattagaacctaattgaatatatagtatgtggccttaaaaagtacaattaccactttttaaaagaacaacataaattgctgtgtaatctgacaaagtgagtgttgttcatctagaagcaatgtgtgtgcgttgagagtgatgtgaggagaaagggagagcaaagacgtatttctattttgtttgtttttcctcctttcatatttctttttaaaatttttttctacttccatagcttttggtggagcaggtggtatttgcttacgtgtgtaagttctttagtggtgatttgtgagattgttggtgcacccatcacccaagcagtatacactgaacccaatacccaatttgtagtcctttatacttcacccccttcccatcgtttccccccgagtccctaaagtccactgtattcttcttatgcctttgcatccttatagtttagctcccacttataaatgagaatgtatgatgtttggttttccattcctgagttacttcacttggaataatagtctctaatcctatccaggttgttgcaaatgcaatcaattcattccttttttatagctgagtagtattcaatggtatatattcaattcaatggtatattgaattggtatatatacacacacaccattgaattggtatatatatatatatatatatatatatatatacacaccattgaattgtgacatatatatctatatatctgtatctctatatatctatatctatatctatatctatgtatcacaatttctttatccactcgttgactgatgggcatttgggttggttccacatttttgcaactgtaaactgtgctgctataaacatgcgtgtgcaagtatctttttcatataatgacttcttttcctctgggtagataccctatagtgggattgttggatcaaatggtagctctacttttagtttttcaaggaacctccacactgttttccataatggttgtactagtttacattcccgccagcagtgtaaaagtgttgcctttcactgcatccatgccaacatctattttgccaataagcacatgaaaaagttctcagcatcactaatgatcagagaaatgcaaatcaaaaccacaatgccatagataccacctcactcccacaagaacggcctccttttctatttctaataatttttatcaataagttgagcacttttcatgtyttcttttcttatccattcttttaaaattatttttctattacctttctttttctcttgcttcttttttactgtctattccttttttatt

SEQ ID NO: 691464 - DNA, 619 bp, Homo sapiens
taaaatttggtgttcctgcaggggtggggttggggagggaggaatcagacaaatgatgtaatcatatattctaccatcttattccacctcctgaatgtaattttcagtatgattgrgcttaaatctaccatcttgctattcattttatatttcctttttcatactttgttcatttttcttctttcattgcttttttttttagattaaccagtgtttttttatgtgatctatagtttattagctcagactctgttgtatattttagttattgttcctggatttacaatatacatctttaacacagaataccttaaaataatattatgccattttgcattaatgtaagaatcttacaaaagtattgtttttcttctatgttttgtcctttgtttgtgctattgttgttatacatattacttctacatagtctataaaccccacaatacattattactgcatctttgctttaaacactcatttattttataaaatgtctagaaatgattcatatatatttcataattacccatgtgtttactgtattctgcattcttcatgtctttgtgcagattcagatttctatctgatatcatttttattctactgaggagcttccttc

SEQ ID NO: 691465 - DNA, 619 bp, Homo sapiens
taaaatttggtgttcctgcaggggtggggttggggagggaggaatcagacaaatgatgtaatcatatattctaccatcttattccacctcctgaatgtaattttcagtatgattgagcttaaatctaccatcttgctattcattttatatttcctttttcatactttgttcatttttcttctttcattgcttttttttttagattaaycagtgtttttttatgtgatctatagtttattagctcagactctgttgtatattttagttattgttcctggatttacaatatacatctttaacacagaataccttaaaataatattatgccattttgcattaatgtaagaatcttacaaaagtattgtttttcttctatgttttgtcctttgtttgtgctattgttgttatacatattacttctacatagtctataaaccccacaatacattattactgcatctttgctttaaacactcatttattttataaaatgtctagaaatgattcatatatatttcataattacccatgtgtttactgtattctgcattcttcatgtctttgtgcagattcagatttctatctgatatcatttttattctactgaggagcttccttc

SEQ ID NO: 691466 - DNA, 603 bp, Homo sapiens
tacatactaaaaaatataattttacaatggtcactcacttctaaataattcatgggccaaagagggaatgccaaggaaaataaatacattgtagttaataaaagtgagacagcaaaatttgtgagatgctgctaaagcagttctgagaaacatttatagcactaaatggatamatttaggaaaatgtatatatatagcactaaatgcatgtatgtaggaaaagtctcaaatcgataatctaagcccccacttcaagaacctataaaaagaactgtaaagtaaacccaaaatatgcagaaggaaaaacataataaaactgtagaaatcaatggaattaaaaatagaaaatagacaattattggtgaaacaaaaggctggttcttaaaaattatcagtgaaatggacagacctttaacaaggctgacctagaaaaaaaaaatgaatgaataaacaaataactaatatcaggaataaaacataggatatcactagagaccctacagacatcaaaaggataatacaggaatactacaaattattatacacacataaatttggcaacttagatgaaatggatcacttccttgagaaacacaagctacc

SEQ ID NO: 691467 - DNA, 480 bp, Homo sapiens
gattgatgtgataggttttttttttttaattctggggttgaattatcacaacaccgggatattaaactgttggtgctcaatctgtacaattatcctaatcttgcaaagcttacaacaggtattttaatatcttactaagttaaaattctaataaagaatattgcagaggggttaaaacaatttaaatgcaaaatttttactagattaatcttatttttgcagcaaaatgtaccaatcatttattaggattgtttgcaaaaatatacaaataggctgggtccggtggctcacatctgtactcccagcactttgggaggccaaggtgggaggattgcttgaagcccaggagttcaagaccagcctaggcaacaaagtgagaccaccccaccycctgccatctctacaaaaaataaaaaaaattagccaggcacgcttgcagtccctgatactagggaagctgagacaggaggatcacttgag

SEQ ID NO: 691468 - DNA, 480 bp, Homo sapiens
gattgatgtgataggttttttttttttaattctggggttgaattatcacaacaccgggatattaaactgttggtgctcaatctgtacaattatcctaatcttgcaaagcttacaacaggtattttaatatcttactaagttaaaattctaataaagaatattgcagaggggttaaaacaatttaaatgcaaaatttttactagattaatcttatttttgcagcaaaatgtaccaatcatttattaggattgtttgcaaaaatatacaaataggctgggtccggtggctcacatctgtactcccagcactttgggaggccaaggtgggaggattgcttgaagcccaggagttcaagaccagcctaggcaacaaagtgagaccaccccaccccctgccatctctacaaaaamtaaaaaaaattagccaggcacgcttgcagtccctgatactagggaagctgagacaggaggatcacttgag

SEQ ID NO: 691469 - DNA, 1907 bp, Homo sapiens
atagccaaaaggtgaaaacaacccaagtgtccactgacacagaaatggatgaatgaaatgtgctatatccataaaactgactaatgaataagccacaaatgacaaatattttatgattccacttaaatgaaatatttagaacaggcaaattcatagagaaagtagattagagattaccaggggctagaacaagggagaatgaagaattattgcttgatgaatatagagtttctgtttgggtggtggaaatattttagcagtaagataatgctgatggttgtacaacattgtaaatataatgcctcagatttacacacttaaaatggttaaaatggcatattttgtgctgtatatattttaaccacatttttacaaaaagctgtatcaaaaatttaaccaaatttaaaaataaatggtaaacacagtagtaatctttaagaaaagcaaatttaccaagaatttatattcctggggtacaacacacatttaacacttaaaagacatacatacttgtttcaaagctgagagcttaggggcatgttgaatatcatgtagagaagaattctgaactgccagtttttcggcagtggtcttgaattctggatgttgaggtgttaagactaatgctggatggttgcacagtttacgtaagtactgtaatgccttcaagaggaaaaaaaaagtatatatgagtcaatttcgcatatcacaaatatttttatctctgtatctttccctatgctatttcctatgctgtttagaatgcctttctccctcttcttgctcggcaaacttctactcattcttcaagaaccagttcaaatgtctcatttgagattcttgtgcagtttctatgcggacatttacaacgcgtataaattgtactgtttatatctgtctcccccaccagacaatgagcttcccatggcaaatkgagcgtcttagttgttttctttaaaaccctttcccactcaaagtacctggtaatgcagacagatgcttctggaaccagggatcattttggatacaaaagttgctcaaacttcagtgagtgtaaaaatttctggccgggcatggtgcctcacccctgtaatcccaacagtttgggaggccgaggtgggtggatcctgaggtcaggagttcaagaccagctggccaacatggtgaaaccttgtctctactaaaaatacaaaaattagccaggcatggtggcatgtgcctgtaatcccagcaactcgggaggctgaggcaggaaaattgcttgaaccctggaggtggaggttgcagtaagccaagatcatgccactgcactccatcctgggtgacagagcgagactcagtctttaaaaaaaaaattcttgaggaccttataaacctgaaattctctcccttctacacattattctgattcagtagatgagaggaggggagcaaggaaggggactgtctcaagtggttgtgtttgtgaaacagaaccttatatggtctcttctctgattcagccacactttctcttctgcctcttacttggcttaagatttgggtctcagccttggcacacagatgttttattagtaagctccattggcaaggctcaagacagtgctgagcactaggattaaaacttgtgggagaggccaggtgcagtggtttgcacctataatcccagctacttaggaggctgaagagggaggatcacttgaggccaaaagttcaagaccagcctgggcaacatggtgagaccttatcactaaaaaaatttttaaaaattagccaggtgtggtggtgtgcacctgtagtcctacctacttaccaagctgaggctgaggatcgcttgagccctggaatttgaggttgcagtaagctatgatcccaccactccagcctgggcaacaaaacatgacccc

SEQ ID NO: 691470 - DNA, 1288 bp, Homo sapiens
acattgcttctaactgcagaagtctcagaaggtcgtgtagaggaggtgaaaggaatgtgggctgggcagagctggaatctgctgggatggagtagaaagactccaggtggcatgagcaatgtggcaggaacatgctgggtaggaacacacggtccagcagggctggagtgaaggagcctgaagggggtttgtgtgcaatggtgctcaactcctaaaatgccaagctaaccacgggcttctctaggagggaatagggaatagggagacgctggaaggcttggggtggccctggattggggagcgcaggccatccgttgcatcctgatgagttcaagtatgtgcccctttgtctccatgacaggcctgggttgctgggtgctgggacatcaggcctgcaggaccccgcagggtacgtaccccctccacgaccctccaatgtcctcgaggagccctgcccacccccgacctgaaccaggcaccacaggcgttagggacagttgtgccggttggctccccagagggccggaacaggaagacccagccccaactttcccctttctcccacatgcaagggagttgcaagaagcagttgtacatgaggccccacttgacagaatggcctacgcaggcctctttagcagagagtggccttgtcagctcccaggtccaaatgactgttagcatgctggctctgatctgcagcagtgccgggccctctcaagcgcctccctggcgtctctgggactctggcgctctgtatctggccccagggtctggggtgaggcacttgcccgtcaggggtcagaggatctgctcaaagcagaagctgctctgatgctgggtcagcagttttccctccacatggcatgctccagtcactgtttgcaagggcagcatctagatagtgctggtcactctggtcactgctcctggcctcacctgtagcccccatggccaatattgctggcagcccacacacaatccccrctgctggctcagaggggctcaggctgctggcaccacttgaaagctgaatgtggctcagacagcagcagtcactgaaactgccccgggccctgggctcaaactcggggggtaggggagggtgttctggggtctgcagcagcctgcttgggagtgggaattcagttcgatccatttaattcaacttaaagatttgttgagtgcctgtaagaaccaggccctgggctgagattagacatatccacaagcagatgtggccacaaaaaggccaccgtttatagttcagggggaagacaggagcata

SEQ ID NO: 691471 - DNA, 771 bp, Homo sapiens
ggcgggagaatcacttgaactcgggaggcagagattgcagtgagctgagatcgtgccactgcactccagcctgggcgacagagagagaccctgtctcaaaaaaaaaatatatatatatacatatatatatccaccagagacaagctcctctaacacagacacctgcatgtaaactataggcacaaaggtaaaataacaggaagggccctagatttgggagtcaatataactggattcaaaggccagccctgccctccccttaaatcccagcacatctttgccaacattggtttatcaaacttttaatgttttccaacaaagaggtgataaatgttatcccattcttttaatttacattccaatgacattttaatagaactataaaacaccagagttgaaagagacctcagtgatcaagtactcaartgccttcgtttaaagaatttttaaattgagtataagtaatacattgacacattatcatggtaaaattatatatatattatatatatatatagagagagagagagagagagagagcaatctattgaatagaaaatgaaaattccactttgcaccttcctctgactctcttactgagggtaaattgatgttcatcattgctacatgatgggtaatttgctacatatctacttgcatatgtaaatgcataaaagtatagtgagttgtggtattttacataaaagatatatagccgtatatctttttttgtaattattattttctaacaacacattctaagggtgtctt

SEQ ID NO: 691472 - DNA, 2037 bp, Homo sapiens
ttggagaccacaaatgctggcggggctcagggcacattgtctggttatttggaatgaatgctggcagatgccttcagtgctgggctcacttctctgcacctgccctcacagcaccacctgggaaccgtctcggagaatgcatcccctgcgcttggctgatggtagacccgcccgcagtctgatgcccagacggcagggcccccagaaagggacaaactgagggcatagtttagagcttctcctcctgtgtcctttccccagctcttccctctcctagatggctggaatggagattgagattcttttttcaagaattttaaatggcagggactgtttctaaagagcagacctgtgactactttaaactgcccgtgcccactacctgcaaagctgttcctaaagcccttaccttattcacaaggagcatgacacgaatggctgtggggcctggggacaagagccctgcatacatctgcttggcttgtgtactgcacaattccagggaggcatcactcacataggctacaatgtattccacctgcactgtgggtgggtggcccgactgcagaatcctggacgcagctaaacagtacaaggaggccgccaggagaccccagactggtgctatcaggctttctctaatytagggatgtaaacattcgctgcacctctgtcagctgccaacatgaagacaatggcatttgggtgggagggcctgggagcggttaactgggttctatggcttgggcaagccatgccagtgttctggagacaagagagaatccccccacccaaccgtcctgagacatatgaatctgaggggctcagggagacaagagtttctgagtaggcctagagggccaatgggaggaaaaaccaaagcgttgggtgtgggagcccaggtttaggacctgcaaactgagctgggtgccagactcccagactggacagtctccagccagctagtgatcagattttattctttcacttatgatcatttcacatccattgaaccctttccttgtgccaggccctgtagcaatgcattatacgatctcatttaatcctcagggcacccttcgaaggttcttttgtgatcctcagtttagaaatgaggaaacggacacggggagagggtcagtcacttgcccgagatcacacagcatgtacacaatgggactgggatctgaactcagattctcattttgaacaatcatgctcctcgcctttgctcagaatcatctgaaaatagggaacgtttgctttaggaaagtaagattaggggaggtggacatgaacggggtacacaggtctgtcccaaacactctgatcgtggcatcattcaactccctgatatcctccccttccctcctcttctacctcctctcatgctttttcgtgtcacagtcatcccttccaaccaggctagtcctgaccccctgcctctagcgagggcagggagaaggctatctgcagaccgtcacttttatctctccatcaacactcggtcttcccttccagatttggtgctatgttcacagccttcaagaagcctgcacaggttcatgtcactcatgtattcatccaatacctgatgagcacctattttgcgccagggaccattccaaaccctgggatgcacacaggaatgagctgcgtgacctacccttaaaaagctcacagtctagctggggagaaggggagtggaacagagtaggagagaccaggtggtcctgcaacagcagctctcaagctgaaggaccacctggggatctgattgaaagctctggggtggggcccaatgtcctgccattccaacaagctgctgggtgctgctgcgggggctggggaccactctatgtgtaccaggagccctgagtattccagctgctaccacacaaatgaatgcctggtgctgggacgaggggagctcagatagggaataggggtttgggaaggagctgagtgaggcctgagccaagtcctgacctaagtggaggggaagtgatctcggttgccttttggaaatgaaatgca

SEQ ID NO: 691473 - DNA, 2037 bp, Homo sapiens
ttggagaccacaaatgctggcggggctcagggcacattgtctggttatttggaatgaatgctggcagatgccttcagtgctgggctcacttctctgcacctgccctcacagcaccacctgggaaccgtctcggagaatgcatcccctgcgcttggctgatggtagacccgcccgcagtctgatgcccagacggcagggcccccagaaagggacaaactgagggcatagtttagagcttctcctcctgtgtcctttccccagctcttccctctcctagatggctggaatggagattgagattcttttttcaagaattttaaatggcagggactgtttctaaagagcagacctgtgactactttaaactgcccgtgcccactacctgcaaagctgttcctaaagcccttaccttattcacaaggagcatgacacgaatggctgtggggcctggggacaagagccctgcatacatctgcttggcttgtgtactgcacaattccagggaggcatcactcacataggctacaatgtattccacctgcactgtgggtgggtggcccgactgcagaatcctggacgcagctaaacagtacaaggaggccgccaggagaccccagactggtgctatcaggctttctctaatttagggatgtaaacattcgctgcacctctgtcagctgccaacatgaagacaatggcatttgggtgggagggcctgggagcggttaactgggttctatggcttgggcaagccatgccagtgttctggagacaagagagaayccccccacccaaccgtcctgagacatatgaatctgaggggctcagggagacaagagtttctgagtaggcctagagggccaatgggaggaaaaaccaaagcgttgggtgtgggagcccaggtttaggacctgcaaactgagctgggtgccagactcccagactggacagtctccagccagctagtgatcagattttattctttcacttatgatcatttcacatccattgaaccctttccttgtgccaggccctgtagcaatgcattatacgatctcatttaatcctcagggcacccttcgaaggttcttttgtgatcctcagtttagaaatgaggaaacggacacggggagagggtcagtcacttgcccgagatcacacagcatgtacacaatgggactgggatctgaactcagattctcattttgaacaatcatgctcctcgcctttgctcagaatcatctgaaaatagggaacgtttgctttaggaaagtaagattaggggaggtggacatgaacggggtacacaggtctgtcccaaacactctgatcgtggcatcattcaactccctgatatcctccccttccctcctcttctacctcctctcatgctttttcgtgtcacagtcatcccttccaaccaggctagtcctgaccccctgcctctagcgagggcagggagaaggctatctgcagaccgtcacttttatctctccatcaacactcggtcttcccttccagatttggtgctatgttcacagccttcaagaagcctgcacaggttcatgtcactcatgtattcatccaatacctgatgagcacctattttgcgccagggaccattccaaaccctgggatgcacacaggaatgagctgcgtgacctacccttaaaaagctcacagtctagctggggagaaggggagtggaacagagtaggagagaccaggtggtcctgcaacagcagctctcaagctgaaggaccacctggggatctgattgaaagctctggggtggggcccaatgtcctgccattccaacaagctgctgggtgctgctgcgggggctggggaccactctatgtgtaccaggagccctgagtattccagctgctaccacacaaatgaatgcctggtgctgggacgaggggagctcagatagggaataggggtttgggaaggagctgagtgaggcctgagccaagtcctgacctaagtggaggggaagtgatctcggttgccttttggaaatgaaatgca

SEQ ID NO: 691474 - DNA, 565 bp, Homo sapiens
ataatcagctttcccaatatgaggtggctccagctcaaggtagatttggaacacaaaggaaaaagttcttctatactggaagcaggagttgaaaggcgatcacagtgaaataatgacagtcaactcctgtaagtctatactagggaaggagaccagtctgacttagctatgtctgaagcacacagtttaaaacgatctttaattcttwaaaaaaaaaaaaaaagcttttatttgaggttcaggggaacatgtgcaagtttgttatatagactcatgtcatgggggtttgctgtacagattatttcatcacgtaggcactaagcctagtatcaagcacttagcttttttgctcctctcttcctcccaccctccaccctcaggtagaccccagtgtctcgttcccttctttgcgtccatgtgttctcatcatttatctcccacttgtgagaacatggggtatttggttttctgttcctgcatgagtttgttaaggataatggcctccagctccatccatgtttcctcaaaagacatgtctccttctgtttttttttttggctgcata

SEQ ID NO: 691475 - DNA, 565 bp, Homo sapiens
ataatcagctttcccaatatgaggtggctccagctcaaggtagatttggaacacaaaggaaaaagttcttctatactggaagcaggagttgaaaggcgatcacagtgaaataatgacagtcaactcctgtaagtctatactagggaaggagaccagtctgacttagctatgtctgaagcacacagtttaaaacgatctttaattcttawaaaaaaaaaaaaaagcttttatttgaggttcaggggaacatgtgcaagtttgttatatagactcatgtcatgggggtttgctgtacagattatttcatcacgtaggcactaagcctagtatcaagcacttagcttttttgctcctctcttcctcccaccctccaccctcaggtagaccccagtgtctcgttcccttctttgcgtccatgtgttctcatcatttatctcccacttgtgagaacatggggtatttggttttctgttcctgcatgagtttgttaaggataatggcctccagctccatccatgtttcctcaaaagacatgtctccttctgtttttttttttggctgcata

SEQ ID NO: 691476 - DNA, 565 bp, Homo sapiens
ataatcagctttcccaatatgaggtggctccagctcaaggtagatttggaacacaaaggaaaaagttcttctatactggaagcaggagttgaaaggcgatcacagtgaaataatgacagtcaactcctgtaagtctatactagggaaggagaccagtctgacttagctatgtctgaagcacacagtttaaaacgatctttaattcttaawaaaaaaaaaaaaagcttttatttgaggttcaggggaacatgtgcaagtttgttatatagactcatgtcatgggggtttgctgtacagattatttcatcacgtaggcactaagcctagtatcaagcacttagcttttttgctcctctcttcctcccaccctccaccctcaggtagaccccagtgtctcgttcccttctttgcgtccatgtgttctcatcatttatctcccacttgtgagaacatggggtatttggttttctgttcctgcatgagtttgttaaggataatggcctccagctccatccatgtttcctcaaaagacatgtctccttctgtttttttttttggctgcata

SEQ ID NO: 691477 - DNA, 367 bp, Homo sapiens
gaattccawggaggctttttgcaagtggtcatttgcacatgtgaaatgcctgctttgtttttgcatttgtaacagcctttttgaattagattacaaaccaaccctgtttcttgggaccagcatcaccaccaggctggttatgaagaactgtcgtctttcagttagacacccacacgtctcactgaattgctcccatctgaaaacaatgaggtaattcactatccaagtgctctccaacagaccgaaagcatcagtaccaagctgaaatcttcaaataagggaggctttcaatgtttgtctaaaactccttaacctacttgcaaaaagaacagagaccatttattgtctggaagagtgatctgggaca

SEQ ID NO: 691478 - DNA, 367 bp, Homo sapiens
gaattccaaggaggctttttgcaagtggtcwtttgcacatgtgaaatgcctgctttgtttttgcatttgtaacagcctttttgaattagattacaaaccaaccctgtttcttgggaccagcatcaccaccaggctggttatgaagaactgtcgtctttcagttagacacccacacgtctcactgaattgctcccatctgaaaacaatgaggtaattcactatccaagtgctctccaacagaccgaaagcatcagtaccaagctgaaatcttcaaataagggaggctttcaatgtttgtctaaaactccttaacctacttgcaaaaagaacagagaccatttattgtctggaagagtgatctgggaca

SEQ ID NO: 691479 - DNA, 611 bp, Homo sapiens
tggtcccaagcttttcagacaagaaatagtcaacctgtatctactatacatggcattttgcctttttatccagacccctccaaaccctaagggtttgtggactacttcctagggtgactgcctcctaccaattctgcattttcttgaatatttagagataagtagcagttgctcagatgatagctaataagagtgattgctgccaggcacggtggctcacacctgtaatctcagaactttgggaagctgagccgggtggaatgcctgagtctaggagtttgagaccagcctgggcaacatggcaaaaccccgttgtctactaaaaacacaaaaaattagttggatgtggtggtgtgcacctgtaatcccagctattygggaggttgagatgtgagaatcacctgagcccgggaagtctaggctacagtaagctgagattgcaccactgcactccagcctgggcaactgaagtgagaccctgtctcaaaaaaaacaatgattaatgaattatggttttctgtcggctgaacctttcctccctaagaaatatctcttctattctctctcaactcattaactgactagactggggtctggccttcagatttccc

SEQ ID NO: 691480 - DNA, 608 bp, Homo sapiens
tgaaaccatgtaagtaatactccctaaagctgtctccagctttataagtattaagctgctgctttaaatttactttttaggtgtaggctcacctcaaatttgttttcctctaataatatctctctaagcaataatttcatggatctttctgaagggtatacttgctcccaaatatatgcttttcatcaggagaaggctttaaatagattgataattatcacatttggagccatcttaaatgaagatgaggaatttccccttgctgttgggatcctttctccttttatcctttacttcttcttcaaccctatatctaaactatcagtaaattctgtggtatcttccttcactccrtgtattagtctgctttcacactgctgtaaagaactttcctaagacttggtaatttataaaggaatgaggtttaattgactcacagttccacatgactggggaggcctcaggaaacttacagtcatggtggaaggagaagcaggaaccttctcaacaaggcagcaagaaagaaagcagctcaagcaagggaaatgccagatgcttatgaaaccatcagatctcatgagtatttactcactgttatgagaacagca

SEQ ID NO: 691481 - DNA, 2163 bp, Homo sapiens
gaaatcacaatactcagattatagaaaaataaactctccaatatctgccaagggagtcatgaggcttcttaactgaaagcctacctgactacagaacccttaatggcaattagctatttgtctctgtttttcgatctcaaaaaaatttaaaagtagtctctgtccccattttgcggagggggtttccattcagaggtgtgatggacatgaagttgtgctacccagatcgcccctaaagaaggaactttctgccccagcagacagcctccagttgtcaactttggtagggtttgacccatctgcagagagccacattccctagcactcactttttttttcaggcagagtacctgattaaggcagaggtatagaggcccagccatctcagcccaatgtgagtcgtgtctgatgggctatatgcattcctgcattctctatggggagttctctctctgccatcctgcttcctgaccttcacttccaaagatgtcaactcctaataataatagtaagcccctatctttaccagactttgtctcagtctttgcttctagacaactaggcctttgacaaaagataaaatgacacagatttagacatacactatcttgtgtttgaggaaattctgaaaaacacagtcatatacaattcagcatgaagatactagcaaacacaaaaaaagatttatttagtgcagttgggctaaaaattgcatgtctgttgtttaatttttcatcagctcctcagtcaaagcccacaggcaaatcccacactgttgacgcgtttctagctttctggtagcgccttctcttttactacaaaaattgccaacttaaacaacaatgtttctaagggaattggattaaaaggaactaaggcagctgaaaaaatattgctatatagaagccttggaagaaatacacaaaattctaagaatgtgaaaaggattacagaaaaacactttcattaaattcggcaaaatataagccattttaatgtaaatgatctattgaggattatagatctttgtggtaaacaattcaatgaaattattgtttaattagtgcctataacgtatatggcctgctgtacagtgtagtaagaattacaataaagtgagagcaggagattcctctcttctgataaaggatgaaatatgaaaatatgttaagtgcatttcaaatgttggggatggggagacagggagagaaagaatatgcgtctgaggaaaaacaaagcttcctggtatctgagaaaggttattaaaaatgagtaatatcctgccaggtaggattgaaggggtatgaaatcccagttaaggaaacagcacgaaggatggagaagaaactgtgtgttttgtttgacttccactggtctyagtgtctcacccatgaagggaagtagttgcagagaaatggggcatttcagactgtgtttttgaaaaccacttagcccattaaatagttcttctgggttaacttgcttgagggaagttcttggaaaaaagacctattatctattagtacatatttgagctccttgcaaatgtgcacagtttagaaagacttgttttctgtttctttttaaaattcaggtctgtgcttgttctttcacataaaaacgtctgagtacactgtcaccgcacacatgcgccaagtccaattaaatgttagggctcagatgccggtattctgtacacgtgttcatcactgcctaacagtagttgtgcaatagtaagtgagtgggtaggatgaagaattgtgataatatcttttacgggtttcatctgaaggttttggaagcttcttggctgaattttatttttgtgaaggggaatgtgagcagatggtagatgttgtcagtgatttaactttgaaataaaagtgtccaactacctcctctttccagcttctagattacattaaagatacacaacaactatgtatctttgtgaaagtgtgtaatcttagcaattacaaaagtaaatgagatgttgagattgacatgattgtaaatgtcactcataatgttgctctaattttctacttatgtttattaaagctggctcattgttcttatttagtgatgttgaaattttaaaaagttaaaaatttggatatataatatataatacctttgtactagaaaaatagcaattttggg

SEQ ID NO: 691482 - DNA, 1299 bp, Homo sapiens
ttttcatggggttcacttttcctatttaaaatcaaaaaacaaaatctggccttcttgtttgttgcaaggggttttatggtgaggtaccaatgagatatttgtggaagcacttgtaatacatagccttctctataagataaatgtcagttattcctttgtgctattccaaaaattatttttgctcttaaaagaggtaatgtctacattagaagaaaacaactcaaaagaacaatagtctgtattaatatttcagcgcttcgtatacaccaggcaagcattacacatatcatctcatgtaattctcacaaaacaatatgaagttgctattataatcctggttcctgttttacaggtgaccaagggaggatgagcaacaccttaaaataagaaagccagcgtagtggtgatggtttcagaacactgtgaacgtacttaacgccactgaatcttacacttacaaatggttaaagtgataaacgttatgtgtattttaccacaataagaataaataataaaagccaggaaccaaagccagacagtatgcaaataccttaagaggtgagatcacagggccatgccagttatctcagactagcaaagacaggcatttatttttctaaaacaaataggcatttgtagatctatagttttatctacttactttttagtgtttagaaaaactgaagtttgtgtactcaatgtcaagcaattttattgattatttgatctctaactgtggctctcctggacatgagttagatgcatgatctcctcaagggaatttatctccacgaactggatacatagagttttaaaaacaaatatctgatattctattttctgattcaaaccaaagtattttgctttattgtaactttagttaaacttttacgttgccaaactagaattattcatgaaattctcaaaactatattgggttacatgtatttaaaccatgttccgtgaaaatataaatgatcctataacatttgcaacctaatcgtaattcattttataayggcaatctcaaaacacgtttgttaattgtgttaattatatcactctcgttgactttctcagctcactttcccttttggtgaagagatacttatgacatttagtgtttaatgtcattagctttttttctgaataagggtgggaatattgttcagcaattttgaaatctaacaggaataaatgcaggatgtggaggcatctgttgactatacacatgctgaagaatcacagttgttaagaaataacagcaatctaaaagggaaaggaaatatactgggggaa

SEQ ID NO: 691483 - DNA, 1321 bp, Homo sapiens
acctagactgtctgttagagttatagtgtatacaaaattatagatgttgggagatttctccattgttttagcagaaactatcagccctctttatttaaaggctagcatatccccaggcaaattgagtttccatgctcagttgattcagagcctacttcaagsaaaggctgccaactatgtcaaaatgtatactgattttgtgatatacatagttttccaaaggatgaagtgagatcaccagtctcaatccatttgtgacttgacttcgatttaaagttgccctcaagaaatagctggctggtattatatgtgtactgaaatatttttcattgaggtaggtcgctccttatcctttagtttactgattatgagtcactaaaattatcttgaaaaattagaaaaaaaagtcctattattgagagaatccattacattagtataaggcaaaacagcctacttaccatcaacaggaacattttaggaaatttgttctttttgacattttctaaaagaatagctcttcctacaacattaatgctaaatagatggaaagtgtatgaagtataagaatatacacaaattgcattttaattcctatttttcttttaaaagatgtcaatgataaatccaaatgtggcttaaatatacactttgcttcaaatgtttaggaaatgatgcctaacacaaagaaaaataaagctattaattttccatctgtgtaacttgcccttgaactttattagacatttgtcatttgcttttgcaatataaagtccaagattccagtttaaaggatgtaaacattagttgcttctgcctctctacccctattttaggatataggcatttagttttcttaatgtctattttatatggacaatttaaataccaatttaagtggtatgtgactcacatctactacctgccaaaactccatatatttctacttttgaaggcttttaaaacttctatttggaatattttaaatgaaaatacatcaccaacaatataaaatctgtaatatgaattaatgtttttttctttcaacattttgttggtatgtaagatgtcccccctcccaagtgaaaagacagaaaaagattaaaaggtatggtgtggggtgccggcatgccggtgatctgctaaccaagctggctaccctttgttgctttaatggaactctggatttattaaattcattaactgaatttgaatttaaatatacaattgtattccgttctctcttcctccctactcttttcttcatttgctccttttccactcccttccttcttcacacataatgaacatctcctgttga

SEQ ID NO: 691484 - DNA, 619 bp, Homo sapiens
aaaaaaaaaaggcccaacatcatagcaatgctggaaagaaagaataggaaatttctaggtgaaaaaaacagaaagagatcttcaactgataccaaagtcctttgggtaataccaaattggtgccagttggcacgcagagattaggaagtgactgtccatttcaggccagaagaggcggcctgagtcctcacacaggaaggcatcagaaaccaagatcacggccgaaagcaggtcrccggaagggctgcctcttttgtggaaatttttgtccattatccaggggagaggcagggaagcctgttgttttttaggtgttctgatagaagcgtctcctgcgagaaattttaactccaagcctcttcaacatgcagatgtggggatcaaacttaaaatatttacttatgatatggacaatctcattccaattcatgagacactcatgtcagtcctgtgaaacaactggagctggcagggaaagaaaaggtaaaaccaaacctctagaatcatgtccataacccaggcacaagggatattcctcaccctcgggaaccccacagcaacaacaacaaaactgtaaatgatgaaagcaaatcattcacaagtgagagggagtgatcag

SEQ ID NO: 691485 - DNA, 2131 bp, Homo sapiens
tcgggtacatgtgatgttttgatacaggcatacagtggataatgatcaaatcagagtgattggggcatctaccacctcaagtgtttatccttagaatattttaatcttgtaagttacatgatctgcttggttctaaaaggctgctaggtgggtcataggctctggggaagaaagagaagaagcacgagagagtcaggggggtgttagatcctccgtagatcatgtgaggactgatagtggcttgcatccaaaggtggtggcggtggaggatgtgaaacagtcagatcgtggggatgctctggggctgcaggcttcagaagagatcttgatactgaagagtatcaagtttttgcagtaaatayggaagtggatatcaagagctcagttttcaacttaagttttagatgcccaaagaacatccaagaggagatgttgaatggacagttagatacacatctggagttcaagggagagggtggggctagagatatacatggaaatcattgttttatagagacaacatctaaagccatggaattgaactcatccaagactcgagtgcagaatgaaaaagaagaggcaggaggattgagccctgggtcacacacttagtgatcaggcccagaatgaggatgcatcagtcagatgagaaggtgtagccagcacagtaggggtagaaccaggaggggccctcctcagggccccaggttgcattcaaatcttgacttgcaaggaaggaagcttgcttcccaaggtgatgtatttttagaccaaaggtgttttaggtatggaaggaccttagcagcaatattttgcaagtcctgcactttacagaagttgagactgagacacagggaggttaattacccaaagtcacacagtaattggtttgagttgattagggatgatgtgttccgttggagagatgacaggctgggccagaggtgagtatcgcctaatgaagctggaattgttaccagtcactcctatctctagccaagaaaaggaggggacaggaacagtcaaaggcatcagctgttgaactggtttcttagaaatgcagactcttacagagcactttctgtatgcataatataattctagacactgttcaactgtagagtgagaaggtaaatgttctttcctccaaggttgtttttttctccaaattggtggaagagttgaacaatcatagcaaatatatatacacatataaaaaactaattcagaagttgagttttttttttaaatcagaaattaagtagatcttaaagcaatatagatgcttccttaagagagtgtggtgaataggatccctcgtactaggtggggcatccagtgactatttgctgagtaaattaaggctttctgttttcctcagtaggaaaccactcatggataaagcaatcaaactgtgaaagaatagaagcatttttccccaaacttaaaattgaaaagttatattcatacagatgatgctgaaatcaataccgattgtaaaacacaacgtacttaaatattctacaacgaatgctactttcagttaatcttcacctcatcactcagtatcatgtgaaaaaaacttcctgttctccaagagcacatgctttgaatatctaaatgtatgtgtgtctggataacacccattaggtatttatcttaatgctctccctcaccttgccccccaccccctgacaggccctggtatgtaatgttcccctccctgtgctctcattgttcaacttctacttatgagtgagaatatgtggtgtttgattttctgttcctgtgttagtttgctgagcatgatggcttccagcttcatccatgtccctgcaaaggacatgaattcattctttttcatggctgcatagtattccatggtgtatatgtgccacattttctttatccagtctatcattgatgggcatttgggttggttccaagtctttgctatctcaaacagtgctgcaataaacatacgcgtgcatgtgtctttatagtagaatgatctacaatcctttggggcaaagacttcctgactaaaacaccaaaagcaattacaacaaaagccaaaattgacaaatgggatctaattaaactgaagagcttctgcacagcaaaagaaact

SEQ ID NO: 691486 - DNA, 2170 bp, Homo sapiens
tgacgagtcactcgctattgggatggaattacttttaaatcaattgaaccgccttggggctggtcgaggattagcaggaacggggtggcattccttgagatgagcgggttgtgtggggggcagcccagtgcctgaagagagtgaaatgaaccccgtggataaccaacaacattcactcaagcatggaaggaccgtgctccagaagatgaggaatctttaccaaactagtggtggacacaatcaccctgagtgtgacctggacattggaaaaacagatgtgagcaagcaaaaaataattgagaaacacagaacaaaacaaactcagtaacatattctaggtctgaaagaactgagattgtgtaatctagaggaggtctgaaagaactgagaatgcgtaatctagagaagggaaatcttataccaatattcttatattggtataagaataaacttcccgacaacagaggtgataattccaggagaggctatcagagatcactggcgctggcatctccttccctctcctgatcctcaaatctcaagtgagttatcactagcccggttcattccagctgtcaaatctctaccctcctcatcctctcatcctcttcatccatacagtcacagctttaactcaggctaccacttactgtccacggggctatcacagtagcttccttactgtactctgcctccaacctctccatgttatctggaaaatgctgagttatctaactaaaacaggggggcaggggagcatgtcgctgccatgcttaaaacctctgattagtttctagctgtcttcaggataaaatccaaactcatttccaaggctactcaggccattcaaatatggccccacctctcctactccacttctttgacattcagtcatgacaaattcacacctttaactgagggggagaagaccctgcttttagaccttcctgcatttcattctgctctctgctgttcctctatgcctatctacttcttctctggaaactttttttttttgttctccttgacataattagtcacgttcttaacaacttgcactgacccgtgtattaaatgagattggaattactcggtaatatgtctcttttctctgtagcctgttggcttctcaaggacaaggggtgtcctgctatcatttctgtctacctggttcctaacacagcacctggcacttagttgagaacttattaaatcttgctttcaaaatttgactcattaattaaggcaactccaacttggagaatgttaaagtgtggctttttattttaagtcagttttggatgttttaaggaaaagaccaattgtattctccattgacgtgcattttagattcatacatgcagcaggaggaaaatgagacttacgagaaaaaataaatttgctaaaaaaaaaaaaagaaatgaagaaagaatggaaggggatttttttggcccatagcatttgtccctattgcctcactcttggtggttgcttgacaacttcttattgaatgaaaccttttattctccaactcagacatatggcattttcaacaacacattttgtgtcatgtttgtttgttttacactaaagagagatgcccaacttattcaactaaatctgtaaggaagtcttatgctgctatttcaaatgcattgttttcctgtcctgtcagtcacaaaccattttaaaatatgggcttaatcaccagtattccagggggcttaccgcataagggagctgggctgcaggaaggctcagaatcacagcaagtgtgtgtctgggctcataggcgccaactggcatacgagcagcctccagctggtatgcacctgcacctgggatcccacctcaccaggacaaactcaagttcctgccctcagcctgggcatggggcgggggaagcggggaaggaagggttggcctyctagccaacctgagagtgatcctgtcatgcgttcgtacaccaaccgctcttcaagagatggaaagtcaggcacgtgtttatccttttgatcggagaacaacggcctcacactattctacagccaacctgttggggacagatttgggggttggtctaggagtagattactaaaaataggagctctaaagaaaaggatgtcttattcctgttgttaattttcaagtgccatttttttccatccta

SEQ ID NO: 691487 - DNA, 627 bp, Homo sapiens
atttcacacatttagacttcaacagtcattagtgtcataatgatcacagtaattacatgaataatgaggcttgagtgatcacaaaaagacaacttaccgcaagtgatgagcaaagtcaaccactcttggcgaccaatgtaatcatttccaggttgcttggtatgagtcaaagacgttttcctgtgattcagragaatctattgcatattcagctaaaatctgacaggtctaatgatctaatactccagttatttaatgaagaacgtgatgaggcttgcatgtttaccaaaccttggtgttttttagttatcggcagtaagaccattaaggtacataattaaaagaattaaaaagatgtgcatgtaattgacataaatactacaagttatcttattcagtagccagtaattacatttggttaattgtctgattaagaatgcaacagtgggaacatttttttttcttccaaagaggttctactttcaggaatctattctaggtgatcccaaacccttggtcattttgaccttggtaactacgtttgcctgtctccctattctgtacagtttttgacagtggggaggatatgagtggtggacatctctgctcattgcagcctaagtccta

SEQ ID NO: 691488 - DNA, 627 bp, Homo sapiens
atttcacacatttagacttcaacagtcattagtgtcataatgatcacagtaattacatgaataatgaggcttgagtgatcacaaaaagacaacttaccgcaagtgatgagcaaagtcaaccactcttggcgaccaatgtaatcatttccaggttgcttggtatgagtcaaagacgttttcctgtgattcaggagaatctattgcatattcagctaaaatctgacaggtctaatgatctaatactccagttatttaatgaagaacgtgatgaggcttgcatgtttaccaaaccttggtgttttttagttatcggcagtaagaccattaaggtacataattaaaagaattaaaaagatgtgcatgtaattgacataaatactacaagttatcttattcagtagccagtaattacatttggttaattgtctgattaagaatgcaacagtgggaacatttttttttcttccaaagaggttctactttcaggaatctattctaggtgatcccaaacccttggtcattttgaccttggtaactaygtttgcctgtctccctattctgtacagtttttgacagtggggaggatatgagtggtggacatctctgctcattgcagcctaagtccta

SEQ ID NO: 691489 - DNA, 608 bp, Homo sapiens
ccgccaccacgcccggctaattttttgtgtttttagtagagacggggtttcaccatgttagccaggatggtctcgatctcctgaccttgtggtccgcccacctcagcctcagtttttaaacttcttgacttttgcccatttgggaggaggaaaaaaatgtgattggagcttgatttttgtttctctcattcagaaggaagctgagaatcttttcttgtgtttaaaagccatgaagcggcttcattttgaaggaaaatttgaggaaaagcaaaggtattatgaagactgtgtggtgcatgtggagcaatgagcagaaagagagatggcttgacatttattctaaactttcaagagaaactggacaaagtaatatggttttgagtacaatagaaacccggrgaaacttgatattttcagcatgacctgaaaagattccaaaatcttgaataaaaaactcctccaagaacctaaagatctcaggaagtatgcctatccaaatctcaagggaagccaatattaatttgtttcttcaacataaatggtattgtccatgctaaattaatccataaggtcaaatagtcaggctcattatgcaggaattctaaaac

SEQ ID NO: 691490 - DNA, 643 bp, Homo sapiens
agggatgtgtggtgtgtgtgtatacatgcccatgtgtgtaaatgtattgtgcatgtaaattcattcagccagctaaattttctaatgatcagaattccacatgactagggaaaaataaactggcagaaattcaatacaaatattagagactgacaatgaatcggactatacttgaagtttttgtttggttttgaattcttacatttgcttcctacatttcttttttttttctaaaatgaatcaggcccattaaacttcacatgactaaggttttccagatctaaaaatgaaatagtaagttgtgtcttgccatgttgaataactattataaaagtatacatttgtgggctgggcgcagtggctcacgcctgtaatcccagcactttgggaggctgaggcaggcggatcacgaggtcaagagatcaagaccatcctggccaacatggtgaagccctgtctttactaaaaatttaaaaaattagctgggtgtggtggcacrtgcctgtagtcccagctacttgggaggctgaggcaggagaatcgcttgaacccgggaggtggaggttgcagtgagccgagattccaccactgccctctaacctggagacagagtaagactccgtctcaaaaaaaaaaagtacac

SEQ ID NO: 691491 - DNA, 646 bp, Homo sapiens
gaacaaattcttcccatccttaatgagggtcaaacatgagcccacactgaactaagatggctaccctaggcattctctcttcatcattggaaaaggtgaggaggctcaagcmctcagaatttcaactatatcaacagaattcaattcacaaccaagacgcttgttataagctcaacccttcccaggaagcaaacacaaccatcctttggttctactttcaaagcatgtttaaaatctgactatttctcaccacttctatgccaccataatggtctaagccaccatcactttgtccctgaattattgcaattgccttctaactgctctccctggttctgctcgtgccttcccattcagtctattatgaatatgaccaacagagtgatccctttcaaatataagtcgaatcttattcactctctgctcaaaatttttcaaaggctccatatttcactcggaataaacaccaaggtctttacggtagactgcaaagctgtcactccctgttctctctctggccctttctcatacaactctccaccttgctttgctctgctccagccccaatgtccctcttgctgttcctccaacaaactaggcactcctgctatagggccattgcaagaactgctctccccactgggca

SEQ ID NO: 691492 - DNA, 3234 bp, Homo sapiens
ggaaagttaaaagagaaaaaaaaaagatgactatctttcagcagacttcacatggtcaaggagagagtctggggtaataaggtttgacaatagaaaagcccctcagcatttggatgctgaggtccatgtctgtttctttgggctaccttacagacatgcaagacaacagttattctcttcaggaagcagcatcaaagaggattctgaactcttagaaaccacaagcccaacacagcagagagacatgcgatggagcctcatgtgttcaacagcatagaaggaaaccaataaaatttggaaaatggttgagtttatttgttatctgtactgcgtaataaaagctgctagaaaaggcacaaaaacatgtattattggggggttttatctatctttttagatttttttgttttagaaaaagactttgttcttcatttgtcttagttctttctccaggaaggcaatactgaacatgtcacaaaatacagatgagcaaaaaagagacttcttttctgaagactgtcagtaggcctctcttgatgtcttcctgacaggtgatacagactttcgtcatcatcctccaagaggaaactattatcaggttttgtctgtggcagtggttctcaaagtgtggtccacagaccatcagcatcagcatcacctgggaatttttcagaagtgcaaattcactgttcccatccccagacctcccaaaccagacacttggagggtgagttcaggccatctgtgctttagtaagccctcaaagaagttctgaagttccctcaagtttaagaatcactgatctccactaaagtaaaatattgctttccaaaacaatttaaacaaaaactatcagacttcttcataatcagtgtttatggttcgctttaagtagtatgtttaatattaaaggcaatagtgctcccttgaatatttgttaatcaaattttagaattatttttagaaagctatacatgtcatgatgttttagtgatgcatgttcaaacttactctgagaagagaattattcttataaaagcagccattgccaaaaagatttcagacacagcagttttgtccctctcattcagattagaaaagccttcttgtaggagctctgaaaactttgtttactttgagtatcttgctttagacagtttttaaaacacaaatgtcatcttagacctgctgaatcagaatctgtgtcgctagagactcaagtattttcaaaaacatgcacagatgaagcaaggcataccttgttatgaactatagaacagactttacaaattctattcttcccttcctctgaagagtgattatttttaaaatgaaaaccatctggcctgctaaagtcacttgagagggtaattaactatctttaaataaataaatccctttagctacttcttttgaagaataccgcatggagaaaaaggcaagcctagctgaaggcagtgggaaggagcctaatatagaggaaaagatgcagtatccaaagggcttagccacattttgcagtaacagtttttatttattgagtacctaccatatgccagagatttaacttacattattttaatatatattacctctaatactttcaacaaccttaaaagatagttactgttagttgtattttatagtctagaaaacttagacactataaaggaaagtgacttgaccaagggctcaagggtggaaaattgaatttgaagtcagatctctctagagttcttctattctttctgtagtgcagtcattcaaggaagtgtcagacatagaggctttgtttcaaagaaataggctgacaaaacctaacagcaggatatccagaggcaagtatgcagctaggattagtggcataggctagaaggtagcagaaatcagatcccactaaaacatcccacaatgggagaatggtgaaaaatagattatttttgaaagttaacatttgttgaagttttatggtatgctaggctctattccactttccttgtttgaactgatccttgtaaaaaaaaattgtgaagtaaacattattattctctcagttttacagagaagttaagcaatttgcctaaggtcactggggtttgacttagacctagtctagtctcagagaatgagctcttactcattatggaaactactatgtgttattacgatgatattaccatacagtccataaaatgataaacatgtagactatatcatcacaaatttgtataacaaatatgatatacaatttgaaaatattgaataattaacttgttcagttccatgatataagtaaaaaattcttatatactttctgtattatggttaaggggtagtttttttaggggttatagttgctatttcttgctgtgtaacaaaccaactgaaatttagtggcttaaaacaacaaacacatatcatttcacagttcctgtggattttgaatcttgacgtggtttgggctgtgaagaagctgttggtggatgctgcagtctccagtctgaggagggtctgattgcaagctcaaaacatggcagctgctttctccagagcaaaaggttcggagagaaagagagagaaggaaaggaagaggaaagccacagggtttttggtgatgtaatgagagaagtgatatcctatcacttttgccatagtctgtttgccagaagtgagtccccaggtccagcccacactcactggcagaggatcacccaggcagaggctgaataccaggaggtgggatcactgtggctgcctaccatggtgcagatgtgttttattattactatactgttatgaacacctttcttcaagctattttggggcacatttcccaaaattaaatactttatgcacagcttttgaagagcttcaaagctcttaaaaacgaatgtagtaggccctttgtatctgcaagttccacatttctggttttggcatctgtggattcaactaactatggatcaaaaatattttaaaaaataaaaatacaaaaataaaaattataaaattaaaaatacagtataacaattatttacatagcatccacattgtatcaggtattataagtaatctagagatgatttaaagtatatgggaggatgtgtatgttatatgcaaatacatcaktttacatgagagacttgcatccatggatgttggtatccacagggttcctggaaccaatcactcgcagatattgagaggtaactttatagctacatatagtcgaaa

SEQ ID NO: 691493 - DNA, 645 bp, Homo sapiens
cattagatcttgtgagactcactcatgaccatgagaacagcatgggggaaaccaccaccacgattcaattacccttacctgtcccacccttgacttgtgaggactatggggattacaattcaaggtgagatttgggtggggacacagagccaaccatatcacaaatgttgaagatggggcctggtgggagatgattgaatcacgggggaggatttaccctttggtgctgttctcattatggtgagctatcatgagatctcttctttaaaagcatgtggtacttcctggctctctcctatccctgtgctccagccatgtgaagtgctgcttcccctgtgccttccaccatgactgcgagattcctgatgcctccccagaagccgtcatgcttcttgcacatcctgtgcaaccatgagctaataaattttccttcataaattatctttcctttataaattatcccgtctcaggtatttctttatagtagtgaaagaatggactaatattattgcactactatgaggagaagaaagaaacataaaaacagaacaacaagaaacaaattaagaataaaaaggaaaacacaaaaaagaaactcaaaacragatttcaagctcacattttcaacaagtggacaatatcaaa

SEQ ID NO: 691494 - DNA, 1576 bp, Homo sapiens
taaaaagtattgtgattattgttttatttatatatagatgtaacattaagggccttgtttttgtaaaaaaataaacacacatatatgtatgtataatgtatttatatgtatttaatgtctttatgtgcctgtgtgtatatgtatataaaatatgtctatatatacaggagaatgtatagatacattagcctgagctcattgataattctagagagaacaaagatgaaaaaaggcagagaggctgtaggaaaaacgctgtatttctaaatacatttcagagcttgacattcttttattggttgtattgagcttgtgtttgtttctcccaaattctagagaattaagagtagaattttaaaaactggtcccactacaaaatcagtaaaaattctgtcttcttttgagttaactgttgtttgtaagatattttttaattgattattactctgctaaagtattttatggtcccttgactttgggggggaaataatttttcttttctattactgtcatgtacctaatatttttggagactttgaggaawaaaacttggacaatcatttcttgtatgtagcttggataataattttccatttaatttacaaaggctctactttggagaattattttgacattttaatgtgtgcttctaaaatgttagcacattttaatatttatgtctttgtatggtatgaaatatttctttgtcttttttttcagtttgtcaaggatgtctgttctgtaagtcaagggaattttctgaatgaatattcaactgaaaatatttaaatagaaaagaagatgagtatgctgtgtgtgtatgtacgaggagatgcaggtatggctatattttttaaataagttacaataatttattgtccatattattatataaaaaccttaaccatagtcaacacccctcactttgaaatatgtctattttgaaagtatacattttttctttgtattttttaatatatgaatagcattctattgttgtgatctaccgtaatacccttatttacctagcatcattgttattattattcactggtaatttctttaaggctaatgaaagaaacacacataataaaacacaaataataaaaaattcagaatgagaatactgtaaagtaagataagaatcgcctattatgatatgttttctactggtaaatgtataacatattttctttaatctaatgatgaaatatttcaagacacttaaacagaaagcacacatcaaaagtatggaaagaattaacttataataagttttatcatatcagaaagaattaaaacaatattttaggatgcatttttctagagtaaattccaagagtaggtatttctgaatatttgacacagtacttgagaaatattgcagttaaaatattgcgaatgccacgtaaacattcactcaggcatgcacctgtagtcctagctacttgggaggccgaggcaggaggatcacttgagcccaagagtagaaggttacagtgagctctactccaccctggatgagttgttcatcagggttctctagagggacagaactaataggagatatataaat

SEQ ID NO: 691495 - DNA, 840 bp, Homo sapiens
tgttggccaggacggtctcgatctcctgaccttgtgatctgcccgctttggcctcccaaagtactgggattataggcgtgagccactgcacctggtcccaatctccttcctaaggaagggttcgccttcagtggcatgacaaccttccctgttgcctagtctagaaacccggaatttattctgactcttcatgtttccatccttgacatctaacccatcaaataaaaatgccctacatattatamctccagattttaaacatgtacacttttattcatcactgtcaccatcctcatactaaccatcatgacctttgtccaagattgtctctacagccatctcacagggctcctgattctaagcctgctccatgaagatttattcatcatcttgcagtcgtaagagtctacatagaattatctcattattcccagggtgcttcatcttttcaatggtttccctttacctttgagacggcccacttttccaggcttatttctcgccatcatctccatccaggcatcatccttcccttactgaacttcttttggtttttcaaatgcacataccattctcttcctcgcctctagatcttcacacctgcttcccttcttaacttgtactctcttcctaaatctgccttcacctggctcactccaatttgtccacaggtttcagctaatacttcacttcctttaggacaagcttgtccaacccatggcctgcaggcacatgtggcccaggacagttttaaagcagcccaacaaaaattcataaactttcttagaacattatgagatttttttgcaattttttttttttttagctcatcaactatca

SEQ ID NO: 691496 - DNA, 840 bp, Homo sapiens
tgttggccaggacggtctcgatctcctgaccttgtgatctgcccgctttggcctcccaaagtactgggattataggcgtgagccactgcacctggtcccaatctccttcctaaggaagggttcgccttcagtggcatgacaaccttccctgttgcctagtctagaaacccggaatttattctgactcttcatgtttccatccttgacatctaacccatcaaataaaaatgccctacatattataactccagattttaaacatgtacacttttattcatcactgtcaccatcctcatactaaccatcatgacctttgtccaagattgtctctacagccatctcacagggctcctgattctaagcctgctccatgaagatttattcatcatcttgcagtcgtaagagtctacatagaattatctcattattcccagggtgcttcatcttttcaatggtttccctttacctttgagacggcccwcttttccaggcttatttctcgccatcatctccatccaggcatcatccttcccttactgaacttcttttggtttttcaaatgcacataccattctcttcctcgcctctagatcttcacacctgcttcccttcttaacttgtactctcttcctaaatctgccttcacctggctcactccaatttgtccacaggtttcagctaatacttcacttcctttaggacaagcttgtccaacccatggcctgcaggcacatgtggcccaggacagttttaaagcagcccaacaaaaattcataaactttcttagaacattatgagatttttttgcaattttttttttttttagctcatcaactatca

SEQ ID NO: 691497 - DNA, 840 bp, Homo sapiens
tgttggccaggacggtctcgatctcctgaccttgtgatctgcccgctttggcctcccaaagtactgggattataggcgtgagccactgcacctggtcccaatctccttcctaaggaagggttcgccttcagtggcatgacaaccttccctgttgcctagtctagaaacccggaatttattctgactcttcatgtttccatccttgacatctaacccatcaaataaaaatgccctacatattataactccagattttaaacatgtacacttttattcatcactgtcaccatcctcatactaaccatcatgacctttgtccaagattgtctctacagccatctcacagggctcctgattctaagcctgctccatgaagatttattcatcatcttgcagtcgtaagagtctacatagaattatctcattattcccagggtgcttcatcttttcaatggtttccctttacctttgagacggcccacttttccaggcttatttctcgccatcatctccatccaggcatcatccttcccttactgaacttyttttggtttttcaaatgcacataccattctcttcctcgcctctagatcttcacacctgcttcccttcttaacttgtactctcttcctaaatctgccttcacctggctcactccaatttgtccacaggtttcagctaatacttcacttcctttaggacaagcttgtccaacccatggcctgcaggcacatgtggcccaggacagttttaaagcagcccaacaaaaattcataaactttcttagaacattatgagatttttttgcaattttttttttttttagctcatcaactatca

SEQ ID NO: 691498 - DNA, 700 bp, Homo sapiens
  misc_feature 2, 3, 4, 5, 6, 7, 8, 9, 10, 11, 12, 13, 14, 15, 16, 17, 18,19, 20, 21, 22, 23, 24, 25, 26, 27, 28, 29, 30, 31, 32,33, 34, 35, 36, 37, 38, 39, 40, 41, 42, 43, 44, 45, 46,47, 48, 49, 50, 51, 52, 53, 54, 55, 56, 57, 58, 59, 60,61: n = A,T,C or G
  misc_feature 62, 63, 64, 65, 66, 67, 68, 69, 70, 71, 72, 73, 74, 75, 76,77, 78, 79, 80, 81, 82, 83, 84, 85, 86, 87, 88, 89, 90,91, 92, 93, 94, 95, 96, 97, 98, 99, 100, 101: n = A,T,C or G
annnnnnnnnnnnnnnnnnnnnnnnnnnnnnnnnnnnnnnnnnnnnnnnnnnnnnnnnnnnnnnnnnnnnnnnnnnnnnnnnnnnnnnnnnnnnnnnnnnnctcatcacaacaaataatrccgtaaacttgacaatcactccccatatatttctcattctcaccactttttaaaaaatgagaccgggagtggtggctcacgctgtaatcccagcactttgggaggccaaggcaggtggatcacgaggtcaggagatcaagaccatcctggctaacacagtgaaaccccgtttctactaaaaatacagaaaattagccaggcgtgatggcgggcacctgtagtcccagctactcgggagactgaggcaggataatggtgtgaactcgggaggcagacttgcagtgagccgagatcgtgccactgcactccagcctgggcaacagagtgtgactctgtctcaaaaaaaaaaatgagatgaccatttcacctaagatataccctcttaagtatttttttaagtgtacaatacaggacggccatgcatcagagatatatgtgggtttggttcagacaactgcaataaagtgttatacaatttcttttggtttcccagtgcatgtaaaagtatgtttatactgtgctgtataaagtgtgcaatagcatatgtctacaaagtatgcacactttaatttacaaatac

SEQ ID NO: 691499 - DNA, 700 bp, Homo sapiens
  misc_feature 2, 3, 4, 5, 6, 7, 8, 9, 10, 11, 12, 13, 14, 15, 16, 17, 18,19, 20, 21, 22, 23, 24, 25, 26, 27, 28, 29, 30, 31, 32,33, 34, 35, 36, 37, 38, 39, 40, 41, 42, 43, 44, 45, 46,47, 48, 49, 50, 51, 52, 53, 54, 55, 56, 57, 58, 59, 60,61: n = A,T,C or G
  misc_feature 62, 63, 64, 65, 66, 67, 68, 69, 70, 71, 72, 73, 74, 75, 76,77, 78, 79, 80, 81, 82, 83, 84, 85, 86, 87, 88, 89, 90,91, 92, 93, 94, 95, 96, 97, 98, 99, 100, 101: n = A,T,C or G
annnnnnnnnnnnnnnnnnnnnnnnnnnnnnnnnnnnnnnnnnnnnnnnnnnnnnnnnnnnnnnnnnnnnnnnnnnnnnnnnnnnnnnnnnnnnnnnnnnnctcatcacaacaaataataccgtaaacttgacaatcactccccatatatttctcattctcaccactttttaaaaaatgagaccgggagtggyggctcacgctgtaatcccagcactttgggaggccaaggcaggtggatcacgaggtcaggagatcaagaccatcctggctaacacagtgaaaccccgtttctactaaaaatacagaaaattagccaggcgtgatggcgggcacctgtagtcccagctactcgggagactgaggcaggataatggtgtgaactcgggaggcagacttgcagtgagccgagatcgtgccactgcactccagcctgggcaacagagtgtgactctgtctcaaaaaaaaaaatgagatgaccatttcacctaagatataccctcttaagtatttttttaagtgtacaatacaggacggccatgcatcagagatatatgtgggtttggttcagacaactgcaataaagtgttatacaatttcttttggtttcccagtgcatgtaaaagtatgtttatactgtgctgtataaagtgtgcaatagcatatgtctacaaagtatgcacactttaatttacaaatac

SEQ ID NO: 691500 - DNA, 700 bp, Homo sapiens
  misc_feature 2, 3, 4, 5, 6, 7, 8, 9, 10, 11, 12, 13, 14, 15, 16, 17, 18,19, 20, 21, 22, 23, 24, 25, 26, 27, 28, 29, 30, 31, 32,33, 34, 35, 36, 37, 38, 39, 40, 41, 42, 43, 44, 45, 46,47, 48, 49, 50, 51, 52, 53, 54, 55, 56, 57, 58, 59, 60,61: n = A,T,C or G
  misc_feature 62, 63, 64, 65, 66, 67, 68, 69, 70, 71, 72, 73, 74, 75, 76,77, 78, 79, 80, 81, 82, 83, 84, 85, 86, 87, 88, 89, 90,91, 92, 93, 94, 95, 96, 97, 98, 99, 100, 101: n = A,T,C or G
annnnnnnnnnnnnnnnnnnnnnnnnnnnnnnnnnnnnnnnnnnnnnnnnnnnnnnnnnnnnnnnnnnnnnnnnnnnnnnnnnnnnnnnnnnnnnnnnnnnctcatcacaacaaataataccgtaaacttgacaatcactccccatatatttctcattctcaccactttttaaaaaatgagaccgggagtggtggctcacgctgtaatcccagcactttgggaggccaaggcaggtggatcacgaggtcaggagatcaagaccatcctggctaacacagtgaaaccccgtttctactaaaaatacagaaaattagccaggcgtgatggcgggcacctgtagtcccagctactcgggagactgaggcaggataatggtgtgaactcgggaggcagacttgcagtgagccgagatcgtgccactgcactccagcctgggcaacagagtgtgactctgtctcaaaaaaaaaaatgagatgaccatttcacctaaratataccctcttaagtatttttttaagtgtacaatacaggacggccatgcatcagagatatatgtgggtttggttcagacaactgcaataaagtgttatacaatttcttttggtttcccagtgcatgtaaaagtatgtttatactgtgctgtataaagtgtgcaatagcatatgtctacaaagtatgcacactttaatttacaaatac

SEQ ID NO: 691501 - DNA, 2233 bp, Homo sapiens
  misc_feature 1435, 1436, 1437, 1438, 1439, 1440, 1441, 1442, 1443, 1444,1445, 1446, 1447, 1448, 1449, 1450, 1451, 1452, 1453, 1454,1455, 1456, 1457, 1458, 1459, 1460, 1461, 1462, 1463, 1464,1465, 1466, 1467, 1468, 1469, 1470, 1471, 1472, 1473: n = A,T,C or G
  misc_feature 1474, 1475, 1476, 1477, 1478, 1479, 1480, 1481, 1482, 1483,1484, 1485, 1486, 1487, 1488, 1489, 1490, 1491, 1492, 1493,1494, 1495, 1496, 1497, 1498, 1499, 1500, 1501, 1502, 1503,1504, 1505, 1506, 1507, 1508, 1509, 1510, 1511, 1512: n = A,T,C or G
  misc_feature 1513, 1514, 1515, 1516, 1517, 1518, 1519, 1520, 1521, 1522,1523, 1524, 1525, 1526, 1527, 1528, 1529, 1530, 1531, 1532,1533, 1534: n = A,T,C or G
ttagcgttttgctattgctttttcgttttcttttgtttcgtttcgtttctaagtgctggggtatacgtgcaggatgggcagatttgttactaaggtaaacgtgtgccatggtggtttgctgcacctgtcaacccatcacctaggtattaagcccagcatgcaggagctgtttttcttaacgctctgcctcccgaaaggccccagtgtgtgttgttccccttcctgtgtccatgtgatctcatttttcagctcccattataagtgagaatgtggcgtttggttttctttccctggattagtttgctgaggataatgaccacacatcaccactgatttgttttttagtataaagagtagtattttattgaataagatttgctcacagaaaaataagcttaaatctacaatgaatgccagactctacagcagaaagcaattttctcacttttccacacacaatggttcctactaagtgaaaaaagccataaaatttcattcacaaatgtactactctgtctcaaaacatctcacataatcatgcactgtactaaagccattagatcagttcttcagtcaggttaaagaagtatccctctaataactgacttttataatgctatcagtaggcactcccaatcagtctgccattgttaatggtgtacagcattactgtatacactggaattgatgacacccatatccacggacaagccgagacttatgatggtttgattcatgatttttcaacgttatgatgggtttactggaatattagatgcgtttctgagttacactgggtttatgagtatgcgaccctatactccagaaacagctgtataaggaaaaacaggtgtacctaataaaaatrtgcttagtgacttgggataaaccaatagatgttcacaactgatggagagccgtgaaagagagatagcggtacatagttacaataacacaagtttcctgcacctgtcgaggatttccccaaaaaaacgcagaatgtgggatgcacctaaggcatatgaaagagagagggcagaaggagtaagagagaaataggaggaaggaaggaaggaaggaaagaaggaaggtaggaaggaaggaaggaaggaaagaaggaaggaaggaaggaagcaaagaaggacgaacggaaggaggaaacacccggtgttactaaaacccccaaaaaatatggtttccccctgtggtaagcctacagtgtggatgaatcttgaaaatattgtgctacgtgttatgtcagtcataacagctcacctattgtgcaattccgtttataggaaatgtccacaatatggaaatctatgcatatggggttgatcgcactaggtagttgctacctagggctgagggtcagggagagggtttgagacagaatgaggagtgactaatgtcttcattgtttttctctggtcgnnnnnnnnnnnnnnnnnnnnnnnnnnnnnnnnnnnnnnnnnnnnnnnnnnnnnnnnnnnnnnnnnnnnnnnnnnnnnnnnnnnnnnnnnnnnnnnnnnnnataaataacctgaagtgagattgctagatcatatggtagttctactttcttaatttttttgaggaaccactgtactgttttccatagaggctgcacagttttactttcccagaaacactgtacaagtgttccaatttatccccattgttaacactcgttatctttttcttttaataagaccattctaacaggcttgaggcaatatctctttgtggttttgatttgcatttccctgatggttagtgatgctgagcatttttttcatgtacctgttggtaatttggatattttctttggagaaatatctattgctgattaaaaaaaaaaaaaaaactctcagcaagctagaaaaagaaattttctcgaagtggtggaaagcatccacaacaaaacatataaacaatattatatttaattgtgaaagcgtaaatgtttaaaccacatagattaggacaagaaaaggatgtgtgtgttcatcatctctattcaacattttactggtgatcctagattgagtataaatatttaggagataactattgtcactgaagcccaaatcttggtcatcctcaggaaaaaaaaaaaaaaagttgattaggttgtatataatctaattctacttgctaatttaatttctctaaaattacagcttgtatcaactctagaatttattgggcacctcctaggacataaacactg

SEQ ID NO: 691502 - DNA, 2233 bp, Homo sapiens
  misc_feature 1435, 1436, 1437, 1438, 1439, 1440, 1441, 1442, 1443, 1444,1445, 1446, 1447, 1448, 1449, 1450, 1451, 1452, 1453, 1454,1455, 1456, 1457, 1458, 1459, 1460, 1461, 1462, 1463, 1464,1465, 1466, 1467, 1468, 1469, 1470, 1471, 1472, 1473: n = A,T,C or G
  misc_feature 1474, 1475, 1476, 1477, 1478, 1479, 1480, 1481, 1482, 1483,1484, 1485, 1486, 1487, 1488, 1489, 1490, 1491, 1492, 1493,1494, 1495, 1496, 1497, 1498, 1499, 1500, 1501, 1502, 1503,1504, 1505, 1506, 1507, 1508, 1509, 1510, 1511, 1512: n = A,T,C or G
  misc_feature 1513, 1514, 1515, 1516, 1517, 1518, 1519, 1520, 1521, 1522,1523, 1524, 1525, 1526, 1527, 1528, 1529, 1530, 1531, 1532,1533, 1534: n = A,T,C or G
ttagcgttttgctattgctttttcgttttcttttgtttcgtttcgtttctaagtgctggggtatacgtgcaggatgggcagatttgttactaaggtaaacgtgtgccatggtggtttgctgcacctgtcaacccatcacctaggtattaagcccagcatgcaggagctgtttttcttaacgctctgcctcccgaaaggccccagtgtgtgttgttccccttcctgtgtccatgtgatctcatttttcagctcccattataagtgagaatgtggcgtttggttttctttccctggattagtttgctgaggataatgaccacacatcaccactgatttgttttttagtataaagagtagtattttattgaataagatttgctcacagaaaaataagcttaaatctacaatgaatgccagactctacagcagaaagcaattttctcacttttccacacacaatggttcctactaagtgaaaaaagccataaaatttcattcacaaatgtactactctgtctcaaaacatctcacataatcatgcactgtactaaagccattagatcagttcttcagtcaggttaaagaagtatccctctaataactgacttttataatgctatcagtaggcactcccaatcagtctgccattgttaatggtgtacagcattactgtatacactggaattgatgacacccatatccacggacaagccgagacttatgatggtttgattcatgatttttcaacgttatgatgggtttactggaatattagatgcgtttctgagttacactgggtttatgagtatgcgaccctatactccagaaacagctgtataaggaaaaacaggtgtacctaataaaaatgtgcttagtgacttgggataaaccaatagatgttcacaactgatggagagccgtgaaagagagatagcggtamatagttacaataacacaagtttcctgcacctgtcgaggatttccccaaaaaaacgcagaatgtgggatgcacctaaggcatatgaaagagagagggcagaaggagtaagagagaaataggaggaaggaaggaaggaaggaaagaaggaaggtaggaaggaaggaaggaaggaaagaaggaaggaaggaaggaagcaaagaaggacgaacggaaggaggaaacacccggtgttactaaaacccccaaaaaatatggtttccccctgtggtaagcctacagtgtggatgaatcttgaaaatattgtgctacgtgttatgtcagtcataacagctcacctattgtgcaattccgtttataggaaatgtccacaatatggaaatctatgcatatggggttgatcgcactaggtagttgctacctagggctgagggtcagggagagggtttgagacagaatgaggagtgactaatgtcttcattgtttttctctggtcgnnnnnnnnnnnnnnnnnnnnnnnnnnnnnnnnnnnnnnnnnnnnnnnnnnnnnnnnnnnnnnnnnnnnnnnnnnnnnnnnnnnnnnnnnnnnnnnnnnnnataaataacctgaagtgagattgctagatcatatggtagttctactttcttaatttttttgaggaaccactgtactgttttccatagaggctgcacagttttactttcccagaaacactgtacaagtgttccaatttatccccattgttaacactcgttatctttttcttttaataagaccattctaacaggcttgaggcaatatctctttgtggttttgatttgcatttccctgatggttagtgatgctgagcatttttttcatgtacctgttggtaatttggatattttctttggagaaatatctattgctgattaaaaaaaaaaaaaaaactctcagcaagctagaaaaagaaattttctcgaagtggtggaaagcatccacaacaaaacatataaacaatattatatttaattgtgaaagcgtaaatgtttaaaccacatagattaggacaagaaaaggatgtgtgtgttcatcatctctattcaacattttactggtgatcctagattgagtataaatatttaggagataactattgtcactgaagcccaaatcttggtcatcctcaggaaaaaaaaaaaaaaagttgattaggttgtatataatctaattctacttgctaatttaatttctctaaaattacagcttgtatcaactctagaatttattgggcacctcctaggacataaacactg

SEQ ID NO: 691503 - DNA, 2233 bp, Homo sapiens
  misc_feature 1435, 1436, 1437, 1438, 1439, 1440, 1441, 1442, 1443, 1444,1445, 1446, 1447, 1448, 1449, 1450, 1451, 1452, 1453, 1454,1455, 1456, 1457, 1458, 1459, 1460, 1461, 1462, 1463, 1464,1465, 1466, 1467, 1468, 1469, 1470, 1471, 1472, 1473: n = A,T,C or G
  misc_feature 1474, 1475, 1476, 1477, 1478, 1479, 1480, 1481, 1482, 1483,1484, 1485, 1486, 1487, 1488, 1489, 1490, 1491, 1492, 1493,1494, 1495, 1496, 1497, 1498, 1499, 1500, 1501, 1502, 1503,1504, 1505, 1506, 1507, 1508, 1509, 1510, 1511, 1512: n = A,T,C or G
  misc_feature 1513, 1514, 1515, 1516, 1517, 1518, 1519, 1520, 1521, 1522,1523, 1524, 1525, 1526, 1527, 1528, 1529, 1530, 1531, 1532,1533, 1534: n = A,T,C or G
ttagcgttttgctattgctttttcgttttcttttgtttcgtttcgtttctaagtgctggggtatacgtgcaggatgggcagatttgttactaaggtaaacgtgtgccatggtggtttgctgcacctgtcaacccatcacctaggtattaagcccagcatgcaggagctgtttttcttaacgctctgcctcccgaaaggccccagtgtgtgttgttccccttcctgtgtccatgtgatctcatttttcagctcccattataagtgagaatgtggcgtttggttttctttccctggattagtttgctgaggataatgaccacacatcaccactgatttgttttttagtataaagagtagtattttattgaataagatttgctcacagaaaaataagcttaaatctacaatgaatgccagactctacagcagaaagcaattttctcacttttccacacacaatggttcctactaagtgaaaaaagccataaaatttcattcacaaatgtactactctgtctcaaaacatctcacataatcatgcactgtactaaagccattagatcagttcttcagtcaggttaaagaagtatccctctaataactgacttttataatgctatcagtaggcactcccaatcagtctgccattgttaatggtgtacagcattactgtatacactggaattgatgacacccatatccacggacaagccgagacttatgatggtttgattcatgatttttcaacgttatgatgggtttactggaatattagatgcgtttctgagttacactgggtttatgagtatgcgaccctatactccagaaacagctgtataaggaaaaacaggtgtacctaataaaaatgtgcttagtgacttgggataaaccaatagatgttcacaactgatggagagccgtgaaagagagatagcggtacatagttacaataacacaagtttcctgcacctgtcgaggatttccccaaaaaaacgcagaatgtgggatgcacctaaggcatatgaaagagagagggcagaaggagtaagagagaaataggaggaaggaaggaaggaaggaaagaaggaaggtaggaaggaaggaaggaaggaaagaaggaaggaaggaaggaagcaaagaaggacgaacggaaggaggaaacacccggtgttactaaaacccccaaaaaatatggtttccccctgtggtaagcctacagtgtggatgaatcttgaaaatattgtgctacgtgttatgtcagtcataacagytcacctattgtgcaattccgtttataggaaatgtccacaatatggaaatctatgcatatggggttgatcgcactaggtagttgctacctagggctgagggtcagggagagggtttgagacagaatgaggagtgactaatgtcttcattgtttttctctggtcgnnnnnnnnnnnnnnnnnnnnnnnnnnnnnnnnnnnnnnnnnnnnnnnnnnnnnnnnnnnnnnnnnnnnnnnnnnnnnnnnnnnnnnnnnnnnnnnnnnnnataaataacctgaagtgagattgctagatcatatggtagttctactttcttaatttttttgaggaaccactgtactgttttccatagaggctgcacagttttactttcccagaaacactgtacaagtgttccaatttatccccattgttaacactcgttatctttttcttttaataagaccattctaacaggcttgaggcaatatctctttgtggttttgatttgcatttccctgatggttagtgatgctgagcatttttttcatgtacctgttggtaatttggatattttctttggagaaatatctattgctgattaaaaaaaaaaaaaaaactctcagcaagctagaaaaagaaattttctcgaagtggtggaaagcatccacaacaaaacatataaacaatattatatttaattgtgaaagcgtaaatgtttaaaccacatagattaggacaagaaaaggatgtgtgtgttcatcatctctattcaacattttactggtgatcctagattgagtataaatatttaggagataactattgtcactgaagcccaaatcttggtcatcctcaggaaaaaaaaaaaaaaagttgattaggttgtatataatctaattctacttgctaatttaatttctctaaaattacagcttgtatcaactctagaatttattgggcacctcctaggacataaacactg

SEQ ID NO: 691504 - DNA, 307 bp, Homo sapiens
tgaacacaaacaaatgaacagcaaacactggggtctacttgagggtggagtttgggaggagggagagaagcagaaaaggtaactattgggtactgaacttaatacctgggtgattaaataatctgttcaacaggcccccatgatatgagtttacctacgtaacaaaccttcacatgtatccccaaacctaaaataaaagttaaaaaaaaaragaaatactttagtggttgataagccctttcctgccacttggtctttatctccccagctgagttgcactagtgtagcttcccagccatggtgtgtg

SEQ ID NO: 691505 - DNA, 640 bp, Homo sapiens
gctttgttacctactaaatgcaaatagccaatttatatactttttagacctttcctccctcccttgctttctatcctgaaatctaattaaataataaaatattttgaaacaatgaaaatttctaaatatttgtctctaattttattaaatatcaacatttatttattattattattattattattgagatggagtctcactctgttgcccaggctagagtgcaatggctcaatcttagctcactgcaacctccacctcctgggttcaagtgattcttgtgcctcggcctctcaagtagctgggattacaggcgtgtgccaccacatctggctaatttttgtatttttagtagagatggggttttaccatgttggtcaggctggtcttgaactcctgacctcaagtgatccatccacctcggcctcccaaagtgctgggattataggcatgagccactgtgctcggctcaacttttattttagataaaggaggtacatgtgcaggtttgctacatgggaatattgtgtgatgctaaggtttggggtatggatcccrtcacccatgtagtgaacctaatacctgataggtagtttttcaaccaatgacctgtcctttcctctcccatctagtagtccacagt

SEQ ID NO: 691506 - DNA, 2089 bp, Homo sapiens
tgttgcttaacccactcagtctgcggtattttgttttggcagtcctactaaacaaatgcactaataataattttttatatatgtaatcacaagttctcaagaattacaagataataaaatgtgtttaatactaaagtcataccaaacattaatctgtttgtgatggtttagaagaaattttagacactgcaatatctcaaattattattattaggatgaattactattactgtattttagaaatacaaaaatgctatccaagaccattccacctgacagaatataacataaaatgagtttagattctttattcttaaatatcgagtctgaagtacagcattaaaataatcaactataaaggaatagtttagcactaaaaatggtaaattttatttactattatataagaaaaatgcaatgtacattgctcaaacttttaataaacaatattaactgaaatattttattcttattaaatatgtcagagataaacctatatatgatagcatcacaataggcacaatatatggattattttcattaattttatctttattgataaygaagactctataaataaaaattttaattttatgtaattactaactttgtataaaacaatgtatacaactgttggtgtattagagactgtacaatttttcttctgttcattctctctctctgcctcctgagaaatacctcaaggaattcattgttttgttttagtgaaatatcttatgtgttacattttctaaaatttttcaaagtaaaacagttttttttatttggctgaacagagtttgacattgtatcttttctatgaatacctcagataatgacttctgtaccattagacccattctgaaaatatggtaggcccccttatttgcattttctttttgtgatttcaattacctgtcatcaacagaagtctgaaaatagttgaatacagtacaggatattctgagagagggagaaagagagaccatattcacataaattttattacactacattgctataattgtttacttttattacttattattattaatctcttactgtgcctaatttataaattaaatgttatcataggtatgtttgtataggaaaatacatagtgtaaatagcattcagtatccacagtttcaggcttccactgggaatgtattccctgcagataagggtggactactgtatttacataattgacttcccttttcaatgtaattgtctcagttcttagctctgttcatagcattagtgagctcttattgaattaaatactgttcaaagattaaagaaaaaatggatttgataaaataaatacagctcttgatggtaccataccatattctgacaaacttctactgaatattaaagtataaagtaaacacacaacagtgtaccacgtaaaatcatatagatgtatatggaaaataggcaaactaagatggggcagaatggatggagtcaagagctttggcgaatgtcttgtacaatcaattgattaaaatactataaaataaaataaaaaaatcttttatctctcactatcaaattacaagccatcatttatcatacgtatggatggtatgtgtatacgtaaagaatctctacacgtgtgtgttttataatatatctagatatattgtacatacatgtgtttgtacatacacattacttactttcaaattctagataaatgcccagttacaaaagtttaagctagagaaggaactgggaaaatggttaatattctaaaaaaatataaaggtccaaaaatgcatgtggattataccatgtttctgtctttagctgcaggaagaaaggtagtgtcagaaagagagatgttgcaaagccttcatttgcagtgattaccagaatcaaagagtcaatgagccaacgtaacaaaccttctttaaggagattcatgtgtgaatttgagaaattaaaagctaatttactgaaaagataatttaatgtttaaataagtgaaagaaaatgcacaatgattgggtgtacactgaatcacagattaacatattacattgttaaactaagcaatctttccttttttttcctcaaa

SEQ ID NO: 691507 - DNA, 556 bp, Homo sapiens
tgtctctctatatctatatctatatatagatatagagattttatatctattttatatattatatatattttatatctacatagatttcatatagatatttatatagatattttatatagatatatatatatagagagagaaagaaataattgctgaggggattattatgtttaacatttaagcataatacacttagtaatactcccttatctgcagttttgctttctgcagttttcattacttacagtcaactgtggtctgaaaatacatgtaatatgatattttgataaagaaagagtgatcacattcacattatactatattgttatattgttctattttattattagttactgtttttatctcttactgtacctaatttataagtttaactttatcataggtatgtatgtagatatatatgtatatatatatatatctatatatatgtgtatatatgtatatatgtatatatatgtgtatatatacatatatatgtgtatctatatatacatatatatgtgtatatatayatacatagagaggtgtatatata

SEQ ID NO: 691508 - DNA, 556 bp, Homo sapiens
tgtctctctatatctatatctatatatagatatagagattttatatctattttatatattatatatattttatatctacatagatttcatatagatatttatatagatattttatatagatatatatatatagagagagaaagaaataattgctgaggggattattatgtttaacatttaagcataatacacttagtaatactcccttatctgcagttttgctttctgcagttttcattacttacagtcaactgtggtctgaaaatacatgtaatatgatattttgataaagaaagagtgatcacattcacattatactatattgttatattgttctattttattattagttactgtttttatctcttactgtacctaatttataagtttaactttatcataggtatgtatgtagatatatatgtatatatatatatatctatatatatgtgtatatatgtatatatgtatatatatgtgtatatatacatatatatgtgtatctatatatacatatatatgtgtatatatatayacatagagaggtgtatatata

SEQ ID NO: 691509 - DNA, 556 bp, Homo sapiens
tgtctctctatatctatatctatatatagatatagagattttatatctattttatatattatatatattttatatctacatagatttcatatagatatttatatagatattttatatagatatatatatatagagagagaaagaaataattgctgaggggattattatgtttaacatttaagcataatacacttagtaatactcccttatctgcagttttgctttctgcagttttcattacttacagtcaactgtggtctgaaaatacatgtaatatgatattttgataaagaaagagtgatcacattcacattatactatattgttatattgttctattttattattagttactgtttttatctcttactgtacctaatttataagtttaactttatcataggtatgtatgtagatatatatgtatatatatatatatctatatatatgtgtatatatgtatatatgtatatatatgtgtatatatacatatatatgtgtatctatatatacatatatatgtgtatatatatatayatagagaggtgtatatata

SEQ ID NO: 691510 - DNA, 2575 bp, Homo sapiens
tataaattttattattatggagccattaaataaatatgatacattatttttaaataagtacagaatatgtaaaattccatatatctcaatgcagtgtgactgctttttatattgaaaatcttatgatgacttaatacccgagtgtggtttcaagttagtgtgctacaagtgcttctgctatttttgattttccttttaggacttattggaggaagagagagagagagagagagcattcagagcgccagtaaaaaacaaaatcaatgctttgctgctgttgttgctgttgttgggctataaacactctactttggttggttataatgctaccaaaatccacagtacttaatttatctaaccttctgatagtgaatgaacaaaggtaaaaataacaggctagttataaactagtactatggtgatgacattgtgaattatttaaaaagggcatattcaatgtgaccatagagccatcaatcataatagacattgatgagaaaaagaggtttcagtcacttcctatctgcaaggagaacaattctatctcacaggtagctatgaagtgctgggtgacctgatgtcacttgcattgttgctctaccctttgaacggagagagtagattctctcaatattagaatcgaatgagtaaataaattcgcagttcactgccactttccttccgagtgcacacttcaatttgtctaacaatagagaggacagaaaagcagaaatctcttaaagcgtggatgaattttttatggtatgttcaaatccagctgcaaaggatggggttttaaatggtagcagacactcttttagagggagccccaagagacgaaatcttttggaagggttttgtattkaattcattcctttccacttacatccgtggcttttcttcttctgaagccctgcttttactaaattgttccactatcaagttcacattgatttttaagatgacaaatagaaacacttcctttatctttaatatacacacacactacagtagaatttccatttcaaatgcataagaacagtttttaaagtgcatgcacgtaatactattttatttgtctgtttcattcaataggaagattaggattgcaggagaagaaagaggtggctagttaaaatattttaagaaaacactatactaacaaatttaacctctttcttctgttcaaatattcagaataatttcatttaccacaatccctcatctcagagttttctatttgaaagttatcatagcatgcattaatttacattacctaaatttttgagtatcacatttccctcatcatagaatcctacaaaatcctctggcatttacaaactacaaagctacaaaagtgtgcatattttcttatatgctaaaatctactgcttcattccagcacattaacatttatgacataaactcaagaatggtatggacgtttttttacaaagtttttttttaaattagaaaatgtagataaataggctttccttttctacctctattcctccttcccttctgccacccacattactaacccactctattagagcagaaatatgaaacatgtttgcattgcattctgcatctatggcatagtcacttgaagcatgtacactattcatttttattcacatttcctctctaatatattctggaagtatattcatctcaatgtaacctctgaaaccactttaaaaatgtgtaccaccacttaattgttgataacaggtaaatcaaaggtaaaaagataactaattaattttctagttcagttttattttgctggtactgttttcagaaaatataacaaaaccccattagtgttaaggtaagcccatgaaacaacataatataatgcaaaaaagacatttaatagtgtagaggaatgttaaattactaattaactccaagttactgtataagaaagcatagtaatttacaggattattgcaatatgcagcttggattgccactagggtcagctagggagcatttctttctatacccccccgcctcttagtgtggtggttactgtaaaaatcttctcacattaaaatgcactgtcctacccacagttcattgctgctaattagcagcagttgagattttgctagcagtcatttttttctgtgttaagctgccaaatgttaccaaatgctcaagattctccatgcacaaagtgtccagctgcccagcttgcaccactgtgtgtgtctttcagctgtttcctgtcaactttaacacctgtgcaaagaaaacactaatcaaattatctgtactggcttttgttatcagagggaaggttatcaaaagtgttctggatactttggcacatgctcatcatctactgctagaaaatctcactagacacacacacatatacacacacacacacagacacacacacacaccttttcatctaagcatccaattgagaccatggctctctaaaacttaaatcactccaatatctgccatgtcaaagtcaagtgtttgcacagtctatttaaacttttatttaagcaataaggcttgggaaagtcatcttttagttttacctaaatat

SEQ ID NO: 691511 - DNA, 656 bp, Homo sapiens
tttgaaaagaaaggttaattttggatgaaatagagtaggaaaagtgagagctgagaataaccagcttttatcttcttccttcccggccaccgaaagaagccagtgcctgggattctgagatgcagccacatcataaagtttcattactcaattgcagtagagaaaacctcaaaggaaccacttctaatggaaactgcctcaattcctggtcaagtctcacagtctaacstggaggtgctctgaggtaggggcagatagttttaaaaagttcacttcataagaagttacaaactaattgtaaagtatctcaaaaatgatcacgatatcccttttctcttatggtatatgactaataacttgatatatttttaaggctctgtagcataaaaattattttaaaagatcatttagtactaccctactttttaaagtaaatgctactgaatataatataaaccttctaatagtttataatgttaattcatcttttattttttctgaattattatttagttcttcatttaatttttcagggtcaatttatttttcatttcctttctggacatattaatttcagttttaattttctactgccatgacttcaaaaggttactgaattgcgtcacgtctaatctgtttagatatggtcaaactct

SEQ ID NO: 691512 - DNA, 605 bp, Homo sapiens
tgttggagcccaattttgtttgtaaacggggaaaggtacaggtaataacatcattggcacaggattccctaaawcacattgttactaattctgtcccatcaaggacaagaaatcttccaaaccacaaacagaggcaatgtagcaactcaggatattccaatttttccgctgccattagcagtttataaactttcctgaacaatgcatgtcttggggaattttacaggcagggaagaaatggaaggggttgtatcaatgatttatgtgtaagtcaactagaaacctctaccgaaatacttccacttttgttataaatcttcattaccacatttaatttagtaggccatagtctcatcaaaattcaaacccatttactctattttgacacttaaaaatgtctgattaatagagccagtaggtttcacatctattacatcttttatttttacataatttatgccaaggaaaatatctacagagtttgtgcccgattgtctcccttcaccaacctatgatcatttatggagatattctccaaaattcatcaccagatccaggagatcattaataggctgtccctgctgggcagggaagagcaggacaga

SEQ ID NO: 691513 - DNA, 605 bp, Homo sapiens
tgttggagcccaattttgtttgtaaacggggaaaggtacaggtaataacatcattggcacaggattccctaaatcacattgttactaattctgtcccatcaaggacaagaaatcttccaaaccacaaacagaggcaatgtagcaactcaggatattccaatttttycgctgccattagcagtttataaactttcctgaacaatgcatgtcttggggaattttacaggcagggaagaaatggaaggggttgtatcaatgatttatgtgtaagtcaactagaaacctctaccgaaatacttccacttttgttataaatcttcattaccacatttaatttagtaggccatagtctcatcaaaattcaaacccatttactctattttgacacttaaaaatgtctgattaatagagccagtaggtttcacatctattacatcttttatttttacataatttatgccaaggaaaatatctacagagtttgtgcccgattgtctcccttcaccaacctatgatcatttatggagatattctccaaaattcatcaccagatccaggagatcattaataggctgtccctgctgggcagggaagagcaggacaga

SEQ ID NO: 691514 - DNA, 664 bp, Homo sapiens
tgtttaactttgcatacagtatttaccccttcccatcatattttagttcaagagctttgacctttgtcctgctagtgttgctgctttgagagaaggtttgctattcaggtagcacttatttaatatttacttcaaatattgtggttgtaattattctagtgagatattttctccaatcggatttggccataatyattggagttttgagttgttagggataataaacagcaccttgcttttttccccaccctggataaaagtaaaatgtgttctcaccctgcaggcagtgttcctctttacatgatatcctccaagatgatgagttctaatcctgaggaagaccctttggacacatttctccagtacattgaggatatggggatgaaggcctatgatggcttggttattcagaatgcgtcagatattgctcgagagaatgatcgcttgagaaatgaaactaacctagcctatttgaaagagaagaatgaaaaacgccgaagacaagaagaagcaataaagcggtaaatataaataaaattattttgagttttgtgcacatgagaaagtccatgagggctgctaaagttgtgatgttgtcacttggtcagaaaaggtcttccagagtcagttagacttggtgagagcatatgaaagcgacccctca

SEQ ID NO: 691515 - DNA, 664 bp, Homo sapiens
tgtttaactttgcatacagtatttaccccttcccatcatattttagttcaagagctttgacctttgtcctgctagtgttgctgctttgagagaaggtttgctattcaggtagcacttatttaatatttacttcaaatattgtggttgtaattattctagtgagatattttctccaatcggatttggccataattattggagttttgagttgttagggataataaacagcaccttgcttttttccccaccctggataaaagtaaaatgtgttctcaccctgcaggcagtgttcctctttacatgatatcctccaagatgatgagttctaatcctgaggaagaccctttggacacatttctccagtacattgaggatatggggatgaaggcctaygatggcttggttattcagaatgcgtcagatattgctcgagagaatgatcgcttgagaaatgaaactaacctagcctatttgaaagagaagaatgaaaaacgccgaagacaagaagaagcaataaagcggtaaatataaataaaattattttgagttttgtgcacatgagaaagtccatgagggctgctaaagttgtgatgttgtcacttggtcagaaaaggtcttccagagtcagttagacttggtgagagcatatgaaagcgacccctca

SEQ ID NO: 691516 - DNA, 510 bp, Homo sapiens
tccctccttccctccctccctcccatgtgaggacacacagccagaaggtacaatttgcaagccagcaaagaatccctgaccagaagccaaatctgccagcaccttgatcttggagtatccaagctccagaactgtgaaaaataaaattctgttatttaagccactcagtcgattgtatcttgttttcaaagcctgagttgactaaaacagtatcttagaagaatcttactgttttctctaaatatgatccttatgttcatatattcagttggtcttcctatggagcaattttattatttctagtaagtttcaaactggttattttgcatttttagttagaaaaactatggagtccctttggaaatatttttcttcctcacttacttggagtttagtttggttacttgtatatttaaatttccatttatacttttattttaaaaaaagacaatctcatgttcattatatggatacrtttgaattttctacttgtgcagaatatgtcaccag

SEQ ID NO: 691517 - DNA, 938 bp, Homo sapiens
caccccaacaaagccgggcgtggtggctcacacctgtaatcccagcactttgggaggctgaggcaggtggatcacctgaggtcagaaattcgagaccagtctggccaacatggtgaaatcccgtctctaaaatacaaagattagccggatgtggtggcgcacgcctgtagtcccagctactcaggaggctgagacagaggaatcrcttgaacctggaaggcagaggctgcagtgagagagtgagcgagacagagggagactccgtctcaaaaaaaaaaaaaaaagaaaaaagaaaaaagaaataaataaaattgttaaatgtgtggaaaaactggaattatatggcggcaatattttataaagcaaaaacttgaactagctcagataagcagcctgctgcatccacacacagttcacaagtcaaccactttcaggaggccaaacatattccaaagcttggaggccagacgataattcctgaaatggagccctagggtggatcagaacctggggatgagtcaggggcactaatggatttaactctgggagttcaatttgccctcctgtctcctaaacacagcgtggaaatgctccttccatcaagcctataaatgttattgaattaaatgcttcaatcaaaggctgagacattagactttgaatttgaaaacattcatcttcatatttttatgaagaataccagatataaaagcattatgaggccaggcaccgtggctcatgctgcaatcccccactttgggaggctgaggtgggtggattgcttgagctcaggagctcaagaccggcctgggcaatgtggtgaaaccccatctctatttaaacccaaacaaaaagaagcgttattacctgggagctggcaccatggtgatccgaggaaaagaggttttattgactcacgtttcgcatgctgggcaggc

SEQ ID NO: 691518 - DNA, 938 bp, Homo sapiens
caccccaacaaagccgggcgtggtggctcacacctgtaatcccagcactttgggaggctgaggcaggtggatcacctgaggtcagaaattcgagaccagtctggccaacatggtgaaatcccgtctctaaaatacaaagattagccggatgtggtggcgcacgcctgtagtcccagctactcaggaggctgagacagaggaatcacttgaacctggaaggcagaggctgcagtgagagagtgrgcgagacagagggagactccgtctcaaaaaaaaaaaaaaaagaaaaaagaaaaaagaaataaataaaattgttaaatgtgtggaaaaactggaattatatggcggcaatattttataaagcaaaaacttgaactagctcagataagcagcctgctgcatccacacacagttcacaagtcaaccactttcaggaggccaaacatattccaaagcttggaggccagacgataattcctgaaatggagccctagggtggatcagaacctggggatgagtcaggggcactaatggatttaactctgggagttcaatttgccctcctgtctcctaaacacagcgtggaaatgctccttccatcaagcctataaatgttattgaattaaatgcttcaatcaaaggctgagacattagactttgaatttgaaaacattcatcttcatatttttatgaagaataccagatataaaagcattatgaggccaggcaccgtggctcatgctgcaatcccccactttgggaggctgaggtgggtggattgcttgagctcaggagctcaagaccggcctgggcaatgtggtgaaaccccatctctatttaaacccaaacaaaaagaagcgttattacctgggagctggcaccatggtgatccgaggaaaagaggttttattgactcacgtttcgcatgctgggcaggc

SEQ ID NO: 691519 - DNA, 1122 bp, Homo sapiens
atgagttagcacaaaatgaacacacctgagtaaccaacactcaagaaatattaatagagcaggagcaacagcctgaacccttcctgtagccacgcccacaactccccactccccttccaagggaagcctctctaacttctaacaccaaagggtggcttcgcctgtttgtataaatggtgtcttttgctcagcactgtgtctgtgagattcatttatgtcacagtggttcattggtgttcatttgtgtgtagaattcctgcattgctttgttttttgtttgtttgtttttaagggacagggtctcactgtgttgcccaagctagagtgcagtggtgcagtcatagctcactacagcttcaaaccctgagctcaagccatcctccctgctcagcctcccaagcagctaggattacgggtgtgcaccaccacacccagctaatttttttaagattttttttatagagatggggtcatgctatgttacccaggctggtctcaaatgccttttctggcctcaagtgatcctcccatcccggcctcccaaagtactgggattacaggtataagccatgatgcccagccctgcattgcttttttaaaagccatctttaagaagattgcctactatagcaccccaaattgttttccatgttgtaggaattattttaaatttttcttagatttattttcctccttaaaaaaaagtctggccgggtgcggtggctcacacctgtaatcccagcattttgggaggccgaggcaggcagatcatgaggtcaggagatcgagatgatcctggctaacacggtgaaaccccgtctatactaaaaatayaaaaaaattagccgggtatggtggcgggcacctgtagtcccacctacttgggaggctgaggcaggagaatggagtgaacccaggaggtggagctggcagtaagccaagaccgtgccactgcactacagcctgggtgagaaagcaagactccatctgaaaaaaaaaaaattaaaaaaaaaaagtccatcagcttatttcaataaatgtcccaaagtagctttgaatatgttttccccaagaagcatcttgctgttcaaaataaagtaactgagagagtccttatattgt

SEQ ID NO: 691520 - DNA, 1061 bp, Homo sapiens
cttcagccgaaacccagaagtttaaaaaaggtaagaaagtaaatgtcagtttataccactggaataagttattgacagtggattagggcaaaaaaaattatagtaattatctccatatccctatcaactatttttttaataacttaataatatcactattaggttttagaatagtttatcaatgtttatatttgagagtgcatggaaatagaatattttaaaaagtgaaaacatacaatataaaccatttggttgtctgcctagttagtttattttcctgcctaccttttttgggttcactaatctcagtgggaactctgtaaacttgtcacatgattcttactgacttgagaactgcaaatgaaaaatatttgcagaagatgaggcttatcatcttgtctcttttctctttttatctactttaaaactgggtatttgctttttttttttttttgcttcactctggctactgtaacatatgataggtgcatgtatgattcctttcctacatatcctcaaatatttstttctcctgagaacattcagaaggtaggaaaacatgaaaaatgattatagaagtcttaattcagaagatctggattcaagttctaactctattacttatcaactttgcgatttttgataaatttctccacctttctctgcaacctaagagtaatacctgtctcaaaagttattttatggattaaatgatatgatggatgtcaaacactggggaagttgtaacaaaccacacaagtccaagacattatcaaggttgggcgtggtggctcacatctacaatcccagcactttgggaggctgaagctagaagatggcttgaggtcaggagttcaaaaccagcctgggtgacaaagtgagaccccatgtcaaaaaaataaataaataaagatgatattatcaatataagatttagggttggtaaactcaaaagacactaaacaaataatttcctattctgggattaaaataattaaaattaaataattaatttcctattctgggattaaaataatatgatagtattaaaataataatga

SEQ ID NO: 691521 - DNA, 1290 bp, Homo sapiens
tgtcaaaactgaagataatttttcttttgatctaataaacaaacaaacccttctactcaaggagagagttttattagcactgggcagactgaagctttgtgtctgtggagaagtattaataatctgctaagacacacctgtggattgtgaatggcggcctatggcatgcatatttatgaggtaccacatcccagggcatgttttattgccttagaagagcaaaatagatgctgacttatcctgtgtaaggaagcagggaatgaattttgtctcaggaaagcaaagtcttgcagatcatggcaacaaacgcaactctaaatgtgtgtgtagacatcatagtgaatatcagacagtcccacagcttctgagtctgagcccctggaaagcaatgtggagggagaaaaaaaatctaaactcaggttcctgctccagcagtggttaaaaatttctaagctctcatcccagctctgcctttgccagctatgtccttgtgtaagtcacttatatcctcaactaagaactacagataatcatagtacctattccttgagtttacaggcagactaaatgatacatttattaaaagatgtccatcacattatttatactattaagtactgaaaaaacctatatgcccaataataggggatctatcaaatacactatagtttatctatgcaatattatattaaaattaaaatggtgcttatagatcacagtacaatttgcaacatatatgcacaaacttggacattaataagaattgcaaggaaacacatcaaaatgttaactggatttgtgtctgggtagtggaattttgagagtttaatttttctttttatttgtcacatcctctataatgatcttataatatttttaaatcagaaaaaaagttttataaaatgaatgaagtttgcttgccagagacaaaaaagtgatatttgcaaaaatcatcccctacaacgagaacatgtaatctgaagtgagcaaagcaatttaggtagcagtgwactatgtttgtttaaagttagacattgtagctgaatttttgctgtactatctactggttgaattactttatgcaacttactaacttctctgtttctgttccttcctctgtaaaacattacctcatgaagttttgtgaagataaaataataatgcatgaaaattttttttaatttttaaaaattatttttaaaatgttttgtgggtacatagtatgtatatatatttatgcggcttgaaatctctttatataatgcttgttgttacaaagtagatgttcca

SEQ ID NO: 691522 - DNA, 583 bp, Homo sapiens
ttctactggagatggtggaagtaccatctaaaagtcttaggtgctacattctggtactggccctttcatggccaagatatgttcctttgggcaagttgttcaaactctctaagcctagtttttcaactgcaataaagatgattccagttcaaaatctgggcaagtgtgagttactgccactacgtgcagtcargttctgtcatgtttcctccatcaagctacccagcaggcttgggagaatcaaatgtaaggaggtgtaatgctaccaagtttagaaaatctactaatgctgcttcaagacaacaacttccctccttctagctcatttgaatcccacagcaatcaggaaacataactgtcaggtaatatttttatttccttttgggatgagcaaactaagcttaagcgaggttaggtaatttactcagaagcacatagctaataagcagactaagaagaacttgggcctttaactgaatactgcagactttctaccccactcgctgactctattaaaaacgcaaactggccagaccaggcatggtccaccagtcttaccagtgtcacccaggtgctggcttgt

SEQ ID NO: 691523 - DNA, 583 bp, Homo sapiens
ttctactggagatggtggaagtaccatctaaaagtcttaggtgctacattctggtactggccctttcatggccaagatatgttcctttgggcaagttgttcaaactctctaagcctagtttttcaactgcaataaagatgattccagttcaaaatctgggcaagtgtgagttactgccactacgtgcagtcaagttctgtcatgtttcctccatcaagctacccagcaggcttgggagaatcaaatgtaaggaggtgtaatgctaccaagtttagaaaatctactaatgctgcttcaagacaacaacttccctccttctagctcatttgaatcccacagcaatcaggaaacataactgtcaggtaatatttttatttccttttgggatgagcaaactaagcttaagcgaggttaggtaatttactcagaagcacatagctaataagyagactaagaagaacttgggcctttaactgaatactgcagactttctaccccactcgctgactctattaaaaacgcaaactggccagaccaggcatggtccaccagtcttaccagtgtcacccaggtgctggcttgt

SEQ ID NO: 691524 - DNA, 1148 bp, Homo sapiens
attttagaatttgctcagtgatttccatgaaattagagctagaagaggagatatgaatatttcctctttctccacacaaatcaacccaattaaattaaggcaatcaaggaatctgcagttactgaaaccatgtactttcaaatttttgacctgacattcttcatactgtagcaaaattagttccttcatcacttcgattatgagaaatactagtctgcgggaagagcacttgtttcgatggcaggaaacttgggtgcttgagatctgaattcttttgcttatttatttatttatttttattttattttattttttttgagacagagtttcgctgttgtcgcccaggctggagtgcaatggtatgatttcggctcattgaaaccttcacctcctgggttcaggtgattcttctgccttagcctcctgagtagctgggattacaggtgtctgccaccacacccggctaattttttttttttttttttttttttttagtagagatggggtttcactatgttggccaggctagtctcaaacttctgtcctcaggtgatacacttgcctcggcctcccaaagtgttgggattacagacataagccaccacacccagccctatttgttttaagaaatacttattgattgtccctgacatacagttgtcacatgctagagctggattccaatgtttgttgcatttggccattaggaagtcatttactkttttcagagtaggcatagtggtaaaagtctcattggagtcaactaaggaataaaataaaggagataaagtaggatttgcatacaagtccttagcttagttgtagatagaaggtgatggaattgagggaatttctcttctgtattctctgtcctcttctttctcctctcctcccctccacaccttttcctctcctcttcttactctctcctccctctctcctccttttctcatcttcttttcaaatgagataggataatcatatttgtaggttgatggtaaagaactactagagaagttgaaaatagagaaggaggggataattggtattacaagatactagcatatgggactaagagaatacaaccggagggataagctttaataggtgaaatcatgccatttcctttaagaggaaatgtatggaaa

SEQ ID NO: 691525 - DNA, 1607 bp, Homo sapiens
gcaaggatggttaattgaggaagaatcataggaaaaatctattcagtctccttcaataggatcaataggttcatggaaaaaaatttttaaaaaagaaaaaaaaaatctgttcaatctccatatatgcctaacatgttatttccaactcagttgaaacccagtattatgcttaatgatgaaattatcccccttgtcaagcacaagacaaagtaaatatgctcacatatattacttatgtttattatgcacacaaatattctttaatattgtattataatttccaccctacagaattagagaagaaatcagaaacatgrtaattggaaaggtataagtaaaattactactatttgaaagagttctatatctggaaaatccaagagatacaacaacaaaaaattactacaacttaacaagaaacctgcaaggcctttataaagaaaattttacacaacgacaaaacaaaacgtgagcaaatggaaaaatacattcatgttttggggcggaatcaccaacatcttaaagatgtcaacactgccctaatttaatttagaaatttaacttgatgccataaaaatggcaacaggttttctaactagatgttatcattgatcctaaaatttatatggggaaagaaaacaaatttattaaaaagaggagtgatgagaaaaggatggggatgggcaggactggcactaccggatagtcaaacctctaaatctgattcagcaaatattctgtcctactactttttaagagtttgattccattctgcagcacatttcataatttgtatttatgattaatacaagtatttagcaattagaatatacatgaattcaagaaattctattctctaatttcatgtaaactttaaagtgaaagtaaatcttattaatttttttatagatataaataccctggattttcctggtatttctgcagttaaccttgcaagtgtcatttccagaaaataagtgtatttccaaaattaacagataaactgctcacattgagggatttaacatttgtgtattcagctgtcttcagaacatttaaaacccaatgtgtttacgaaaaccacaataagataccactttatatccgtcaaaatggctatgattaaaaaaaaggggggcaggggctgcatacagtggctcttgtctgtattcccagcactttgggaggccaaggcaggaggactgcttgagcccaggagttcaagaccagcctgggcaacatagttaagaccttatctctacaaaaaaataaaaaattagctgagcgtggtggcacatgcctgtagtcccatctactcaggaggctgaggcaagaggatcacttgagcccaagagttcaaagccacggtgagccatgactgcaccactgcactccagcctgggcaacacggtgagaccctgtctcaaaagaaaaaatgaaagttaaacataaaagctaatccaacaattccacttctgggtatatacctaaaaaaagcagggactcaaacagatacttgtacaccaatgttcacagaaacattattcataatagcccaaaatgtggaaacaacccacatgaccatgaacaaataaatgaataaacaa

SEQ ID NO: 691526 - DNA, 1366 bp, Homo sapiens
gggtttattacaaaaagattagtagtaacagcagccatgaattggtcacttcttaaagctatacatagattgcctcattggagcctcagcacattctcatgggagtgtagatcctactgttaggtgaggcattatcatgcagtggttaagaattcaagcactggaatcagactccatttgaatcctgactacacccccttatgagttctgtgatcctggggacatcgcacacacatcctgagtctgtgtgtggatggcatgagttactcatgcaaagcatttagcacagtgcctggcatatagtaagcacacaataaatacttataataagaaatccgagagaggttaacagtttccacagctagggatagagcagggattcatccccaggcctgtctgacctcaaagccccactcttaacagaacagctggcttccctgaaacatctccaggaatttagccagaaggcggctcccttccatggacaaaggccttgctgagatggcctagcctcaccagcacatccatgcagacttgtcctgaggcacacaccagccggcctcgcagaaggctgcatggcgtttgcagctggawcaagatgtggccatctgtttgcttcacaaaaaaggtcaacagactgagagcctcctgctctgccatcctgagggctggctgctactgctagattccttcattttgggctaattagcccaatggctgcgattctagatgttcaatgccaccctccagccttagtcccttcctgtctccagtttctaattaggtttgtaacttaatgatactcttggaattcttgagtcccatagcaaaagtttggcaacataggttaaacaaatgggtaaatgaactacaaaaaaaaaaaagtccatatggcacaggaaaaagaagtaaatgtccccaacttgctttgatctcctcttctcacaatctcaagtatcctcatgagcgtgtgggtgggttggttggttagttttaaactggtttaactgtatttccagtgacttttcatttgatcttggaaatgggtggaaatctccatgagcctcctagttcagttaacctttgacagagagagcaaacagctgtcaacagctctcaattcacccaacacaagcaagaaataagaacaacccagaagtcagatacaaagagtggaagggttagaaaaattgatcttgtaaggccaggcatagtggctctcacctgtaatcccagcattttgggaggccgaggcaggtggatcacctgaggtcaggagtttgagatcagaccagccaatatggtgaaaccctgtctctactaaaaatacaaaaaaaaattagccgggcgtgttggtaggcacctg

SEQ ID NO: 691527 - DNA, 1128 bp, Homo sapiens
catcaacccacctacccacccatccrtctacctacccatccatcctcccatccatccctccatctgtcctgccactcatccctccatctgttcatccattcatccatccatccagccaaccagccagccagccttccatccatctgttcatccatccatctgtctatccatccatgcatctatccatctatccatccttccatcctcttaatggcatgtcctcatggtgtggcatattgagagagaatgattactgttccttaatagcagtttagtagacgttatttttcttaggttgtcctttttttttttttttgcttttaaaaaatttttttcttgggttttttgttttgtgttagaagagtggtattttcacttgcaagagatttttaaattcaagaagccaagaagcacttaaggatacaggctcaaaggtaagccaagccaatccctcctaaattttaagttcttattttaaggctgtggatgatacttcatagggttcttgagagaaatgtatgggggacaccataggcacaaaagctaattgcagcaacagcgatgacactaatgctgctgctcttgctgctgctgctgctaccactactactactgctgctgctgctactgtggctagcaaacatatcagtggcatccacttgttgttttggagaatgctaggctctgggccaggcactttccattcttgctttctgatttgtgacaactctacaaggcaggtatatcctattccacatgtgagcaaactgaggctggacatgaggctatgatcaattcttttccttccccaaccattcccgtagctgtctctatgagtttagtgttaaactgggatgatctgggactctcttctcagtcagcaaaggcagaaggaagtgttttgaattctcccggccgtgagtggctgccatctaccttgctgatgccgcgtgatgcatggcagtaagagttaatgtttcccaagggtcctttaacagtggagatgctggaagagtggtacacgggtttctaagttacttaacagattttatgaactgctaattaccttgtaaagacattttattgagctagagtgatctgctgttggcactgattgtttacatatct

SEQ ID NO: 691528 - DNA, 658 bp, Homo sapiens
tgaatctctctctccatcttagtgacacctctctcctcagcaatccaaaaggagccttagatagaaaactgaggaaattgtagggttcacattagatatttctttctctcaaagtattgtgctgctattatccaaagtctaaaaatagatttttattttttttagtttttaaacttttgttcagaaagttggcaattaatatgtcagtaattccaacatgactggaagcagaataccctaaattgactgattattattttttttatgttaaactaaccttgcattccagtgataaacttcacatggttatggtctattatactttcactttgtgattatcaattgaatagtatatttttaggagttttgcatttttatgtatgcaaatctataaagtctaaatcatatgaactacttatatggttttcttaaaatttttcctcagattttggaatcagtgttaggtgtttcttaaaaaatgaggtgagaaacgtaaccacttattcaattctgcaaaaaaataatgcaacatttttgttatattttcctcaagtggttgatagaattcactgtataggccatctggacctgcagttttacataggggatgtgtgtttktataagttgttaatgtcatatctatatgaatatatagata

SEQ ID NO: 691529 - DNA, 1073 bp, Homo sapiens
attgcctgaaggagtaagaagggtacaatttcatctgtggtccattgaccaagctgtgcacctgtaatactgcaactcttcctaatccacagagaggaaccttacagctagttgcaatcctgagttcctcttaagtttctggtgtagttttaaagaaaactatatccaagatcctaccctaactcacacactgaatctcggacgtctattccaaactatatcagacattctgccaagcaccaagtggaagagtgtttccgaatattgtacatagaaaaatgatagggtatgacacatcagtctaaaaattacaactagtattataaaacatagcaggtgcacaattactctatcgtggtagggtgtaaaatgctcacaacattgcttcctagtatccaattaatgtagttggtgataaacagttactcatttgcagtgatgtcttctttttttattacagtcaattatacaatgaattgcaatcgactcattctgctccttattcaacaattgtattaccatttttttccccaacaaaaactaggcaaaaataagatctaactcctaaaagcatggtgggaaagcagtcagtggagacgcaccatggcagagagtgacacccactgaggatatcacctggatcctccgggcactgggtgcatttaagagtaaacccactcctgtagcctcagcacatttttttttttactttaagttctaggatacatatgcagaacgtgcaggtttgttacataggtatacatgtgccatggtagtttgctgcacctstcaaccggtcatctaggttttaagccctgcatgcattaggtatttgtcctaatgctctctctccccttgtcccctatcccctgacaggccccagtgtgtgatgttcatgggagcacatttttaaaaagggctaaacgtgattttaatgagggactaattgtatttagagagtaactgagtagtttttgatatatcattttgtttaaaatatttattgatatttggagctgttattataaaatttttcctatattattattcatcagaaacatcttgttaaaata

SEQ ID NO: 691530 - DNA, 1073 bp, Homo sapiens
attgcctgaaggagtaagaagggtacaatttcatctgtggtccattgaccaagctgtgcacctgtaatactgcaactcttcctaatccacagagaggaaccttacagctagttgcaatcctgagttcctcttaagtttctggtgtagttttaaagaaaactatatccaagatcctaccctaactcacacactgaatctcggacgtctattccaaactatatcagacattctgccaagcaccaagtggaagagtgtttccgaatattgtacatagaaaaatgatagggtatgacacatcagtctaaaaattacaactagtattataaaacatagcaggtgcacaattactctatcgtggtagggtgtaaaatgctcacaacattgcttcctagtatccaattaatgtagttggtgataaacagttactcatttgcagtgatgtcttctttttttattacagtcaattatacaatgaattgcaatcgactcattctgctccttattcaacaattgtattaccatttttttccccaacaaaaactaggcaaaaataagatctaactcctaaaagcatggtgggaaagcagtcagtggagacgcaccatggcagagagtgacacccactgaggatatcacctggatcctccgggcactgggtgcatttaagagtaaacccactcctgtagcctcagcacatttttttttttactttaagttctaggatacatatgcagaacgtgcaggtttgttacataggtatacatgtgccatggtagtttgctgcacctctcaaccggtcatctaggttttaagccctgcatgcattaggtatttgtcctaatgctctctctccccttgtcccctatcccctgacaggccccagtgtgtgatgttcatgggarcacatttttaaaaagggctaaacgtgattttaatgagggactaattgtatttagagagtaactgagtagtttttgatatatcattttgtttaaaatatttattgatatttggagctgttattataaaatttttcctatattattattcatcagaaacatcttgttaaaata

SEQ ID NO: 691531 - DNA, 635 bp, Homo sapiens
tgaaaaggtagctcatggccaggtgcagtggctcrtgcctgtaatcccagcactttgagaggctgaggcaggtggatcacttgaggtcaggagttcaagaccagcctggccaacacggtgaaaccctgtctctgctaaaaataccaaaaaaaattagccagtcatggtggtgcgtgcctgtaatcccagctactcgagaggctgacacagaagaatctcttgaacccaggaggtggaggttgcagtgatcagaaatggcgccactgcattccagcctgggagacaaagcaagactctcaaaaaaataaataaataaataaaaataaaaaaaaataagacagctcacaaaacaatacagacattacctctttggggtaaatatgtatgttagcgcatatacgtatgtatgtatagtcagtatagcacagacagaagttcggaaggctctgccccaaatgttgtaagagatccgctcctgttccgcccccaggcttgatggtacagacagttactgcagcacccagcctcaagccacgtaacactgtggccaaagagcagcctgactgaggtgagggaaatctctagtctgttcagagccccagacagctgaccagacttcttcgtgctaattgctg

SEQ ID NO: 691532 - DNA, 635 bp, Homo sapiens
tgaaaaggtagctcatggccaggtgcagtggctcatgcctgtaatcccagcactttgagaggctgaggcaggtggatcacttgaggtcaggagttcaagaccagcctggccaacacggtgaaaccctgtctctgctaaaaataccaaaaaaaattagccagtcatggtggtgygtgcctgtaatcccagctactcgagaggctgacacagaagaatctcttgaacccaggaggtggaggttgcagtgatcagaaatggcgccactgcattccagcctgggagacaaagcaagactctcaaaaaaataaataaataaataaaaataaaaaaaaataagacagctcacaaaacaatacagacattacctctttggggtaaatatgtatgttagcgcatatacgtatgtatgtatagtcagtatagcacagacagaagttcggaaggctctgccccaaatgttgtaagagatccgctcctgttccgcccccaggcttgatggtacagacagttactgcagcacccagcctcaagccacgtaacactgtggccaaagagcagcctgactgaggtgagggaaatctctagtctgttcagagccccagacagctgaccagacttcttcgtgctaattgctg

SEQ ID NO: 691533 - DNA, 770 bp, Homo sapiens
actgttttcatctaattttatgaagccagtccactataaagagtgatgatcactatgattatctcgacattgacttgaactacttaataacttttaaaaaatagttttattttccagagacagagaactattcttttagtggtaatctcttggtagttcagttgttagaagtcactgtaaaataacaccaacaaacatggtttttaccaatcttgtgccatctggaatttatggataaaaattgtggttggggacatatctttggctttagataaaacaacactgtcaagttgagtacttcccacttctttgtagtttgttgttcataggattttgaattatggctaaaataagtttgtcttctttaaggaaggaaaagtaaattgagttttcaaatgtgaagatttattccatttataaaaatgttcatttggagcaagaattttctctaccatttttwtactttcgtctcttttaacattcattgatcctattgaattttgcttcttattagtttaacacattaatttttcattaataacattgtcaatggactcactgattttcaaaatgatctttagaaattgtttaggaatgacgtaaagctaaaaagtgttaattctgaatcataagccacataatggcatctttctgtgcccaactttgtaaaatcaaaccaaaataagatattaaaaagggtgctctgtgtacactagaaaagattcatgtaggaaaaggtgcctggactaagatgtataaggcaggcagag

SEQ ID NO: 691534 - DNA, 643 bp, Homo sapiens
aaaattagccaggcatggtggcatgtgcctggaatcccagctactcgggagactgaggcaggagaattgcttgaacctgggaggcagaggttgcagtgagccaagatagtgccactacactcctgcctgggtgacagagcaagactccrtctcaaaaaaaaaaagtagcaacagacaaataaatgcttaatgcttaatgagtttactttagtagttttgggcttcaagtaatctgattaattactatatggctttgtttattttttgtagatggggctgtaaaaaaatttctggtctctcttttgaaagtcttaaaaattggtcccgaagctaaagtaaaagataaaatgtatgcaagtagcaaatgttgtgaccatgcccttagctgagtttacctttatagagagaggaatcatcttcccaggtggctcttaaattgatgattcctataaaatgatttgaatagaaggtatcttcattttttttctcttacggcctttcaatgatttgtcttagtcactcacttttaacttgaaaatgagaattaaattgatgtggaaaagggatactagatacttaatcctctagtgcagtgattctccgtggggagtgagtttgccttccagggaccctttggcactgt

SEQ ID NO: 691535 - DNA, 643 bp, Homo sapiens
aaaattagccaggcatggtggcatgtgcctggaatcccagctactcgggagactgaggcaggagaattgcttgaacctgggaggcagaggttgcagtgagccaagatagtgccactacactcctgcctgggtgacagagcaagactccgtctcaaaaaaaaaaagtagcaacagacaaataaatgcttaatgcttaatgagtttactttagtagttttgggcttcaagtaatctgattaattactatatggctttgtttattttttgtagatggggctgtaaaaaaatttctggtctctcttttgaaagtcttaaaaattggtcccgaagctaaagtaaaagataaaatgtatgcaagtagcaaatgttgtgaccatgcccttagctgagtttacctttatagagagaggaatcatcttcccaggtggctcttaaattgatgattcctataaaatgatttgaatagaaggtatcttcattttttttctcttayggcctttcaatgatttgtcttagtcactcacttttaacttgaaaatgagaattaaattgatgtggaaaagggatactagatacttaatcctctagtgcagtgattctccgtggggagtgagtttgccttccagggaccctttggcactgt

SEQ ID NO: 691536 - DNA, 607 bp, Homo sapiens
taggaaaaaaaaaaaaaaaaagagagagacctggatggatgttaactgttcagacctactagttgtgaggccttctgaaattttctaacctcagagcttctgtttcctttaaagtccagagggagctggtgtttatttgccatctctacaaaaactggcactgggatatctgatttgtatgtgttattttatttcatcctcagcacagcctttcaagatggggattgtttttcctattttataggtaaagaaataagctcagaaaggttaagtaaattctccagagtcaccctgccttttaaggtacaaaatccaacattccagcgtatgtctgatcaacttcaaagcccatrttttatttttgggtgcccaattagatagaataaatatcacaaattaaaatgatcagagttcattttgaaaacctggattattaactaatgtttttatgagatggatgttattgaaatggagtggggaaataactaggatattaattacttatggacctcaatttttattaatcgatgcttgttctgtttacaaagataaggaatgaataaagtagtaaggtgactaatagttaatggccagaccataacttacc

SEQ ID NO: 691537 - DNA, 607 bp, Homo sapiens
taggaaaaaaaaaaaaaaaaagagagagacctggatggatgttaactgttcagacctactagttgtgaggccttctgaaattttctaacctcagagcttctgtttcctttaaagtccagagggagctggtgtttatttgccatctctacaaaaactggcactgggatatctgatttgtatgtgttattttatttcatcctcagcacagcctttcaagatggggattgtttttcctattttataggtaaagaaataagctcagaaaggttaagtaaattctccagagtcaccctgccttttaaggtacaaaatccaacattccagcgtatgtctgatcaacttcaaagcccatattttatttttgggtgcccaattagatagaataaatatcacaaattaaaatgatcagagttcattttgraaacctggattattaactaatgtttttatgagatggatgttattgaaatggagtggggaaataactaggatattaattacttatggacctcaatttttattaatcgatgcttgttctgtttacaaagataaggaatgaataaagtagtaaggtgactaatagttaatggccagaccataacttacc

SEQ ID NO: 691538 - DNA, 653 bp, Homo sapiens
ctgctcaggagtcacaggccagaggacacacatttgtgacttctctgattactcctagtattggtacttgaaattcagatttttgcattctggcattgagattcataactcaactggtcctgtcaccccctaaccagagacagactcagcacaagaggattgttttccacacccctatgattgtatctccaaccaatcagcagcacccattccctagttccctgcccaccaaattatccttgaaaatccctaacctccaagccttcagagaggctaatttgagtaataactctgtcttccgtgtggccagcctcmcatcagttaaaatctttctttactgcagtaccatggtgtcagtgagctggttttgtctgtgcagtgggcaagaagaacccctcaggcaattacactttgacttttttttgtattattttattttatttttattttaaatattgagatgggatctcactatgttgctcaggctcatcttgaactcctgagctcaagcagtccccccaccttggcctcccaaagtgttgagattataggcatgagccgccatgcctggacatgactttatctacaatagatttttgtattcattcaaataaaagcttgatagagacataacaaaatataaacaatgataa

SEQ ID NO: 691539 - DNA, 1192 bp, Homo sapiens
  misc_feature 3, 4, 5, 6, 7, 8, 9, 10, 11, 12, 13, 14, 15, 16, 17, 18,19, 20, 21, 22, 23, 24, 25, 26, 27, 28, 29, 30, 31, 32,33, 34, 35, 36, 37, 38, 39, 40, 41, 42, 43, 44, 45, 46,47, 48, 49, 50, 51, 52, 53, 54, 55, 56, 57, 58, 59, 60,61, 62: n = A,T,C or G
  misc_feature 63, 64, 65, 66, 67, 68, 69, 70, 71, 72, 73, 74, 75, 76, 77,78, 79, 80, 81, 82, 83, 84, 85, 86, 87, 88, 89, 90, 91,92, 93, 94, 95, 96, 97, 98, 99, 100, 101, 102: n = A,T,C or G
cannnnnnnnnnnnnnnnnnnnnnnnnnnnnnnnnnnnnnnnnnnnnnnnnnnnnnnnnnnnnnnnnnnnnnnnnnnnnnnnnnnnnnnnnnnnnnnnnnnncatcagataaaaataatacattgccctatggcaaaaagtacctattgcatgttctaatggtttttccccccatggcctttattccattttgcctttagagtatactctcaataggtaattgtggggggaaaagccagtcaagtatatttgcaaatattttctttactcttgactttatcttgccctttggtcaaactatttctgatgcatcatcaactccatgatgacactctttaggagaaaagaaacagagcttgcaaggcacttgactaaaaacggttgctaaacatgaaagcatgatagtgacaaattgccttaaaaccagagaaagagcagggtgtaaaggttcatcacaaagaaagcagagatgtaaaaataatgcagtataaaaatatcctctattgcagcatttcaaggaaatttgaaattgaaacaaaggtaaattttacaaagcctgtttttttagtttccactgcaagctaacattctcacagacttggtatttttgttgtggttgctttttaatgtgtgtgtgtgtgcacgtgtgcacgcaaactggaaagtttatggctaatgcctagcctgtctcttaactcattctaattatattcataatgaaattgaagaaaaatacttgactagagccaaatggcttgcacaggtgtctttttgtaagaatggtttagtgctagatgataaacaactggacctccatctccttaatttggcttaatgaaaagccctttataagtaaaactagaaggtgattcagaattaaaattgggccttgactcagaaattaattgagtggtaagacatcagctccattagaaaatgtggtgcttgtctttttgcctttcctgaaaacttttattttacttgcactcctttcttccatctacktaaggtcactttttcaaagcaataaactcttcaagctgagcaaccagccaggcagccttcatgagtcagcttccctagcatccttacttctactgaatagacctgcttttaaaaaatagataacaaaacgcaaaatttctcctcaaaacttggtggaaagcaattatcttcacctattcttctaata

SEQ ID NO: 691540 - DNA, 3242 bp, Homo sapiens
  misc_feature 2095, 2096, 2097, 2098, 2099, 2100, 2101, 2102, 2103, 2104,2105, 2106, 2107, 2108, 2109, 2110, 2111, 2112, 2113, 2114,2115, 2116, 2117, 2118, 2119, 2120, 2121, 2122, 2123, 2124,2125, 2126, 2127, 2128, 2129, 2130, 2131, 2132, 2133: n = A,T,C or G
  misc_feature 2134, 2135, 2136, 2137, 2138, 2139, 2140, 2141, 2142, 2143,2144, 2145, 2146, 2147, 2148, 2149, 2150, 2151, 2152, 2153,2154, 2155, 2156, 2157, 2158, 2159, 2160, 2161, 2162, 2163,2164, 2165, 2166, 2167, 2168, 2169, 2170, 2171, 2172: n = A,T,C or G
  misc_feature 2173, 2174, 2175, 2176, 2177, 2178, 2179, 2180, 2181, 2182,2183, 2184, 2185, 2186, 2187, 2188, 2189, 2190, 2191, 2192,2193, 2194: n = A,T,C or G
tgcacatgcaaaaacgtccaccttcagactttttactggtacatcgcggaggaaacttgagtgtcggtttaagtctgcgtaactgagaccatagctctgtggctttcactgcacttcccagtgctgagtagactgctgggattccacaaataaataataaaaataataatgatttttcaagcatttggaaatgctgagttgaaaggtgtggtgtaagtgcaatgttttattgtgagagtggtagctcacgcattatctgctcctaatggagggcggcagtaatggagagggaggcacttatgcctctagaccggggtccctgaaggcggggtggggctcggtcgggcactgtggtaacacttactgtacacaggaactgcttccttccagtctagcaagaaggtatgagaagagtcatgctgctgcttgttcccctaaaccttacaaagtcatcattgtttcattcccatagaggatgtgactgaaaaatcatactagaagaatactccagacttacaaatattaatttaagttttagtttggggctcaaataaatacatcattggtacggggcatgtcaacagcttggatgtgaatataccctttgtgtgtgatatgggctgagttatcccacctaaccccaccccaatttatatgataaggcaccagctaccgttagctcagaatgtgactgcatttggagactgggcctttaaaaaggtcattaagttaaaaataaggccattagggtggattttaatccaatttgactgatgtccttatagaaagaggaaatttagactcgcagagagacaccagggaaaaaaagcacaaaagtaaaaccacgtgaagggtaaaacagcaagaaggtggccatgtgcaagccaaggggagagacctcagaataaaacaaacctgctgatatcttgaccttggacttccagcctccagaagtgtgagaacataaatggctgctttttaagccgcctggtgtgtcgtattgtgttatggctgccctagcaaactaacacagtctgggattatccagacttcagattcacattgaacactgcagtataatatagaaaaaagatacacatttttaaaaaattcagtatagtctgaatgcttttccagctaactccataactttaattataaaacaaacgtaacctgtgtcaaattatgaatatgttaacatattgaatgaggacaagaaaaataagcaccagatttaggctccataggcatttgaaggtagagtaaaaaaaatctggtttccttgaccacattgtcataatatgcatatataacagtttattgaatccaggctgtgtagacaaccagaagaactctgtctccataccattacaatgcatgcccacaacaaagactcatggagaacagccccgttcattcgatctgtctgagccttaccaacatgagagctgaaaaccttacctctgtctaaagtatatctatgtagccatccataagttattaactggagtccctgggctctgctgctgaaaatattaatatattcaaatctcattctagctactgcaaaaaacagtacatcagataaatgcattaatatctttcttaaacaaaagaacctgaggttatttttttaaaagtttctttctttttccttggactcccactgaaatataggtgatatatggccgaataaggtaaagcggccatcaggtaccaaagtgcaggattgactgtatctataaaactctgtttattatacttgaaatacaacactctttcgtgtgaactgtaggctgagtactgttcatcacatccaatggcagaaatgttttctttttactttcttagacattttacccastggaaatgacatgtcctctaattgcagttgatgctacctctaccctatcaatattctcacctcatcctaagggctggctctcttgcatacaagtacagcctcagtggagttggaaggcaaagctttgctgagaaccagcaagccgagtggaaaggctggaagaggttagggcagtgatggacgggggtaactgagacttagccctttacatcactgctctgtgtctgtggnnnnnnnnnnnnnnnnnnnnnnnnnnnnnnnnnnnnnnnnnnnnnnnnnnnnnnnnnnnnnnnnnnnnnnnnnnnnnnnnnnnnnnnnnnnnnnnnnnnngctcacatttatagatctagatagtgaccagcctttgcgctacccaggtttgccttttgctattggctgcagttaaggccctttatcaatgacagcaaacaaagtaggtggtcttctacttctttcttgcagcaggaaaaaaatagtgacataatttttcacagcctgaaataattgtggaggtacagatacttggttaggttcactatgaattattagtggaaaagtgggtctcagaagtacgttacatgtgaaatatttttcgtcacttgaacatgtgccgtccagagctggccctgttctagccgtcacagggaacaaacatttcacattcacagatgctcccaatttggtgtggtttggagtgtaatttagatcaaacgtctccatgtaaatgagtcagggtttcttaattaggtgcctctaaagcaaaaccttggaccacatcagtaggtgtgggtgtggtacccacaatactggaatctttcctatagaccaggctctcagtatcattcaaataaagcttttttttttcttttttttttggttgtttttttcaggcagagtaataaatctgcagatggcatagacagaaagacgctactttagaagagctgtctaaaaacactgcctctttggcaaatgccttaaagtaggtcattctgctgtgatttagctttttctttaaaattgattgccagctttttgttcccattacaagtagggtgcattccagtccacagacttgttcttaatttttccaactggtatttgtttactaggatttgcagatcttcatatgaaaatggccaataccctgtcacagtgctaatcatgcacttgaccacaatgcgaaatggatcctggtgataatctggcaatgctgaaatattaaatgccttaaacacccagtcttcccacagcaaaactgcattgatttatatgggtaggtttgttgaaataattgtcccatcttttatacatgcacaaagaagaggtgacaggatgtaaatggaaaacttttacaagccatatagctgtttgtata

SEQ ID NO: 691541 - DNA, 3242 bp, Homo sapiens
  misc_feature 2095, 2096, 2097, 2098, 2099, 2100, 2101, 2102, 2103, 2104,2105, 2106, 2107, 2108, 2109, 2110, 2111, 2112, 2113, 2114,2115, 2116, 2117, 2118, 2119, 2120, 2121, 2122, 2123, 2124,2125, 2126, 2127, 2128, 2129, 2130, 2131, 2132, 2133: n = A,T,C or G
  misc_feature 2134, 2135, 2136, 2137, 2138, 2139, 2140, 2141, 2142, 2143,2144, 2145, 2146, 2147, 2148, 2149, 2150, 2151, 2152, 2153,2154, 2155, 2156, 2157, 2158, 2159, 2160, 2161, 2162, 2163,2164, 2165, 2166, 2167, 2168, 2169, 2170, 2171, 2172: n = A,T,C or G
  misc_feature 2173, 2174, 2175, 2176, 2177, 2178, 2179, 2180, 2181, 2182,2183, 2184, 2185, 2186, 2187, 2188, 2189, 2190, 2191, 2192,2193, 2194: n = A,T,C or G
tgcacatgcaaaaacgtccaccttcagactttttactggtacatcgcggaggaaacttgagtgtcggtttaagtctgcgtaactgagaccatagctctgtggctttcactgcacttcccagtgctgagtagactgctgggattccacaaataaataataaaaataataatgatttttcaagcatttggaaatgctgagttgaaaggtgtggtgtaagtgcaatgttttattgtgagagtggtagctcacgcattatctgctcctaatggagggcggcagtaatggagagggaggcacttatgcctctagaccggggtccctgaaggcggggtggggctcggtcgggcactgtggtaacacttactgtacacaggaactgcttccttccagtctagcaagaaggtatgagaagagtcatgctgctgcttgttcccctaaaccttacaaagtcatcattgtttcattcccatagaggatgtgactgaaaaatcatactagaagaatactccagacttacaaatattaatttaagttttagtttggggctcaaataaatacatcattggtacggggcatgtcaacagcttggatgtgaatataccctttgtgtgtgatatgggctgagttatcccacctaaccccaccccaatttatatgataaggcaccagctaccgttagctcagaatgtgactgcatttggagactgggcctttaaaaaggtcattaagttaaaaataaggccattagggtggattttaatccaatttgactgatgtccttatagaaagaggaaatttagactcgcagagagacaccagggaaaaaaagcacaaaagtaaaaccacgtgaagggtaaaacagcaagaaggtggccatgtgcaagccaaggggagagacctcagaataaaacaaacctgctgatatcttgaccttggacttccagcctccagaagtgtgagaacataaatggctgctttttaagccgcctggtgtgtcgtattgtgttatggctgccctagcaaactaacacagtctgggattatccagacttcagattcacattgaacactgcagtataatatagaaaaaagatacacatttttaaaaaattcagtatagtctgaatgcttttccagctaactccataactttaattataaaacaaacgtaacctgtgtcaaattatgaatatgttaacatattgaatgaggacaagaaaaataagcaccagatttaggctccataggcatttgaaggtagagtaaaaaaaatctggtttccttgaccacattgtcataatatgcatatataacagtttattgaatccaggctgtgtagacaaccagaagaactctgtctccataccattacaatgcatgcccacaacaaagactcatggagaacagccccgttcattcgatctgtctgagccttaccaacatgagagctgaaaaccttacctctgtctaaagtatatctatgtagccatccataagttattaactggagtccctgggctctgctgctgaaaatattaatatattcaaatctcattctagctactgcaaaaaacagtacatcagataaatgcattaatatctttcttaaacaaaagaacctgaggttatttttttaaaagtttctttctttttccttggactcccactgaaatataggtgatatatggccgaataaggtaaagcggccatcaggtaccaaagtgcaggattgactgtatctataaaactctgtttattatacttgaaatacaacactctttcgtgtgaactgtaggctgagtactgttcatcacatccaatggcagaaatgttttctttttactttcttagacattttacccactggaaatgacatgtcctctaattgcagttgatgctacctctaccctatcaatattctcacctcatcctaagggctggctctcttgcatacaagtacagcctcagtggagttggaaggcaaagctttgctgagaaccagcaagccgagtggaaaggctggaagaggttagggcagtgatggacgggggtaactgagacttagccctttacatcactgctctgtgtctgtggnnnnnnnnnnnnnnnnnnnnnnnnnnnnnnnnnnnnnnnnnnnnnnnnnnnnnnnnnnnnnnnnnnnnnnnnnnnnnnnnnnnnnnnnnnnnnnnnnnnngctcacatttatagatctagatagtgaccagcctttgcgctacccaggtttgccttttgctattggctgcagttaaggccctttatcaatgacagcaaacaaagtaggtggtcttctacttctttcttgcagcaggaaaaaaatagtgacataatttttcacagcctgaaataattgtggaggtacagatacttggttaggttcactatgaattattagtggaaaagtgggtctcagaagtacgttacatgtgaaatatttttcgtcacttgaacatgtgccgtccagagctggccctgttctagccgtcacagggaacaaacatttcacattcacagatgctcccaatttggtgtggtttggagtgtaatttagatcaaacgtctccatgtaaatgagtcagggtttcttaattaggtgcctctaaagcaaaaccttggaccacatcagtaggtgtgggtgtggtacccacaatactggaatctttcctatagaccaggctctcagtatcattcaaataaagcttttttttttcttttttttttggttgtttttttcaggcagagtaataaatctgcagatggcatagacagaaagacgctactttagaagagctgtctaaaaacactgcctctttggcaaatgccttaaagtaggtcattctgctgtgatttagctttttctttaaaattgattgccagctttttgttcccattacaagtagggtgcattccagtccacagacttgttcttaattwttccaactggtatttgtttactaggatttgcagatcttcatatgaaaatggccaataccctgtcacagtgctaatcatgcacttgaccacaatgcgaaatggatcctggtgataatctggcaatgctgaaatattaaatgccttaaacacccagtcttcccacagcaaaactgcattgatttatatgggtaggtttgttgaaataattgtcccatcttttatacatgcacaaagaagaggtgacaggatgtaaatggaaaacttttacaagccatatagctgtttgtata

SEQ ID NO: 691542 - DNA, 1153 bp, Homo sapiens
caatttttaattaagtaaaattaaatactccaaagtttttactatttaatttctgtttaaataaaaataagaaatcaggtggttataaaacaagagagaaatacatgaatggaactagttgatttaatttagcgttgtgcaaataaaacaaccatatgaaaaaaacagcaaggaaatcatggcctaacacagttccctagggaaaagaagcagaatagacaatggaaatgtrtaccattcattcattttttcattcattaaatcagttctgaatacttagtaaaaggcccagggctaggatcaaaaccaaaataaatagctttcgttgttgattttgaatttccatcttgccaggtacagccttgactcattgttgaaagtagttgtagagccagcaggttggatgccaaggagaagagaagaggtgtgctttatgtatgggttccatggagctccagtggcacaatcagttagtgcacggtccttacatgtatggattctctgcaatttgctacaagaaaaacaaataattactgcatcaaaatttccacattgagtttacctgcctatgtccaagccaacggcaagagaaatgccattcagaaaaagttctccatccagtagcatcattgatcaactcaccaaaatagtaataatactaatgatgaccacgatgatgattgtgatggtgatgttatgagtctttacctagtatttaaaagcaatgcacatgtatttacctgtgttatctctttctccctggcaaaaacctcagggtaggaagactattataatctccattttgtagacaaggaaactgaagataggataggttaaggaatttgttcaaggtcacaccagtataagtggaaggataagacctaaaagtattttttctatggtgttgctcccattttaaaattaaattgcttttggctccaaaataaatatcccaatttgtagatttttaaaattctatatccttatttgctctaccaaaggactctttgatggtcataataatcgctacaaatcagggttaaaactacatttctccccccagcgtacccccttttctgatctactcagcaaagcagctcagttttcatcctagaaaactagccttccccaacacctctcctggcagggaagc

SEQ ID NO: 691543 - DNA, 1153 bp, Homo sapiens
caatttttaattaagtaaaattaaatactccaaagtttttactatttaatttctgtttaaataaaaataagaaatcaggtggttataaaacaagagagaaatacatgaatggaactagttgatttaatttagcgttgtgcaaataaaacaaccatatgaaaaaaacagcaaggaaatcatggcctaacacagttccctagggaaaagaagcagaatagacaatggaaatgtgtaccattcattcattttttcattcattaaatcagttctgaatacttagtaaaaggcccagggctaggatcaaaaccaaaataaatagctttcgttgttgattttgaatttccatcttgccaggtacagccttgactcattgttgaaagtagttgtagagccagcaggttggatgccaaggagaagagaagaggtgtgctttatgtatgggttccatggagctccagtggcacaatcagttagtgcayggtccttacatgtatggattctctgcaatttgctacaagaaaaacaaataattactgcatcaaaatttccacattgagtttacctgcctatgtccaagccaacggcaagagaaatgccattcagaaaaagttctccatccagtagcatcattgatcaactcaccaaaatagtaataatactaatgatgaccacgatgatgattgtgatggtgatgttatgagtctttacctagtatttaaaagcaatgcacatgtatttacctgtgttatctctttctccctggcaaaaacctcagggtaggaagactattataatctccattttgtagacaaggaaactgaagataggataggttaaggaatttgttcaaggtcacaccagtataagtggaaggataagacctaaaagtattttttctatggtgttgctcccattttaaaattaaattgcttttggctccaaaataaatatcccaatttgtagatttttaaaattctatatccttatttgctctaccaaaggactctttgatggtcataataatcgctacaaatcagggttaaaactacatttctccccccagcgtacccccttttctgatctactcagcaaagcagctcagttttcatcctagaaaactagccttccccaacacctctcctggcagggaagc

SEQ ID NO: 691544 - DNA, 1990 bp, Homo sapiens
tgagactatttgttttctttcttctgagaaaagaaaaatacactgaaaacgaagacaaactattttctggcgaagtgctaactgctccagctgcagactgcctctgagttccgggaagtcattttgcaaaggctttggactcaggtggatgaaagcccctgaatagcccattagtagtttcagctttatcaggccgatcgcttgccataagtaaaagaaaaaagccagtgtggggacaaccatatcatcaggtgggagaggatcagaacccattctacaccacacattcagtgaagcgtgggtgcagcagtgagagagagattactgtagcaatttgcaaagcgtattcctcaggtgatattctatggtcgaaaagctttggcgcaataattctatgctatttctgcttgtggaaagtcgcaatatatttttrtcagttacaggccctaggaattcctgaaatgacatataccttttaaaaaacttggttttccccaaattcatctgactcctctttattttatagcacacgtattaacagtaacgggccttccacagaaaaatagtaccttgagctataagcccctctccaactcccaccccctggcccttgttttttttttttgttgtttttttttttttttttttggactttatttaatgagaggatgacctatggtagttctaatgcttcctagttctttatatgtctttttacatggaaaaggataataaaaatcatagtagttgcatgctaatggctattaacttctttttcccacttaatgttttcttactttctttacctgctataaaaatattctgtcaattcctctattttactaatttatgaagtgcctgctgtcagaagtgctggcccagagtgctgtcagaagtgctggcccattacctctagggctgaggggatcaatagcatagggaaaaccagcataccatggctcagcagttgggaaattccaccctgaggagctaacaggtatgcagcggttgaacccacctggctattgggaatgtgtgtgtgctgactctggagtcctctccactcaccatcgtttgttgtcttcacgtacctactttttccgagtgtgagatcagatgtgagcactatgattggtgccttttgtttcactgcccacccccacccaaaacactttacagggttctggtactgtatcattcaaatgactaccctcatttcctgttttaggtacatttcatttttcctgtcttggtttctataagaggcagcagaacagatgcaggagaactgggggatgatctaccagcaatccctgcaacatgtggaggattttcacttcctttcagtttggagcaggctgttctcagaggatcccttcaccttcccccaccccactgccctacttacttccaaagcagacagccagaatttgatttcactatcggagctacgcctgctgggaaaggggaaccaagtgggtggccactgttagggaaaagttatattcaaatgggctcatcggagctggtaggattccaggtgttttccagatagacatattaacgaataccacatttcttatttccattttgagatctctaggctcttttttccttattgtttcccagtagaatatattgtctccttttatttccttcaaaagtaatccatattcattgctcagaattaaaactatacaaacgagcaaaacaaaacaaaaattgctcataaagtcaccacccaaatagaatcatagttaacattataatgtgtttctcccaatcttttttcatgcattagcattcaaagtttgttttaaaacattgaaatatttgtgcataatgtatgataaacatcatctcccacctaaatatatatctcaattatctttagaagccatgaaatattcttctataatttctagaggctgtataacctctcttctgtgtgccacgtgatgtatttgatcccttcttttacataatccaa

SEQ ID NO: 691545 - DNA, 1990 bp, Homo sapiens
tgagactatttgttttctttcttctgagaaaagaaaaatacactgaaaacgaagacaaactattttctggcgaagtgctaactgctccagctgcagactgcctctgagttccgggaagtcattttgcaaaggctttggactcaggtggatgaaagcccctgaatagcccattagtagtttcagctttatcaggccgatcgcttgccataagtaaaagaaaaaagccagtgtggggacaaccatatcatcaggtgggagaggatcagaacccattctacaccacacattcagtgaagcgtgggtgcagcagtgagagagagattactgtagcaatttgcaaagcgtattcctcaggtgatattctatggtcgaaaagctttggcgcaataattctatgctatttctgcttgtggaaagtcgcaatatatttttatcagttacaggccctaggaattcctgaaatgacatataccttttaaaaaacttggttttccccaaattcatctgactcctctttattttatagcacacgtattaacagtaacgggccttccacagaaaaatagtaccttgagctataagcccctctccaactcccaccccctggcccttgttttttttttttgttgtttttttttttttttttttggactttatttaatgagaggatgacctatggtagttctaatgcttcctagttctttatatgtctttttacatggaaaaggataataaaaatcatagtagttgcatgctratggctattaacttctttttcccacttaatgttttcttactttctttacctgctataaaaatattctgtcaattcctctattttactaatttatgaagtgcctgctgtcagaagtgctggcccagagtgctgtcagaagtgctggcccattacctctagggctgaggggatcaatagcatagggaaaaccagcataccatggctcagcagttgggaaattccaccctgaggagctaacaggtatgcagcggttgaacccacctggctattgggaatgtgtgtgtgctgactctggagtcctctccactcaccatcgtttgttgtcttcacgtacctactttttccgagtgtgagatcagatgtgagcactatgattggtgccttttgtttcactgcccacccccacccaaaacactttacagggttctggtactgtatcattcaaatgactaccctcatttcctgttttaggtacatttcatttttcctgtcttggtttctataagaggcagcagaacagatgcaggagaactgggggatgatctaccagcaatccctgcaacatgtggaggattttcacttcctttcagtttggagcaggctgttctcagaggatcccttcaccttcccccaccccactgccctacttacttccaaagcagacagccagaatttgatttcactatcggagctacgcctgctgggaaaggggaaccaagtgggtggccactgttagggaaaagttatattcaaatgggctcatcggagctggtaggattccaggtgttttccagatagacatattaacgaataccacatttcttatttccattttgagatctctaggctcttttttccttattgtttcccagtagaatatattgtctccttttatttccttcaaaagtaatccatattcattgctcagaattaaaactatacaaacgagcaaaacaaaacaaaaattgctcataaagtcaccacccaaatagaatcatagttaacattataatgtgtttctcccaatcttttttcatgcattagcattcaaagtttgttttaaaacattgaaatatttgtgcataatgtatgataaacatcatctcccacctaaatatatatctcaattatctttagaagccatgaaatattcttctataatttctagaggctgtataacctctcttctgtgtgccacgtgatgtatttgatcccttcttttacataatccaa

SEQ ID NO: 691546 - DNA, 634 bp, Homo sapiens
gctgttgttcagaagctttctgatatgttcattcaccttcctgccttattaatcagagtaaacatgatgaactgtatatttctatgtaacatcatataccatactaattttcacttgcgttctcaatataatttatctttttgggaattgggcattgaactacattaagtagtttcagtatctccccttgaatatgttgagggaatcttttgaaatcaactttgtactgtcatttcattttcttttcgtatacagctaagatttattgagtgcttactgtgagccagacaatgtgataagtgttttaagtgaatgatctattttaatgctttttaaaaatcaacaytgacttagtaatagtgttttccctttattaaagatgaagaaactgagttcagaaaagtgaactgacttaccaaggttactcaaccagtaagtgttgaaatcataactaaactgtagctgtgtttgaccacacagccttgcttacaactcacaaaagacttgagttccattcccagctttgaactttatagaccaagtaattcttgacctccccaggcatcttcatccttatttataaaatgaaggtaatagtgcctcccttccaaagttggggtactaagacttgtga

SEQ ID NO: 691547 - DNA, 538 bp, Homo sapiens
tagatctcaaggttggaaagagtcttaacaggcatcaggctcaattctaatatttctgaagttaggctgtgtaatgagctgttggcacaagaccaatgtcatttcattaaatcatatgccacataatcaccacaaagatttatacagtgtttcccatttgtgccagacaccattctaagtsaattgctggtatagtaatattatataggtattttagttgattttctgttgctataactaaacacctgagactgagtactttataaagaaaataaatttacttcttaaaattcttgagggtgagatttccaagagcttagagctatcatctggtgagggccttcttgctgtgtcacaacatggtagagggcatcacatggtgagaggtcaagagcacacatgccagctctggcctctcttcttctccttataaaaccaccagtcccatcatgggagcctcaacctgatgactttatctaatcctaattaactcccaaaggcccctctgccatcaacatatgatttgggggattaagtt

SEQ ID NO: 691548 - DNA, 2083 bp, Homo sapiens
tttaatagtatatcaggagatttgtaaagtgaaatatcttaaagttttcacatctggcaaggaacctggtacggtttacagagttataatagacaagagttatcaaaatgcagacttgctgaccctcttcattgtattgggccaaaaaataaatgcaaaaccagaacagagtaagcattaactagtatttctcattctgtgcattgcactttttcctggatgtatcttttcttttcttttctttttttagagaaatgcaaagactgggaccccagctccagccttttcctcttactgtcccacagctcagttccttcttttctttcacccagatccccctcactcactagctcccacgcttctgtttgctctctgtggtggtcctcctgcttgaggttatcaagtgactgtgcacacagctggaaacctctttccccgcctccagacccccagactccccagatcagagttcccagatcacctctgggaatccccagggcaaggaggatggttttctttccctcttttttccttttgaggatgtgcctctacttataagaaaaatgcctctaggccgaacagaggcctgcaggaatttgcttttaaagaaaagagaaaacagtaagacaagagggaagttctttactggcagcatttctcctctgggcaaacagctccagtttgaagttyccagggcagaaccacagggctgagtttaaggcaccattacatattcaactatggacagaaagtcagatagaaaatttgctgggatttgggatggtctcattcactgaaatttttttttcagtgtttttacctagtgtttgctaatttttacctagtgtttgccaaaatctaacatacgaaaacttgtttttgtttgatgataatcagaaaggattgggtttcttttgcatgcacagaggcccttattcccagttggagttagcttcaggcaaaacagaaaaaggagaaaaaaacctcagccgtggatagccaattatctcaggtctctaacaagaattgttttactgtcatttccttgtcaattgctttgttaaaaaaaagggggggggcaggtgggggggtggtggtggattcatttaattacttaaactttatagtgaagagatgaagacattttttatctttgctgaatcaatggattctagtggtcttccagggactgaagaaatactcaaagtccaacttttcgtcttgccattttttcaggggaacttttgaaacaattttattcccagtttacaaattggagattcttaagaaatcggtatatggtcaggttgtttgaactgactttaatcaaagagttcaaagtcccctgttccaaggcctagatttgttgtttttacattaattgtgtgtgtttgtcatttctgggtcaaagaaaatttttctctaaaccaaatactttcatgtaagacaagggcagttggacatcaaaatatgtattcccccaggaacttctatcaaactatttcttttgataacattctgcctgacatgttcagtgcacccattacatcaaagctgattctgtcttaaaaaaaaaaaaaaaagaaaaagctctttaattttgtttttcttagaaaatgcatgtttcagttttctctccatgtatatctttaaaaccgttgatgtactttcaaaagaggattttcaataaccttgagtagagatgtagaatgcacacttcttattttgaacaacatagaaactggcagatttaggaaaaattgttagatgaggtcactttggggcagttctataaaatgcttaaggctgacctcagtggtcatgagcaggatgaaggccttcaaattatgttctcttcttggatggtgataggttgacacagtgcttagtttacaccatcttttctattatcatttccaaactgctgggttctgactttctgatggacctgagccatcatagggtgtctcctgttgcccaggagatggatagctgagattaggagcaaatgactgtcttggaagcatccataaactgattaaaaatgttatcattgatggatacacattatagaagaaaaata

SEQ ID NO: 691549 - DNA, 2083 bp, Homo sapiens
tttaatagtatatcaggagatttgtaaagtgaaatatcttaaagttttcacatctggcaaggaacctggtacggtttacagagttataatagacaagagttatcaaaatgcagacttgctgaccctcttcattgtattgggccaaaaaataaatgcaaaaccagaacagagtaagcattaactagtatttctcattctgtgcattgcactttttcctggatgtatcttttcttttcttttctttttttagagaaatgcaaagactgggaccccagctccagccttttcctcttactgtcccacagctcagttccttcttttctttcacccagatccccctcactcactagctcccacgcttctgtttgctctctgtggtggtcctcctgcttgaggttatcaagtgactgtgcacacagctggaaacctctttccccgcctccagacccccagactccccagatcagagttcccagatcacctctgggaatccccagggcaaggaggatggttttctttccctcttttttccttttgaggatgtgcctctacttataagaaaaatgcctctaggccgaacagaggcctgcaggaatttgcttttaaagaaaagagaaaacagtaagacaagagggaagttctttactggcagcatttctcctctgggcaaacagctccagtttgaagttcccagggcagaaccacagggctgagtttaaggcaccattacatattcaactatggacagaaagtcagatagaaaatttgctgggatttgggatggtctcattcactgaaatttttttttcagtgtttttacctagtgtttgctaatttttacctagtgtttgccaaaatctaacatacgaaaacttgtttttgtttgatgataatcagaaaggattgggtttcttttgcatgcacagaggcccttattcccagttggagttagcttcaggcaaaacagaaaaaggagaaaaaaacctcagccgtggatagccaattatctcaggtctctaacaagaattgttttactgtcatttccttgtcaattgctttgttaaaaaaaagggggggggcaggtgggggggtggtggtggattcatttaattacttaaactttatagtgaagagatgaagacattttttatctttgctgaatcaatggattctagtggtcttccagggactgaagaaatactcaaagtccaacttttcgtcttgccattttttcaggggaacttttgaaacaattttattcccagtttacaaattggagattcttaagaaatcggtatatggtcaggttgtttgaactgactttaatcaaagagttcaaagtcccctgttccaaggccwagatttgttgtttttacattaattgtgtgtgtttgtcatttctgggtcaaagaaaatttttctctaaaccaaatactttcatgtaagacaagggcagttggacatcaaaatatgtattcccccaggaacttctatcaaactatttcttttgataacattctgcctgacatgttcagtgcacccattacatcaaagctgattctgtcttaaaaaaaaaaaaaaaagaaaaagctctttaattttgtttttcttagaaaatgcatgtttcagttttctctccatgtatatctttaaaaccgttgatgtactttcaaaagaggattttcaataaccttgagtagagatgtagaatgcacacttcttattttgaacaacatagaaactggcagatttaggaaaaattgttagatgaggtcactttggggcagttctataaaatgcttaaggctgacctcagtggtcatgagcaggatgaaggccttcaaattatgttctcttcttggatggtgataggttgacacagtgcttagtttacaccatcttttctattatcatttccaaactgctgggttctgactttctgatggacctgagccatcatagggtgtctcctgttgcccaggagatggatagctgagattaggagcaaatgactgtcttggaagcatccataaactgattaaaaatgttatcattgatggatacacattatagaagaaaaata

SEQ ID NO: 691550 - DNA, 1182 bp, Homo sapiens
cttcctgtgttttccttttttctcttccttcctttttcccatcctctcttgatttctctctccctccttctcttccctctctttctcttccttctttccttccttcctccctccctctcttactttctttctcccttcctgtttttttttaattttcccttctttctttctttgtttcatttctaaacttaattttgtcattctcaagtttcttactttgatttatttctgcacagctggactaaaccttgaatatttttaatagcacagtcagaaaaagcaaatgggcacttgtacccagtgataaaattccagagacagcattatasaaggagtcaaacagtgttattgcataaaaagtgccatatttcaagaaagtgacaatactgtgctctggaaattggttttggatgacttgaatcttgtcttcagtgatgataaaagcaatgatgttgactataaatttgaacaattgcaataaaatagattcacaaaatatgagttgaaataacaatttttaaaattcaaatactactttacataaaacattgtcttacacaagagttcatatcatattattatgagaatacatttgcatattttaaacatacctattaaaacataaaatatcagatttgccaaaaatttatttttgtatattcttattgaataaaatgctgtcagtctttatttagggaaataagatattgactattcaatttcaacgacccagtgagttacagtcttacctatacagatgaaaaaactaaagcttagaaagtttaagctcagtgtcacacagctaggacagaggaaaggagggatttgaatccatttataatttatgcccaagacactcttaagacaccttagacttagttataccaatgcctccctttagggaactagtgttaaaatctgagctaaggatgggaatggccaggtaaacaggagttcatgtttacctaacagtgatgtacaacctaatagtacattcttaggttgaaggttattgtagagattctggaaaacaagggaaatactctaaagcactaaagtaagagataaaaggttgcaatgaactgaatgcttatttcccccccagtatcagctatagcaattctaacccccagtgtgatggtattttgcagcagggcctttaggaggtaacaggtcatgagg

SEQ ID NO: 691551 - DNA, 792 bp, Homo sapiens
gtggcatgatctcggctcactacaacctttgcctcccgggttcaagggattcttttgcctcaacctcccgagtagccgggactacaggcgtgcaccaccacacccggcttttttttttatttttagtagagacagggtttcaccatgttagccaggatgggctcgatctcctgacctcatgatccgcctgccttggcctcccaaagtgctgggattacaggcctgagccactgtgcccagtggagaacagcatcttttatgtgtctgaaaatttctctcattttgctcatgtttacaargagagatttcggctggttttgtgtcgattgtgtcggttaaaatgaatcctgtcagtgaggcttcctgtctgatttttacagatccaaatgaagggataaagaaaaagttttaatttactctagatcctcttaactatttatgagattcagcaagtatatggtggggactaaaaagtgaactaatcctataatttcctctaggccaagtcatttctttgccattttgttgagcctctcaggggtcctcctacataattctctattcctgactattgttgtagagtttttatctttgtggcctctgggatcagaagtgccaccacatccacagggatccttgacagtgacacagtcccgctcaacttctctacttgactttctgacttggtaggagaggttctgttaagttctttcacatttttcccagaacacaatgctatctcatcatataaaaggagtttctacccacttttccgtttaagtgagtttatgc

SEQ ID NO: 691552 - DNA, 1228 bp, Homo sapiens
ttatttgatgctttcctgttcttcaatcacttttttttttaagatgatattttgctcttgaagcccaggctggagtccaatggcatgatctcggctcactgaaaactccctctcctgagttcaagagattctcctgcctcagcctcccaaatagctggaattacaggcacccggcaccaagcctagctactttttttgtatttttagtagagacagggtttcactatgttgggcaggctggtctctaactcctgaccttaggtgatctgcccaccttggcctcccaaagtgctgggattacaggtgtgagccaccacgcccagccagaatattttttaaataaacaaagcatatttaaggagcacaacttccctaccagttgggtatctgagtctgaggtaactgctgacattattcaaagataaaaatcactgaatgtcccttagagacagagtcatgattacagcttagtaatgtggcttctcttttgattccatggcctcctctgttgcacaacactgttctgggggttcccatcatcttctaatgccatcttagccagtttgatttcttttttttttttttgtgaaaagaaactagcccctattaacaggaactaacagataaaaagttgctcagggatctaagacatacacttcacataggcagttttctcgctgtctgttatcagcatcagtgtttaaatgttcaccatgctatgcacctagctacttttgactctgtcattaactcagcaaatatttgttggttttaaactattttccaagcagctatgtcccactatgcttaatgtgtggaataaaaagggatattaccccttacgaagcttgatgtctagtaggagaatgaaacacttaaataaagtcctacataatgggacttgccctatgaagacagataggaggagaaacatttaaataagtcccctcaggggtgcaccggaaataaactaagccaagatatgaaagtcmgtcatgaagaaagtattagagatacattcttggcagaaagacaaacgtgagagaaaatctgaaagtaagagcatcttgggacagtggggaatctgaaaacagagcactgtggtttgtctaatcggaggaagagaaaaggctggaatagaaataggttggagtaacaggcagggatcagaccccagagaatttgggtgccctttataaggagctagaatttttattcaaaatgaaat

SEQ ID NO: 691553 - DNA, 1228 bp, Homo sapiens
ttatttgatgctttcctgttcttcaatcacttttttttttaagatgatattttgctcttgaagcccaggctggagtccaatggcatgatctcggctcactgaaaactccctctcctgagttcaagagattctcctgcctcagcctcccaaatagctggaattacaggcacccggcaccaagcctagctactttttttgtatttttagtagagacagggtttcactatgttgggcaggctggtctctaactcctgaccttaggtgatctgcccaccttggcctcccaaagtgctgggattacaggtgtgagccaccacgcccagccagaatattttttaaataaacaaagcatatttaaggagcacaacttccctaccagttgggtatctgagtctgaggtaactgctgacattattcaaagataaaaatcactgaatgtcccttagagacagagtcatgattacagcttagtaatgtggcttctcttttgattccatggcctcctctgttgcacaacactgttctgggggttcccatcatcttctaatgccatcttagccagtttgatttcttttttttttttttgtgaaaagaaactagcccctattaacaggaactaacagataaaaagttgctcagggatctaagacatacacttcacataggcagttttctcgctgtctgttatcagcatcagtgtttaaatgttcaccatgctatgcacctagctacttttgactctgtcattaactcagcaaatatttgttggttttaaactattttccaagcagctatgtcccactatgcttaatgtgtggaataaaaagggatattaccccttacgaagcttgatgtctagtaggagaatgaaacacttaaataaagtcctacataatgggacttgccctatgaagacagataggaggagaaacatttaaataagtcccctcaggggtgcaccggaaataaactaagccaagatatgaaagtccgtcatgaagaaagtatkagagatacattcttggcagaaagacaaacgtgagagaaaatctgaaagtaagagcatcttgggacagtggggaatctgaaaacagagcactgtggtttgtctaatcggaggaagagaaaaggctggaatagaaataggttggagtaacaggcagggatcagaccccagagaatttgggtgccctttataaggagctagaatttttattcaaaatgaaat

SEQ ID NO: 691554 - DNA, 261 bp, Homo sapiens
ttagggttttgtttttaacagtgctatctggcaattcctatgtatgtgtccacgtaggaaaattaaggctactcccttgcagttgttagatattttcatgtgaattaaagacattttcatgacattggttaaatcatgaaaaagtttttctttagattcctctcatttcataattagttttmagttattatgcttactatttagatggtctatgtaaagttgaatatcaattcttcatttacaaaaaatattttcatattc

SEQ ID NO: 691555 - DNA, 591 bp, Homo sapiens
agaaatactaggataataacatttacaagccatgcttttaaaaaaaaaatttgccatccaaatcagttacatagtcctctgccactcttcactcttgaatatttttccagaaaaagaaaatgtcttccaatgttctagatgcctctgagcaagacagacctccccattaacaataagtgcagaaaccctgtaatttctgcaaaagggagattaccctccaggctacagatgggcttggggacctgactgagatggtttgcagcacagggcataccagatgttttcaagaaaagctgggaaagataattcagcattgatttagaagagcacctttcaaatgtgtccacctgtaatggtaatacatgtattttacataatgacccagtatataagaaatgtgtgtgtgtgtgtgtgtgtgtgtgtgtgtgtgtrtgtgtacttgaaactaaatttacaagagaaagtttcacaatccattaataggtcatgaaatcaattccacatgtgtcttttttaaaaaattagcatttttaaaaaaagtatagaaaagaaaatgttagtttttattttacacattaaaggtaaatattg

SEQ ID NO: 691556 - DNA, 641 bp, Homo sapiens
atataatctttgtgtaatctgtcttataaacctatgacctttgcagatatctagcataattttctgaatattatacaattttcaaaattcatttatgtttctttgacattaatactatttaagtagccactactaagaaataatttttcattatttgttaatagtgacagctgcatgcagcactttagtctcragctgcagtttggcatatattagcaacagagaaatatgagcagctctcacgaatccaggatattgcctatctcctattcatacacccccaacttaagcaaagattatctccacaagccttcaggaaaagccacatggttctggaaattgctcaatactgatgaagacaccctgtgttgttgctcatgtttaaattaaattttaaaatcaggcttcagattaggaacaaggaatcaggatagtaatgagacaattttaaataaaaaataaagatgtaagagttcctggcattgataattaagaaaacctatatgggaagatcaaagtatcctcctttctacaaactgatttagggcccattattttaggttccttttcttgaagccacctgccccaatatgttgtttatatttctatcaggttgcaaaatattgagacttaaaattcta

SEQ ID NO: 691557 - DNA, 641 bp, Homo sapiens
atataatctttgtgtaatctgtcttataaacctatgacctttgcagatatctagcataattttctgaatattatacaattttcaaaattcatttatgtttctttgacattaatactatttaagtagccactactaagaaataatttttcattatttgttaatagtgacagctgcatgcagcactttagtctcaagctgcagtttggcatatattagcaacagagaaatatgagcagctctcacgaatccaggatattgcctatctcctattcatacacccccaacttaagcaaagattatctccacaagccttcaggaaaagccacatggttctggaaattgctcaatactgatgaagacaccctgtgttgttgctcatgtttaaattaaattttaaaatcaggcttcagattaggaacaaggaatcaggatagtaatgagacaattttaaataaaaaataaagatgtaagwgttcctggcattgataattaagaaaacctatatgggaagatcaaagtatcctcctttctacaaactgatttagggcccattattttaggttccttttcttgaagccacctgccccaatatgttgtttatatttctatcaggttgcaaaatattgagacttaaaattcta

SEQ ID NO: 691558 - DNA, 2346 bp, Homo sapiens
tggaataaacagattaaaaatttaagcattttttttttaaagtagtctgattgaaagcctgaggaagggagaatgaaagtgcataaaccactgggttagacagaaaagtcatctcaaactcattcttattgggtcagaagcttccaagggagccttcgttgcactaattatctccctgtgattacttaggtgtgtttctttgttcctgtgtttaagagtgtaggtttacgtcacatcctgttatcaatcattattatagctcataatagtcacaatgggaaatttggtttatgaaacaaggcctttaccctaattagcaatcaggtgagcaaagctagctttgggcttaaaaatgctgtgtatccatatactatcagccaaactctacttattatctggcgatcaagaatagcatataatggaatactttcccacctttggcaaaggcactggaaaatctggggactatatgccartagacctaaatgctggaagggcatctccagagtttgaatagttttaagagctgtgataaattcactttaatgggcgtcaccaaggctttaagtggagagaaggttcataaaggttagtcaatccaaatcaatgatttttagaagtggataaaaattactgcatgtcacatctggggacagtgaagtgtttgtgagattgttaagcaactcacattacagacacataccaggattttgattcagtagatcagcaatctctattccgagttcacttaaatccccatgaatttatgatcaggaacatctttcatttattcacacattcattcattcagcagccatttttggaaagcccgtgatgggtaaggcattgtactcagggtggagaatacagagaaaaaagggacaagccatcttcacattcaagaaactcaccattctcagtgacccatgacttgaatattgttgagtaacactacacatttgaagtatatctattttgataagaaatgggatggggaagggagacagctacatttgctatggtgaattttttagaatgccagcaataggggaagctgctgcctccagcaggcttcattgacctcatttaataactattcctttgtttccacagttccccgcttctcctttgttggcttttggaaagtgggatgaacattgttctctcagatgtgtatttcagcttcccctagtcccacctttttgtctctttaaaaatatgctctattttactttgaaagcagagatgctgaaggagttagagaagtgacatgaaaagcttttaaggaaagaaatttcaaaaatgtattggcagcaatgactcttacctactttaccttgacaaaacaaaataaaacaaaaccccaaaacaacaacaaaaaatcatgccaacattctgtaaagcagttagctctctgatcaacaatacagaattggtgacagtccccaatagcagaggaaactgcttgtgtctctgagtcgcagacctgtgctaggtaaccctgaccactctgctacagcagaagtgcatgaaaaaaacaaaacaaaaccaaacaaaacaaaaaaacaggaaaaaaaaaccgattttcccccagcccttcacattgagattgaccatcttaagtgctttaccctcagagtaacagagcttgaactgtcttttcattaactatccaaattatttagatagtagagaaattgcacttcagaagtgtaaatcagctttctaaggttgttattgtagtaaggtttacgtgctcttcagcattaaggcatcaaggtaggcattgaagagaccgatggaatgaatgataattgtacctcagctgcgttagatacagctgaggccaggcacaccaaggtaatctgagtattctgtgacttcattgggcaaaaagctatacaattatttttaatttattaagaagaaatggacgattaaatataaacaaattcttactctgcttacgcaatcagaagtatatttaatattaagcttaaatattagtagacctaggaacaatgggattctgttgctttataattctcatttgttactgtacaaacaataagtccttgtattttacttgcatggaaaaaagagtaaaagaaaataacaggtatatgtagaatttttcttttttataaaaagaaacaataacttccaaggtattgtttggtatccacactgaatagatctaatcttagttctccttttataatactaaacattaaataacttattcttaatagaagtaaaacgtcatttttatacaggattaactctgtgcacatgctcctacatagtatacaacataattaatgatttgtacgctgcaaacatacg

SEQ ID NO: 691559 - DNA, 2346 bp, Homo sapiens
tggaataaacagattaaaaatttaagcattttttttttaaagtagtctgattgaaagcctgaggaagggagaatgaaagtgcataaaccactgggttagacagaaaagtcatctcaaactcattcttattgggtcagaagcttccaagggagccttcgttgcactaattatctccctgtgattacttaggtgtgtttctttgttcctgtgtttaagagtgtaggtttacgtcacatcctgttatcaatcattattatagctcataatagtcacaatgggaaatttggtttatgaaacaaggcctttaccctaattagcaatcaggtgagcaaagctagctttgggcttaaaaatgctgtgtatccatatactatcagccaaactctacttattatctggcgatcaagaatagcatataatggaatactttcccacctttggcaaaggcactggaaaatctggggactatatgccagtagacctaaatgctggaagggcatctccagagtttgaatagttttaagagctgtgataaattcactttaatgggcgtcaccaaggctttaagtggagagaaggttcataaaggttagtcaatccaaatcaatgatttttagaagtggataaaaattactgcatgtcacatctggggacagtgaagtgtttgtgagattgttaagcaactcacattacagacacataccaggattttgattcagtagatcagcaatctctattccgagttcacttaaatccccatgaatttatgatcaggaacatctttcatttattcacacattcattcattcagcagccatttttggaaagcccgtgatgggtaaggcattgtactcagggtggagaatacagagaaaaaagggacaagccatcttcacattcaagaaactcaccattctcagtgacccatgacttgaatattgttgagtaacactacacatttgaagtatatctattttgataagaaatgggatggggaagggagacagctacatttgctatggtgaattttttagaatgccagcaataggggaagctgctgcctccagcaggcttcattgacctcatttaataactattcctttgtttccacagttccccgcttctcctttgttggcttttggaaagtgggatgaacattgttctctcagatgtgtatttcagcttcccctagtcccacctttttgtctctttaaaaatatgctctattttactttgaaagcagagatgctgaaggagttagagaagtgacatgaaaagcttttaaggaaagaaatttcaaaaatgtattggcagcaatgactcttacctactttaccttgacaaaacaaaataaaacaaaaccccaaaacaacaacaaaaaatcatgccaacattctgtaaagcagttagctctctgatcaacaatacagaattggtgacagtccccaatagcagaggaaactgcttgtgtctctgagtcgcagacctgtgctaggtaaccctgaccactctgctacagcagaagtgcatgaaaaaaacaaaacamaaccaaacaaaacaaaaaaacaggaaaaaaaaaccgattttcccccagcccttcacattgagattgaccatcttaagtgctttaccctcagagtaacagagcttgaactgtcttttcattaactatccaaattatttagatagtagagaaattgcacttcagaagtgtaaatcagctttctaaggttgttattgtagtaaggtttacgtgctcttcagcattaaggcatcaaggtaggcattgaagagaccgatggaatgaatgataattgtacctcagctgcgttagatacagctgaggccaggcacaccaaggtaatctgagtattctgtgacttcattgggcaaaaagctatacaattatttttaatttattaagaagaaatggacgattaaatataaacaaattcttactctgcttacgcaatcagaagtatatttaatattaagcttaaatattagtagacctaggaacaatgggattctgttgctttataattctcatttgttactgtacaaacaataagtccttgtattttacttgcatggaaaaaagagtaaaagaaaataacaggtatatgtagaatttttcttttttataaaaagaaacaataacttccaaggtattgtttggtatccacactgaatagatctaatcttagttctccttttataatactaaacattaaataacttattcttaatagaagtaaaacgtcatttttatacaggattaactctgtgcacatgctcctacatagtatacaacataattaatgatttgtacgctgcaaacatacg

SEQ ID NO: 691560 - DNA, 3205 bp, Homo sapiens
tgcatgttaaacgtgaactttctcgggttctctgggccttttggaaagtcaagctcttcattgttaaccacccctgaattaccttaattcacctttgtgagttgccctgtgaaagctgcctgtcattaatttgattccaaatactagaatgaactctgtgaataggcacagtctaaatcttccacccacagatcatgattcagactgtaaaatggattaaccaaagaaacccacacatttgcattatccacttacatacctccaatttatgagattaataatcacaacacatatttagcactcaaggcattcagtattactcagtgggatcccaagaaggaacactggttcctcagcttttaagttgagtgtcctcattggtctaaatatctgaaatggttagtgttgtttcaagttgccagataagccacatgtgcttcttggaaacatctacaaataatatcaaaccagttgtcactgacttcagtgatataagaagagcccaacctgagcagaaattcctaaaaaataacatcagcaaatctggcatcacacaaaggccttaaagattatttgtataaaatttgtgaagccaaggattgaggatgttgtccatagaaactgcacccaagtcaccttctcaccccttatttcacagtgatgtaaactagattcaaaatagtcaaacaatgaagagcccaaggtgttttcctaaagtcttgctacttagggtgtggttggtaggtctgcagtatggcatcacctgggagcccatcagaagtgcaacatctaacaaaaccagaacctgccttgtaacaatctccagtaatccatatgcacattaaagttggagaagcatgttctaaagcatttgttctgaaaatgtgggctgcagaccaccttacccagcaccacctgtgttgctttttaaaaattcctattttattcaccatctgggtcccatttagatctcattcatcaaaatttctgagggtgatgcccaataattagcatttttgaaaagtactgaaggttcttgacactcaaaatgtggtccaaagatggacaggatcagcrttacttggagcttgatggaaatccagactctcaggcccagcctccaacctgccaaatcaggacttgcattttagcaagaaccccaggtgattcctatgcacattacatctggaaattctatgtgcataggtgaatcttatgcatactaaaaagtacttttctaagctacataatattgttatatgaatcggaaaaatgaaacaaaaactttgtgatgttcagtctcctgtatcttcaaatggaaaaaaaaaagaaaagaaaagaaacacactcaacaactaggcccactcttaacaattgcagggcctcagacacagacaatttaggcccatataccattggtataagtatttaaaggttttaaatcaggcaaaacaactatacaataaaatattctctgtcctcctggaagaccaggttttaaacttttagactccttggtctccagtgcaagaatgtggtagagcagagaaagccatccccagcccttggctgcattctgcttcatttccctttgcagccccagctctgacccacccatgaggcctcaagtacactttctgggacatacaacctacaccttggcgatgcctgggctcagctagaggcttggactctgacaacatggtctttgtccaggagaacagatccagtaaagaggcttgtgcatgccttggaagctggcacaatgtctttcaggaaggcaatttcagcttcaggtactccaagtattcttagaagacatatgcggccgggcacggtggctcatgcctgtaatcccagcactttgggaggccaaggcgggaggatcacgaggtcaggagatcaagaccatcctggctaacacggtgaaaccccgtctctactaaaaatacaaaaaaaaattagccgtgcgtggtggcaggcacctgtagtctgagctacttgggaggctgaggcagtagaatgtggtgaacccggaaggtggagcttgcagtgagccgagatcacacaccactgcactccagcctgggcgacagagcaagactccgtctcaaaaaaaaaaaaaaaaaaagaagaagagaagacatatgctttgggtggcatgtcccctttgcacgcagacagctaaacctgtggggaaggagtagactaggaaatggtatggagccagatgggggctcctcttcctttagtcggagggggtggtgccgctaactggatgtggtgactttgctgctgaccttcctataccagaaggccacatggaatctggctaaaagaatggaatctgaagtaatgcttatctagtttcatatcttagatctaacacttactctctgtgactatgagcgaaagtcactactctcagttttgttggtcagtagatgaggtaatagtgagaagacattataggattattgtgagaattaaaatatgcatttagaacaattagcacaatgcttacaacatgtaaactcaatgaatgccagatattaccataatagatttttattcttcccaacaccactacttaggcatgggtcatactgacaaaagcattttaatatttataaatcaccatttgtgatcattcatgttttcaatcaagaaggcaactttcttcataagtaatgaatggggcattaggaaatttttaagtagaaagaaaaatcatgtttttaaggctgattgtttccgtagttgtgagaaaatggtctgatatgaatacaaactagtgccgaggaaagcaattaggagatgaagaagaatcaaaaactgagttcgttagtgggacagtaaatacagggaggagcccaattctggaaatgtgactagaatggaaactaaaagagtagtaccttggaatctgcagaaggaggaagtagataatttaaagaaggaggtaaaagaccacagagtgctgaagagaagttgagtacaatgaggaatgaaaaactaacctttgaactttgcaataaggaggtaactggtgacattaccatcaaccgttgcatttgagttggaaggaatggttaaggaagaaacaggagttgagtagtgttatttttttcaagaagtctaattctaattctaattcttctaaagaaaagaagaaaggacaaaatcaaacagcctctttagggga

SEQ ID NO: 691561 - DNA, 1290 bp, Homo sapiens
agtgcttagcacaatgacctgcatatagtaaatggtcattacatgtttcataaatgataattgaaagagattatttaggaaatatctctggacatgcattgatataaattttaatatgtttgtacagaaaaagcctacacctggtactttcactctaaaaagttctctctgcaagctgaagaaagtagttaccagtttttgctgtagatagctggcaatcctgagagtgtatttggtcaaatgtggtgcctgatgtctgtgccctctgtgagtgaaggcacactgaagagcatttttcacttctctaaacctcagaaagtcctgactgggctgtcaaaatggtctttaataaaaggggaagtggcaggattgtgtatatgtagcctaatagagcattttatcttacagcactcaaagtgtttcacaataaatcctttctcatcatgtaacaacaaacctatgtagttccctgtagttcaacaaaaagaagccaaataacaggcttcatttttaaaagtataggttgtatctggtaggattttcagcctataggaaactcatgtttgatttgttgagtcagacttgcttggaaatattttgagattttctcacagagttatctgaataaattatctcttattaatgycattgactttaggacaaaacaactttatatactgttaaaactttacacaatacacataattggcatatgctctctaaaagttttattcctagagctaagatttacaaaactacaaccttggttagaagcaaacttgttttgttttgttttagaccgtgggcaatataactatttggggtacattaattataaatatttaatagtaaaagataaattatgagataacagacaagtaacctaaaagggcaaagctaagattaagaggtaaaaatttttattttctcattgaaaaacaagaaatgcaaaggagtctacatgctaggacaaaaaaaggtttatctgcttctctttcatttcctcctactttttgtttctatccatatttaaaaacactaaaaataaaggtaaggagtttcacttttagaattatctagctactagcaccaataatactaacctagagctgggaacagtggttcatgcccataatcccaatgctttggcgggccaaggcaggaggattgcttgagcccaggaatttgaggctacagtgagctatgaccataccacttccagcctgggtgaaagagtgagaccctgtctctaaaaaaaaaattaaaaatatattagtctaatatattccc

SEQ ID NO: 691562 - DNA, 648 bp, Homo sapiens
tgggtttctggttaatttgttttgtctcaagcagaatatagatcagtgctgtccaacaaaattttaatgtaattcacacatgtgagccctatatgtaattttaaattttctagagtcacattaagaaaaacttaaaaagagaaaattaatttaaataaygtattttatttaaccaacatatccaagatattataattttaacacattcttattcatgtgccccctgacaatgttttggtcaatgacagaccgcatatataacagtggtcccataagattacaatggagttgaaaatgtctgtggcctggtgatgctgaagccatcatgatgtggcagcacagcacactactcacatgtctgtggtgatgctggtataaacaaacctactgtctgcctgtctcaaaaaagtatagcacatacaattctgtttagtacataataatagataatgataataaacgactatgatagtggtttatttactatactacactttaaaattttattttagagtgcactccttctacttatataaatgttaactgtaaaacagcctcaggcaggtccttcgggaggtattccagaagaagccattttatcataggagatgacagctccatgtgggttatggcccctgaaaatttcca

SEQ ID NO: 691563 - DNA, 648 bp, Homo sapiens
tgggtttctggttaatttgttttgtctcaagcagaatatagatcagtgctgtccaacaaaattttaatgtaattcacacatgtgagccctatatgtaattttaaattttctagagtcacattaagaaaaacttaaaaagagaaaattaatttaaataacgtattttatttaaccaacatatccaagatattataattttaacacattcttattcatgtgccccctgacaatgttttggtcaatgacagaccgcatatataacagtggtcccataagattacaatggagttgaaaatgtctgtggcctggtgatgctgaagccatcatgatgtggcrgcacagcacactactcacatgtctgtggtgatgctggtataaacaaacctactgtctgcctgtctcaaaaaagtatagcacatacaattctgtttagtacataataatagataatgataataaacgactatgatagtggtttatttactatactacactttaaaattttattttagagtgcactccttctacttatataaatgttaactgtaaaacagcctcaggcaggtccttcgggaggtattccagaagaagccattttatcataggagatgacagctccatgtgggttatggcccctgaaaatttcca

SEQ ID NO: 691564 - DNA, 605 bp, Homo sapiens
ccgtgttagccaggatggtctcgtctcctgacctcgtgatccgcccgccttggtctcccaaagtattgggattacaggagcgakccaccgcgcccggcccccaactaacttaaaaaaaaaaaaagggggtctcactatattgccaggcttgtctcaaattcctgggctcaagggatcctcatatctcgacctcactaagtgctgagattacagcagagtaatttttaaaattcaattgcaaatatataagccacatgtgcaagaattattctgtaaggtataacatgcattcattctggttggaccacacttttaaataaaatgttttctagggaatgtcttatgccaggtctcgattctgcttttaatatcaggggaaaaaaatgtgatattttgagcactttctcacttataaaataagaatttagggagaggaaggtgtagaagtgctaaaaatattatctccaaggtcccttccaactataatattctgtaaccccaagactcactcattcttgtagcacgtagacactaccaaaggatataccttgaagcaaaagtagcctatttgtgaaaggactgttggaacagaaactttgatgttt

SEQ ID NO: 691565 - DNA, 1580 bp, Homo sapiens
tttaatttttgagatggagtttcactctttcacccaggctggaatgcagtcatgcaatctcgactcgctacaacctctgcctcctgggttcaagtgattctcctgcctcaggctcctgagtagctgggcctacaggtgcacgccaccatgcccggctaatttttttttttttttttggatttttagtagagacaaggtttcagcaccttggccaggttggtcttgaactcctgacctcgtgatcattcaatacctcatggtattgaaattacatcttcaataatagaaaacattttaaatagaaccccaaaaatggcatcattaattggtattttcaatattttgtcacagcaggaaatattcagggttatttttaaaaagattcactcttttcaatctgggccttggtctatacatagcactatatagagcacgttcagtgccaaaataattaggattggcacaaaagcacttggccttagctgtagttctgtttttgtttttgtttttgtttattttgtgagacggagtcttgctctgtcgcccaggctggagtgcagtggcgtgatcttggctcactgcaacctctgcctcccaggttcaagtgattctcctgcctcagcttcctgagtagctgggactacaggcgcacgccaccacgcctggctaatttttttcatrtttatagtagagacgaggttcagcatcttggccacactggtcttgaactcctggcctcatgatccacccatctcagccttccaaagtgctgggattacaggcatgagccaacgcgcccggcctgagctgtagttttgactatgcataagtgcattcattttgtcaatctttaatgaactgggaaatttccggaattggaatcctctttgatctacttgtaccttctgcctcatccacctcttgaccaatgctggtactctctgctaataaagaataaaaagtattatctctacctgtcaacagatacagcaactgtgtctggactagattgatgaggtctgtgcctatccagtcaagagcaagtttttaatttatcgatcaataaacattttctttatctcctatgtccttcatagaggcagttagacagttagacatggcctgtgtgtagctggaaaaaaatatatgtgttgagggcaagaatgatccactaggattttctttatgcctaccagctagcatatggaattgattaatcgattaataaataatttattctaatgtgttccaatatggtagctgacccaaaattcatagttatatctgaacattttacacacttattacttattttattttctttgagtctaaagaaccatagaactaaaacataaaaatataaaatggtctttaaaaagggatccaatatccccatcctaaggaaacactgcggacttagtcttctcttgatttttctacaacttgctttatcaaaataaaggctgcacatcaaggaaccctattttccttccttctcttaactccgcatttcccacacttactgtcaccatcccacacaagaggcagacgtgatgtttctctgaatgcgacttgggaaa

SEQ ID NO: 691566 - DNA, 632 bp, Homo sapiens
cctttaaaactacctttgtaactataacataaatagaaggaggcagaacaactaatacattgataaaatgtgcctaatcaaaattaaaaaccttttgctctttgcagtcaaattgtttgcccatgatagcccattacttaatttaaaaaatgaaaaagcagctgggcgtggtggctcacacctgtaatcccagcactttgggaggccatggcaggcggatcacgaggtcaggagatcgagaccatcctggcyaacagggtgaaaccccatctctactaaaaatacaaaaaattagccgggcgtggtggcatgcacctgtagtcccagctacttcagaggctgaggcgggagaattgcttgaacctgggaggtagaggttgcaatgagctgagatcacaccattgcactgcagcctgggcgacagagtgaggctccatctcaaacacaaaaaaaaagaaagaaagaaaaagtaagccacaaactctgaaaaaatatctgcaaatatatatgtggcaaagcacttaaattcaaaatatataaataactcttactagtcaaaaataagctacacaacccaaaaaattgaaatgatcaaaagatttcaacagatacttgaacaaaaaaatctacat

SEQ ID NO: 691567 - DNA, 632 bp, Homo sapiens
cctttaaaactacctttgtaactataacataaatagaaggaggcagaacaactaatacattgataaaatgtgcctaatcaaaattaaaaaccttttgctctttgcagtcaaattgtttgcccatgatagcccattacttaatttaaaaaatgaaaaagcagctgggcgtggtggctcacacctgtaatcccagcactttgggaggccatggcaggcggatcacgaggtcaggagatcgagaccatcctggctaacagggtgaaaccccatctctactaaaaatacaaaaaattagccgggygtggtggcatgcacctgtagtcccagctacttcagaggctgaggcgggagaattgcttgaacctgggaggtagaggttgcaatgagctgagatcacaccattgcactgcagcctgggcgacagagtgaggctccatctcaaacacaaaaaaaaagaaagaaagaaaaagtaagccacaaactctgaaaaaatatctgcaaatatatatgtggcaaagcacttaaattcaaaatatataaataactcttactagtcaaaaataagctacacaacccaaaaaattgaaatgatcaaaagatttcaacagatacttgaacaaaaaaatctacat

SEQ ID NO: 691568 - DNA, 632 bp, Homo sapiens
cctttaaaactacctttgtaactataacataaatagaaggaggcagaacaactaatacattgataaaatgtgcctaatcaaaattaaaaaccttttgctctttgcagtcaaattgtttgcccatgatagcccattacttaatttaaaaaatgaaaaagcagctgggcgtggtggctcacacctgtaatcccagcactttgggaggccatggcaggcggatcacgaggtcaggagatcgagaccatcctggctaacagggtgaaaccccatctctactaaaaatacaaaaaattagccgggcgtggtggcatgcacctgtagtcccagctacttcagaggctgaggcrggagaattgcttgaacctgggaggtagaggttgcaatgagctgagatcacaccattgcactgcagcctgggcgacagagtgaggctccatctcaaacacaaaaaaaaagaaagaaagaaaaagtaagccacaaactctgaaaaaatatctgcaaatatatatgtggcaaagcacttaaattcaaaatatataaataactcttactagtcaaaaataagctacacaacccaaaaaattgaaatgatcaaaagatttcaacagatacttgaacaaaaaaatctacat

SEQ ID NO: 691569 - DNA, 601 bp, Homo sapiens
aagttatgtgtggaattgaacttgtatgatactctgatgtagttagaagtgagtataatttggtatagtatactggaaatctattaaattatataaattcaaacaaaactatatgccaatttaggatgttagtcttcagtagactaagtttctgtaagaggccagttaaagacaacagcaagtttgtttcttcctacctaccagtgttagggctaggtgttgattaagtggtgaagtaggcacattttttgtttggtgctttggcacctttttcagcatgtctgttcctagttttgtttttattatttttttcagttgcttatctttttaagtttcttgtgtccattgatatttgtaacttaatgtaaatatttgttattgaatgaaaaaaaatgctgaatgtccagcagaatacaataatgtacatgtggtttcaggctctgtgagaagaaatatctgctttggaggtgggaggaactttgaacatctcttaaattcaaataggcaaataagtgttctatctcatcatgcttgatctagaatcttactttggctttttttkgtccaactctagttattctctgaagtggttacacggata

SEQ ID NO: 691570 - DNA, 642 bp, Homo sapiens
ttaaatggtcaatcatgccatttcttggctaaaaacctctactaactctcccatttttcttagggtaaaaagccaatgctcgcctaaaatctaacttccctttactttccttcttcaccttgagcactagcagtcctcttccatctcagcttttgcatggcgcttcctattctcttgtcccagaaccttcttctcacaacctttctatgttcaagtctttgcccacaggttactttytcaacgaagtttagcccacataccctgtttacgattggaactgaaaggaattagtatatgctacccaaaaatatgccataagaattattttgaactgaagacaattgagaaacagcacatagaggaagggctttctgtcctactttttttttttttttttttttgtctaaaagcaggaaatacattttcctttgtaaaatgtccttcttcccctttttcatgaagagaagattcattactagagatggcaccaacttgagtccacataacaaaccttactaaataacccttatctcctccttatatttaccttctcacaatttactccccctactagcccacaccttccctttccttcatctagtcacttctccacaatttatcatcctatgttgagatgttata

SEQ ID NO: 691571 - DNA, 1067 bp, Homo sapiens
aaaacattatatatgtccttaaaaaaaaataaccatggaagaaaaaacatggtgtctcatgcatatttaaaatgatcttcaccatytgagagttctgtgaccacagcaagagtttagcagagggctaaaaagtgctcttcaaacgatgataaaggaatcaggtaaggggtgccagtgaaagccctacagtgttatcccctcatactctttatctcataaattaatactcttcttcatcactttgtagatgaaaacttgaaatgctcatatgaagacctaactaccccaatctcaatcactagagaatccctgactttccttacagacctgggcccctagctgtcaggacttagtaccacacacctctcggcaacccattccttcacagatttaccttttccttctcttggactaaggtgggagcagccaacatatctgagtttgctaagctaacttaagaaatactcatggtgtgagacaaaatagaagttgttgaaattatacttctgaaactagggtgcttcttacccagttacctttcaattcaacctactggcaaagaaataacatggggcaatacagaaaaaaatgaccctgtgactcttcatcctactccatttcccttttctcccagaagcgagaagtgaaaaacacacacacacatacagaaaacaaaaagacttgaaaaatatttcaataaacgacttccaacattccagagtactccgttccacattaccaaatggtatactagttccctttccctaaaatatttatcttaaaagatgttctcaaaggccatcagtttccatttcttctattagatttccttaaaatacagcaagcagatacatgtatttagttgttttctttttaccaataaaaaaggataggagaaatatccattaagaagacagtaatgataatgagaaattatgtaaaatttgtaggacaaaaaatattctggtgaatttaaggaaagtttaaaattacaagattaagtcagtctctattttaaacacattgtcattaagtaggttatatgaacaacccattgctatttccca

SEQ ID NO: 691572 - DNA, 560 bp, Homo sapiens
aactaataaagtattccatgccacaactgggtactacaattggaaatagctaagcaaccttggtttcataacataacaacatgtactatttgaaaactacaataataagatttaccaaatattgcttgttagaggctggtctaaatagcaatgctattctgaacaaatctatccaaagcatattttttttccttccataaagtaaaaatctctaggttatctactatattggatggatttcttggataactttcaacgttaatagtttagttacatactattgtatcagtataaaagattttaaaatgagaaatctcctcaacctcatcaacccaattagttgccagctgtttaaccttgggagcattgcttaaccaatttcctttgttatatgttataaccaggctttttccttaatagaaatgacttcagtcggtcattagggtatttcctcatttgtatgactatttgattgtctgtcttccgtgyctgggcttctgaaccacatgaactcaaggactaaagcttctcactcttcattgcatctccagagtcccgca

SEQ ID NO: 691573 - DNA, 638 bp, Homo sapiens
tttaaaaaaaaaaaaaaatagttgaaagatctaagaactagctgacagaaaatacaatacacagaggtgtctctgctctaccttcagacaaacaagatagagaaaccagcaggaatcaaaatggtctatgagaractgcagttatttgttaagggaatggaaatgaaagagttacctagggtttattcattatcttctgaaattgaaaaaaaaatcagattacaaaaaaatgccatgacaatctacagaatatgtaatctatatttgctatactaaacaactggtttttctgtttctatgagaatatctaaagtattagcttcaatcattattttcaaaatttaacttaatcctccaaagggtttcagtgtgttttttcatcttttcctgctgtttaaaactatttaagtattcattatcccaacagatttgattctacgcaaaagcctccccaaatctactgtcattgtattaactgctctgttgaccctgcaaatgagatcaaattgcttcttggtattactcaacatttaacgtatgttttgaatgacgttaaaatatttttacagtttttagacaaaatgtgattacacgtttatgtgcaaatgtccataaatccattgcctgctctttagaaa

SEQ ID NO: 691574 - DNA, 638 bp, Homo sapiens
tttaaaaaaaaaaaaaaatagttgaaagatctaagaactagctgacagaaaatacaatacacagaggtgtctctgctctaccttcagacaaacaagatagagaaaccagcaggaatcaaaatggtctatgagaaactgcagttatttgttaagggaatggaaatgaaagagttacctagggtttattcattatcttctgaaattgaaaaaaaaatcagattacaaaaaaatgccatgacaatctacagaatatgtaatctatatttgctatactaaacaactggtttttctgtttctatgagaatatctaaagtattagcttcaatcattattttcaaaatttaacttaatcctccaaagggtttcagtgtgttttttcatcttttcctgctgtttaaaactatttaagtattcattatcccaacagatttgattctacgcaaaagcctccccaaatctactgtcattgtattaactgctctgttgaccctgcaaatgagatcaaattgcttcttggtattactcaacatttaacgtatgttttgaatgacgttaaaatatttttacagtttttagacaaaatgtgattacacgtttatgtgcaaatktccataaatccattgcctgctctttagaaa

SEQ ID NO: 691575 - DNA, 1512 bp, Homo sapiens
tgcatagtggtaataaaaataaaagcatttctagaaagcaagacactccattgtcttaaatgttaagagcaaggtttctgtggtctatttaagagagtaggctagtggatatgattaggaattcaagtataattgtgcaaagtagtctggtttctggacaaatgccaagacccactctaatcctaaacagtacttcaaaccactcgtgcccctataaattatttggtattttttacttcttgagaatacttccaactttcgtcccagaacgtatctccatgtggctaactaaagccacatgaaaggcttatagtgaattctaaaaacctttattaacaactttttaaattgtctgtcctgtcaaaacagatcataaaagttcctttgcaactgttctacttttattaatagagctgatgtgaagcagtatagtaatacatgggaaattctacctttgaaattgctacatttgaattactacagttcaagcaatattacctaagttaaaaaaaaatccttatttcatttctgtgatgctggagatcacatatttggtttttagtgtgtagtttttcatttataaaatagttacatcaatacctttataaaaatagattactcaaggatagaatctagatgatgagcatataagtagtcactaaaattttcagctttattgtatgtttacacattttcataataaaatgttaagagaaaaatagattactgtaacagattcatatctacatagcacatcaccattacatcttaataatcacgtatattaaaagtcaagtttgaaaataaatttagaaaacattcagaatctaatttatagctctgttacaattttaatttattgcagcgctacctaatctgcttattgcttgtttactccatgatgactggaactcagtttccaaaatacttgactgaattttccttcctttttgaaaatgtttctggattttgtttttgtacaaggtgagtggataataggatggtagaatggtaggatgaagtcttactttttcgtaatctggttttaacattaattcatagctcactttaagttttactctcacataaagtgtcaatcattttctgagaagagtcagtcaagaggctcatcttggaagaagacaaatgaagatattaatgaactttctaaaaaatcctttggggactcaatgctgaagtcttcatatgaacttttggctcactcatagtgaaggactgaacatacatgtttacctgacctacaacgacagtatsaataggagaaaaatgactaaccatattagtaacaaacatgagtactgggagaggttacaaatgcaaaagaaatataaaacacaggtattcccattgctttatcacttgtgacagtaaggagtagggagaaataaagagtctacttaaattaaggataataataatagtagtaatgattatagctaacatttatctagcaccaacttacgtggagggcaccagtttatgaactttcca

SEQ ID NO: 691576 - DNA, 1512 bp, Homo sapiens
tgcatagtggtaataaaaataaaagcatttctagaaagcaagacactccattgtcttaaatgttaagagcaaggtttctgtggtctatttaagagagtaggctagtggatatgattaggaattcaagtataattgtgcaaagtagtctggtttctggacaaatgccaagacccactctaatcctaaacagtacttcaaaccactcgtgcccctataaattatttggtattttttacttcttgagaatacttccaactttcgtcccagaacgtatctccatgtggctaactaaagccacatgaaaggcttatagtgaattctaaaaacctttattaacaactttttaaattgtctgtcctgtcaaaacagatcataaaagttcctttgcaactgttctacttttattaatagagctgatgtgaagcagtatagtaatacatgggaaattctacctttgaaattgctacatttgaattactacagttcaagcaatattacctaagttaaaaaaaaatccttatttcatttctgtgatgctggagatcacatatttggtttttagtgtgtagtttttcatttataaaatagttacatcaatacctttataaaaatagattactcaaggatagaatctagatgatgagcatataagtagtcactaaaattttcagctttattgtatgtttacacattttcataataaaatgttaagagaaaaatagattactgtaacagattcatatctacatagcacatcaccattacatcttaataatcacgtatattaaaagtcaagtttgaaaataaatttagaaaacattcagaatctaatttatagctctgttacaattttaatttattgcagcgctacctaatctgcttattgcttgtttactccatgatgactggaactcagtttccaaaatacttgactgaattttccttcctttttgaaaatgtttctggattttgtttttgtacaaggtgagtggataataggatggtagaatggtaggatgaagtcttactttttcgtaatctggttttaacattaattcatagctcactttaagttttactctcacataaagtgtcaatcattttctgagaagagtcagtcaagaggctcatcttggaagaagacaaatgaagatattaatgaactttctaaaaaatcctttggggactcaatgctgaagtcttcatatgaacttttggctcactcatagtgaaggactgaacatacatgtttacctgacctacaacgacagtatgaataggagaaaaatgactaaccatattagtaacaaacatgagtactgggagaggttacaaatgcaaaagaaatataaaacacaggtattcccattgctttatcacttgtgacagtaaggagtagggagaaataaagagtctacttaaattaaggataataataatagtagtaatgattatagctaacatttatctagcacsaacttacgtggagggcaccagtttatgaactttcca

SEQ ID NO: 691577 - DNA, 668 bp, Homo sapiens
ttttatgaccaaatttcagcctcacccccgctcctgagacagagctccaagataagattctgcaggtggagattaggagtgtttttcttcttcaaggtaggagctgagtgctcagtgcagggttggggagaaactttccactttatcagcatgcagctcctgctggggtagaccttcttccatagaagcagggttgggaaccagggggccaacgtcttcagtgctgctgcacccagggcagagccttcatccatcagtgaggctgtgtggaagaagtgagtctctggttctcagtagctcttgtccagaactgagcctcagcagcatgttctgtyggccccagtgtcctggcccctagggagcagcatcctaaaatgggagctagcatatttgagaataacaacatctacgcattcagaagctctttggttttctttccagctaatataatttcctcttttttgtgtagcaacctgtacacatgcatactgatgcatagagacctatgacacttttttctcgataagtaaaaaattattggtcactgtgatcttttctccaagttcaccatttccctgaaggtgagcacaggtccttctgcatgtgttcaaacaaaaggcccagagactacctggtaagtgaggtgctcacctggttctggatgtttg

SEQ ID NO: 691578 - DNA, 973 bp, Homo sapiens
agagcctcctgagggcagggacagcgtcttccccatcagactgagagcttcctaagggcaaaagctcccccatcagctggggctcctcaagggcagagatgacatctccccctcaaacagggtgtgctctggaagaagagactgcctctcctggccacagcctagagcctttcatcaggggtcagtggtgtggatggggcccttgagacaatccagtgagatctggaagtgaagaaaaagattataatctgggataaatataaaaarttacaataaaaattttattgcaaatttacaaattatggttgtttatatgtacatggtaaagggcaatgttatgatttgtgaatacaatatgaaataactaagataattaagaaataactgatataattatcattcattgtttcaaatttttatcttttattgtgacaacatttaacatttactcttagctctttaaaatgaccaatgtactattttaaatgaaccatagaaaccaatttatgtaaacaattgaaaatctgggaaatcaattatgaattactgtaataatttaataattaaaagttaataatgtagttaattaagtttgatttttttcaaactttttttatcatttcattgtaatgtttaatacaaatgcctacatatatatgcattggtctgtgtatttatacatctttctatgggtataaatttttgtccctatagctatgtagttgctgatgtcaacaaatgttaataaaactctggaagaatcagtgcaaacaattaggaatgtttatttcttgaaagtatatacttaaaaatataataatatgtagaatgttaataattactaaaatttaaacattaatgataaaattcataataaatataagtaacaaaatatcacagcctagaagactccagagtcctgcgaagataaacgtgacttttccagctgaggagaaaggaaacctctcccggc

SEQ ID NO: 691579 - DNA, 973 bp, Homo sapiens
agagcctcctgagggcagggacagcgtcttccccatcagactgagagcttcctaagggcaaaagctcccccatcagctggggctcctcaagggcagagatgacatctccccctcaaacagggtgtgctctggaagaagagactgcctctcctggccacagcctagagcctttcatcaggggtcagtggtgtggatggggcccttgagacaatccagtgagatctggaagtgaagaaaaagattataatctgggataaatataaaaagttacaataaaaawtttattgcaaatttacaaattatggttgtttatatgtacatggtaaagggcaatgttatgatttgtgaatacaatatgaaataactaagataattaagaaataactgatataattatcattcattgtttcaaatttttatcttttattgtgacaacatttaacatttactcttagctctttaaaatgaccaatgtactattttaaatgaaccatagaaaccaatttatgtaaacaattgaaaatctgggaaatcaattatgaattactgtaataatttaataattaaaagttaataatgtagttaattaagtttgatttttttcaaactttttttatcatttcattgtaatgtttaatacaaatgcctacatatatatgcattggtctgtgtatttatacatctttctatgggtataaatttttgtccctatagctatgtagttgctgatgtcaacaaatgttaataaaactctggaagaatcagtgcaaacaattaggaatgtttatttcttgaaagtatatacttaaaaatataataatatgtagaatgttaataattactaaaatttaaacattaatgataaaattcataataaatataagtaacaaaatatcacagcctagaagactccagagtcctgcgaagataaacgtgacttttccagctgaggagaaaggaaacctctcccggc

SEQ ID NO: 691580 - DNA, 973 bp, Homo sapiens
agagcctcctgagggcagggacagcgtcttccccatcagactgagagcttcctaagggcaaaagctcccccatcagctggggctcctcaagggcagagatgacatctccccctcaaacagggtgtgctctggaagaagagactgcctctcctggccacagcctagagcctttcatcaggggtcagtggtgtggatggggcccttgagacaatccagtgagatctggaagtgaagaaaaagattataatctgggataaatataaaaagttacaataaaaattttattgcaaatttacaaattatggttgtttatatgtacatggtaaagggcaatgttatgrtttgtgaatacaatatgaaataactaagataattaagaaataactgatataattatcattcattgtttcaaatttttatcttttattgtgacaacatttaacatttactcttagctctttaaaatgaccaatgtactattttaaatgaaccatagaaaccaatttatgtaaacaattgaaaatctgggaaatcaattatgaattactgtaataatttaataattaaaagttaataatgtagttaattaagtttgatttttttcaaactttttttatcatttcattgtaatgtttaatacaaatgcctacatatatatgcattggtctgtgtatttatacatctttctatgggtataaatttttgtccctatagctatgtagttgctgatgtcaacaaatgttaataaaactctggaagaatcagtgcaaacaattaggaatgtttatttcttgaaagtatatacttaaaaatataataatatgtagaatgttaataattactaaaatttaaacattaatgataaaattcataataaatataagtaacaaaatatcacagcctagaagactccagagtcctgcgaagataaacgtgacttttccagctgaggagaaaggaaacctctcccggc

SEQ ID NO: 691581 - DNA, 973 bp, Homo sapiens
agagcctcctgagggcagggacagcgtcttccccatcagactgagagcttcctaagggcaaaagctcccccatcagctggggctcctcaagggcagagatgacatctccccctcaaacagggtgtgctctggaagaagagactgcctctcctggccacagcctagagcctttcatcaggggtcagtggtgtggatggggcccttgagacaatccagtgagatctggaagtgaagaaaaagattataatctgggataaatataaaaagttacaataaaaattttattgcaaatttacaaattatggttgtttatatgtacatggtaaagggcaatgttatgatttgtgaatacaatatgaaataactaagataattaagaaataactgatataattatcattcattgtttcaaatttttatcttttattgtgacaacatttaacatttactcttagctctttaaaatgaccaatgtactattttaaatgaaccatagaaaccaatttatgtaaacaattgaaaatctgggaaatcaattatgaattactgtaataatttaataattaaaagttaataatgtagttaattaagtttgatttttttcaaactttttttatcatttcattgtaatgtttaatacaaatgcctacatatataygcattggtctgtgtatttatacatctttctatgggtataaatttttgtccctatagctatgtagttgctgatgtcaacaaatgttaataaaactctggaagaatcagtgcaaacaattaggaatgtttatttcttgaaagtatatacttaaaaatataataatatgtagaatgttaataattactaaaatttaaacattaatgataaaattcataataaatataagtaacaaaatatcacagcctagaagactccagagtcctgcgaagataaacgtgacttttccagctgaggagaaaggaaacctctcccggc

SEQ ID NO: 691582 - DNA, 638 bp, Homo sapiens
caagcaaagttccttaaggactcgattcatttatgatatattttataaccctagtgcctagcacaattcctgatattactcaaagtaatatatttattgaagaaacttccaatctgtctcacacatacatacccacccatacacattcacacatatactcagatatacttttaactaacaaaaccacaatattacctggataccattttccagaattttgcaaggttttagacctcagcagaagattgctggacctgactctgtgaagtgttgaatatttgttacttgtagctttgagaaaagtggaaggtattctttaaatatgaggctaggcaaagtataagcgcagggtcaggaataaggagaagacacggtttactatcagctttcttaccaaataatagttacattactcctataattcctgtcaaagccaaggtaagggatatggatatgcctttgggggaccagtggttcagaatgagttattcccacrcttggaaaagtagcactatgtttgcctgtgaagaacaataaactagtatgtatattaccaagtgttttatgtagctagagtactagagagaaaaatgttcttagtagcaattcactgtgaatagtggatacaatgtggaaaa

SEQ ID NO: 691583 - DNA, 614 bp, Homo sapiens
tctctgtgcaaccaatggatttaatgggtcagcaagcttcaggaaaaccctaaatggatttgggttcagtaaacagccggtcatcacttctaccccatgcttctaccccacttctacccaccgtgctgaactgcgaagccaaggacttgcttaaactatcaaatccagtttcctcatagaacttttggcccttctatttgtaggtccatctttgcctttggttgctgacatcacattcccagggactgttttctcttgtataaacatatatycatgtaaatccttaaaattcatggcctttgggtttttccttgtcagtcaatctgaatgtccccttcctcagatcctaatagctctgagctggattaggttttccctgatttgcccagcagtgaattcagcttaatttaaaatccactctgcctgagagtttctatttttactttatgaacccataggactgatgaacaatagttagaattgtattcaaattttggatagtttgaattatgtattagttgggaggttcttctttcaaggaaaagaatacaaaattaggtacaagcatgtatacacacatacacacatacacacacacacacacacacacacac

SEQ ID NO: 691584 - DNA, 595 bp, Homo sapiens
tgtctcgaagtttcgattgagatcacttattttgaattgattatatgatacaaatcactacaaataacaattgttctagaaattcttatgttcacaatttacttaatgggccttgtttttattattattaggagttattgaaggctattactgaaatgaggagasagaatcccctaacagagcctttgtgccaccactcaagttgaagaatatcactgggaatcaaaaataaagtataaatataaaggaagacgtgacttggagataggtaatttattaagttgttctgaaagtcattttcaaaagaatttattaaggcttttgatcaatggtgtcattaacaatatgaaagtataaaacactatttatttgcttatatatgttctaggctgtgtgagcttttaaaacttacacaatttttttacccatcagatttgagaattttgaggattgatggggtcatgggagaattaagctcattcataaacaaatggcagagagtaaaatttgcagtttttcagaagacagcttgccaattcctattcaaagaaagtatatacaaccagcaattttatttgtaataatgtattgtaca

SEQ ID NO: 691585 - DNA, 595 bp, Homo sapiens
tgtctcgaagtttcgattgagatcacttattttgaattgattatatgatacaaatcactacaaataacaattgttctagaaattcttatgttcacaatttacttaatgggccttgtttttattattattaggagttattgaaggctattactgaaatgaggagagagaatccccwaacagagcctttgtgccaccactcaagttgaagaatatcactgggaatcaaaaataaagtataaatataaaggaagacgtgacttggagataggtaatttattaagttgttctgaaagtcattttcaaaagaatttattaaggcttttgatcaatggtgtcattaacaatatgaaagtataaaacactatttatttgcttatatatgttctaggctgtgtgagcttttaaaacttacacaatttttttacccatcagatttgagaattttgaggattgatggggtcatgggagaattaagctcattcataaacaaatggcagagagtaaaatttgcagtttttcagaagacagcttgccaattcctattcaaagaaagtatatacaaccagcaattttatttgtaataatgtattgtaca

SEQ ID NO: 691586 - DNA, 609 bp, Homo sapiens
atacgatttaaggcagaatgagataaatgctctttgggtgttgcagtcactactctggagcaatcagaggggcttcctgaggagctggctcctaacatgagccttgaaatatgagtaggaactgaatagatgaagaaggaaagaaagacttttgaggaagcagcatgaactgggaaaaacacatgttctttttgagcaactgtaagtagagtaataaggttttagcactggaaaggactttctggataataaggaccaatcccccctcgaattatttaatttcgttttgaacatctcttgtgagtagttatagcagctcatctcatctctggactgctctattggaatgttcttcctcaaattgagacaaaatccattgacctatagcttccttcatgtcctatgataggtgcatgataaacatttgttggcttaaatgcctgttgaatgacctggtcctggtttcttcrgacatcatacactatgtcctttcttagctggaccataatgttccttacagagaagtgatgacagaagagcctgggaggctcatcaggccccttagcaaagctaaggaggtggggctgtgtgatccttagctcttttggc

SEQ ID NO: 691587 - DNA, 843 bp, Homo sapiens
ggcatcctcctggrccagttgatttgaccttcccacttcttcagcccacctgcccatggtgtcacctggggaaagtggaaccttaggccacaggggcagaggcttctccggcaggctgattgctgtagcagattctgttctgcctgctgctcaggagggcttctatggccaggaagtgatgctgggactctcctgttggtgttctgctgcctccgtgttgtctctggcttctcacggactctcagatgtgtgaaggcaaaaaggtttcctggctagtttgcgtggtgtggttgggatcacttttgctacatgcctctcaggcaccctagtgggggaaaagggaattttagatttaaggagaatgtgtctatgttggctgcttattgttagcaaatttctgaacaattctattctaaatggtcgcctcttgttgagtagactccagctccattggagaagagatgagcttacctgggctgtgttttcttgctagcttgagggttgaaaacactaggattttgtctccttttccagttgagttagggaagtgacatgcattgccacaaaacaatttcttcagttctggagtccttagacggtcatcttactagcaccttccagcattctcctttcagtgagataataagggagggttcctaatctaaaaggaaacatggatggtgttcttatgttgtatgacaagaaatatgaaataattctgaaaaatttagtcattcttcttttaaatttagaaacccgttttttatatttataatatttaaagccattaaaagttaagatgtcataattaaaataatcttttaacattaattagcatttagc

SEQ ID NO: 691588 - DNA, 843 bp, Homo sapiens
ggcatcctcctggaccagttgatttgaccttcccacttcttcagcccacctgcccatggtgtcacctggggaaagtggaaccttaggccacaggggcagaggcttctcyggcaggctgattgctgtagcagattctgttctgcctgctgctcaggagggcttctatggccaggaagtgatgctgggactctcctgttggtgttctgctgcctccgtgttgtctctggcttctcacggactctcagatgtgtgaaggcaaaaaggtttcctggctagtttgcgtggtgtggttgggatcacttttgctacatgcctctcaggcaccctagtgggggaaaagggaattttagatttaaggagaatgtgtctatgttggctgcttattgttagcaaatttctgaacaattctattctaaatggtcgcctcttgttgagtagactccagctccattggagaagagatgagcttacctgggctgtgttttcttgctagcttgagggttgaaaacactaggattttgtctccttttccagttgagttagggaagtgacatgcattgccacaaaacaatttcttcagttctggagtccttagacggtcatcttactagcaccttccagcattctcctttcagtgagataataagggagggttcctaatctaaaaggaaacatggatggtgttcttatgttgtatgacaagaaatatgaaataattctgaaaaatttagtcattcttcttttaaatttagaaacccgttttttatatttataatatttaaagccattaaaagttaagatgtcataattaaaataatcttttaacattaattagcatttagc

SEQ ID NO: 691589 - DNA, 843 bp, Homo sapiens
ggcatcctcctggaccagttgatttgaccttcccacttcttcagcccacctgcccatggtgtcacctggggaaagtggaaccttaggccacaggggcagaggcttctccggcaggctgattgctgtagcagattctgttctgcctgctgctcaggagggcttctatggccaggaagtgatgctgggactctyctgttggtgttctgctgcctccgtgttgtctctggcttctcacggactctcagatgtgtgaaggcaaaaaggtttcctggctagtttgcgtggtgtggttgggatcacttttgctacatgcctctcaggcaccctagtgggggaaaagggaattttagatttaaggagaatgtgtctatgttggctgcttattgttagcaaatttctgaacaattctattctaaatggtcgcctcttgttgagtagactccagctccattggagaagagatgagcttacctgggctgtgttttcttgctagcttgagggttgaaaacactaggattttgtctccttttccagttgagttagggaagtgacatgcattgccacaaaacaatttcttcagttctggagtccttagacggtcatcttactagcaccttccagcattctcctttcagtgagataataagggagggttcctaatctaaaaggaaacatggatggtgttcttatgttgtatgacaagaaatatgaaataattctgaaaaatttagtcattcttcttttaaatttagaaacccgttttttatatttataatatttaaagccattaaaagttaagatgtcataattaaaataatcttttaacattaattagcatttagc

SEQ ID NO: 691590 - DNA, 633 bp, Homo sapiens
ttttcatcatgtttagtgcaatatcaaaaaccttaaattgcgtcatggaacccatacaaagtgccactactgatgctggaaatgttcctaacaagcagaaaaaagtcatgacattatgagaaaaaactgaattgcatggtgtatattataaatcaaggtctgcagctgcagttgtccaccatttcagacacgattcatcttgtaaagagataacacaaacttatgatattgataaatacagtacagtattctaaatgtattttctcttccttatgattttcttaataacattttcttttctctaagggtacagtatataatacatataatacasaaaatagttgttaatcgattatgttatttgtaaagcttctggtcaacagtaggctattagttgttaagtttttggagagtcaaaacttatacatagattttttactgcatggtggggagttggtgcccctcacactcatgttgttcgaaagtaaactatagttgtttgccctacaacctgagttctctgataagtttaataaaagttgttaatttaaagtttgtccagcattttttgttgttactgaagtgagagcactattctattatcattattattattattattattattattat

SEQ ID NO: 691591 - DNA, 2423 bp, Homo sapiens
aggctcagaaaacatggaaatgcacgcaaaaatgtttcttagttttccccagaacaggcaggaattctttgagatggaaagtaaacagagctatcagcatatcggcctgggttcaattcactatttttaactgactggaaaaaggaaaatatatggccctgttttctttgcttgagtgatgtaaagagcatttttacagaaatacgcattttccactagatttatctgcgatagcatctctctactgctcccatgagctgcctgtgagatccatayatatctcctgggctatgagtctgatcaaccaaacaggcaccagggagtgggaaacgtccaggctgttccccacttgtgtctttttgttgtggtgatggtaaaatatacataatataaaatttaccctttcaccatttttaagtgtacaattcattgccattaagctcatttataatatacagcaaccagcacctccatccatctctagaattattttcatcttctcaaactgaaactctgtccccattttaatggggaccgactcactccccattccccctcctcccaggccctggtaacctctattcgacattctgtaagaatttccccactctaggtacctcatataagtagagtcatacgatacttgtccttttgtatttggcttctttcatgcagcatattttcaaggttcatccatattgcaacatgtgtcagagttttcttcccttttaaggctgagtaatattccatcatacatacataccacattttgcttatctgctcttccattgagggacatttggattgcttccaccttttgactattgatgtctgagtctctgctgtaaatccttttgggtatgtccccagaaatgaagttgctgggtcatatggtaattctgtgtttaactttttgaggagccaccatatagttttccagcattttatgccagcacactgtgctaatttctccacatccatgccaacacttgttattttctgcttgttttgtaacagccgtcataatacatgtgaagtggtaccttcccactgaatgtcttttaaaagaagcacagttcaggatgtgtttcaaatagggtggcagttatatctgcattttgaaggagtttttaaactcacatcccagaatcttttcagtatgttttgtaaacaacaacaacaaaggaagtggaacttaaatgagtaaatgaaaacagaatgaagagagaaaaacaattagaaagaggaaaagtttaaatatctaaatggaccccgcagtggcttagctagtgatgtatacatctgtccctgcgttggcctatgggaaagttcacaggtgaccccaacaccagcacattttggtggagtctggcttattagtcgagcacttcctgagaagattcaccaggtactctctctaagcagaggccttggaaatggaatccccactcctcctctttagggcacgtctccagggagaaccattaacaacatcatacccagcctgccagtttgagggtagacagctcctccactgaaccaggaggaagagcagggtacacgacacaagggcagggcttacatccacgtagtcacagaggcaactgcctttctgccttgctctcatttctcccaattccttaaaaacaaagagcactccctacctgtgatcttcatcccagcacgatcatgtacactggggaagttgtctcagcttatagacaaggaacctgaggtctgagaggcgaagtgactgccgaggtgacccaggacagcacaatgagctgagttttgttctgctggcttggtcttgaatgacaggtggagctaggggagtacactgtccatcccggaaccaagccaactccacccccaaccggagagatcctccttcatttttcccccacacatgagtgcaatagtcctaaatcagaggacaacaccggacatctgtctcaccaagctcatgcaactatatcaagaacatcctgtgtgatgcccctggggtttaaaagctagcactgttcatgtagtttcaaagtggtctacaatgccaggtcccatggaattgaaatctatcccatagcccgttgagaaaaacagtaactggaatcactgtgcttcagtctctggggattcatcgtggcctcctagtctttgttgccattaattgttttatgacattgtttaaattaagtcacttaactttcagcttcttcagctattgcaagctttccgggataacagagcacgtgttcttcttctcagagcatctcccatgcttagcacaggtgactcactagtgaaggccagttgtaacttctgtgttatccttgggccccaactcccccccaatcactttctgccttcccacacttatataagttcagacctgctgtttcatcttaaatctggatggcaca

SEQ ID NO: 691592 - DNA, 2453 bp, Homo sapiens
tgcatggagtgaaaccagaaaattcagaaatcatctgtctgccatcatggcaagttccaactcaactctttgttccttttttcctccttgcaatttgctctttgaagaaactgggccatttgctctgcagattttgcacagtccgtgttttgcaaattgcattccatggtgttgttgaacgtgttcctccccaactgccccattacctgaattgctactgtaatgagattagcttccccatataaactattttggtatcctgagctatagcttatacagtaaaggcagacaaattcctgattctttctctttatcatgtttccaaaaataactggttctctagcatccttcaaacgtgtttaatgagctttttaattttttttggttttattatgaactcatggctttaaatatatttgaaatattttaatccacttctaatgttattatattcatgctcaaaataacccaaattttgtcagcagtgtctaaataaattggctcctggtcatttgactccgattcagaactctttgatagcttctttttgttgttattgttgttgttgttttgttaatgacaaaattctccaggtacattttgggtatttctagatctggaatcagctacttcattttagtgagatatgatatttagaggcaacaatcagcactatgattggtcattgttttcagtgaccttttcagtgaaaaaaagcagggaatactagtttttgataagataattcataagctcacattggtatttagtttaaactcaggacttggaattttaacttaacttctttaatcttgtattaatttattttttgcattctgaaaatccctatctcaatgacactaacccagttccttttgtgcttcatcacatgctacaaacataacagtctcaaaataataccaccattataccaacacagtcattgatttgaaaatactttaagatttttgttttgcacttctttttgtccttatgtttacaccagctgggatgtggcaattttaacaaatccctttatacacagttacggtcagtcatctgttattttttctcttaattctcagcaactataactaaattttgttttagaattataattatgtaaagtatgtaacattttcaaaaataaaatccacaaaacaagttacctttaggaaaatctaactaatactgctttatcctctaccatactcatacyttctctcataattgaacttacctttccatttagatataattaaatatacacatatattcaaccatctttgttagatggatagatagataaacaaatgctagcatactatatgtatttttctctaccttgatatgtttcattaaatataatccagaaatcctactataaaactatttagaaatatcctttattgctttcttagttataaagtgatccactcaggaatagaccatactttgagtagtactgtactaatggacatgaagttgttttctattcctttgctaatataaataaatagaactattaaagggtcttgtgaatatttccattcatgattatattagtggaatgaattctttgaaatggaattgctgagtcaaaggtaaatttatgcataattttaaaatattttttctatttcttcttttatgatataagattgtaacatacttgatatcagattataacattttgcatacacttaaacaacatatactagtacttatttcctcactaaagttttgggttattgcccacattgtcaatataatagtcacctcaatttaatttacatttctcttattctaactaaggttgggaatctttacatatttcaagagccatttgtgggttttttgctgtaaactctatagcttttctcttcttttctactaagttttggggtttcttgaatttctgtattctttttgtttggttgtttttttttttctttttgttttgttttgtttttgatacaggttctagctctatcacccaggttggagtgcagtggtgcaaccataactcattgcagcctccaactcctggcctcaagcaatccccccacctcagcatctagaatagctggggtcaaaggtgcacaccatcatgcctggctgatttttttttttttttttgtatatattgggtttcacaattttgccagggtgttcttgaactacttggctcaagagatccacctgcctcggcctccaaaagtgctgggattacaggcataagcctgtaaatttctttattgtattctcccagccttaaaatgtatttattttttaaagttcattgtatattacagatatcatatttttgtctaaacagagattggtaaacattttccgtaaagggccaaatagtaaatatttcaggttttgcagacaatatggtctctgtcacaccatttaactatgctgttgtagccagagataatacatta

SEQ ID NO: 691593 - DNA, 2453 bp, Homo sapiens
tgcatggagtgaaaccagaaaattcagaaatcatctgtctgccatcatggcaagttccaactcaactctttgttccttttttcctccttgcaatttgctctttgaagaaactgggccatttgctctgcagattttgcacagtccgtgttttgcaaattgcattccatggtgttgttgaacgtgttcctccccaactgccccattacctgaattgctactgtaatgagattagcttccccatataaactattttggtatcctgagctatagcttatacagtaaaggcagacaaattcctgattctttctctttatcatgtttccaaaaataactggttctctagcatccttcaaacgtgtttaatgagctttttaattttttttggttttattatgaactcatggctttaaatatatttgaaatattttaatccacttctaatgttattatattcatgctcaaaataacccaaattttgtcagcagtgtctaaataaattggctcctggtcatttgactccgattcagaactctttgatagcttctttttgttgttattgttgttgttgttttgttaatgacaaaattctccaggtacattttgggtatttctagatctggaatcagctacttcattttagtgagatatgatatttagaggcaacaatcagcactatgattggtcattgttttcagtgaccttttcagtgaaaaaaagcagggaatactagtttttgataagataattcataagctcacattggtatttagtttaaactcaggacttggaattttaacttaacttctttaatcttgtattaatttattttttgcattctgaaaatccctatctcaatgacactaacccagttccttttgtgcttcatcacatgctacaaacataacagtctcaaaataataccaccattataccaacacagtcattgatttgaaaatactttaagatttttgttttgcacttctttttgtccttatgtttacaccagctgggatgtggcaattttaacaaatccctttatacacagttacggtcagtcatctgttattttttctcttaattctcagcaactataactaaattttgttttagaattataattatgtaaagtatgtaacattttcaaaaataaaatccacaaaacaagttacctttaggaaaatctaactaatactgctttatcctctaccatactcataccttctctcataattgaacttacctttccatttagatataattaaatatacacatatattcaaccatctttgttagatggatagatagataaacaaatgctagcatactatatgtatttttctctaccttgatatgtttcattaaatataatccagaaatcctactataaaactatttagaaatatccttyattgctttcttagttataaagtgatccactcaggaatagaccatactttgagtagtactgtactaatggacatgaagttgttttctattcctttgctaatataaataaatagaactattaaagggtcttgtgaatatttccattcatgattatattagtggaatgaattctttgaaatggaattgctgagtcaaaggtaaatttatgcataattttaaaatattttttctatttcttcttttatgatataagattgtaacatacttgatatcagattataacattttgcatacacttaaacaacatatactagtacttatttcctcactaaagttttgggttattgcccacattgtcaatataatagtcacctcaatttaatttacatttctcttattctaactaaggttgggaatctttacatatttcaagagccatttgtgggttttttgctgtaaactctatagcttttctcttcttttctactaagttttggggtttcttgaatttctgtattctttttgtttggttgtttttttttttctttttgttttgttttgtttttgatacaggttctagctctatcacccaggttggagtgcagtggtgcaaccataactcattgcagcctccaactcctggcctcaagcaatccccccacctcagcatctagaatagctggggtcaaaggtgcacaccatcatgcctggctgatttttttttttttttttgtatatattgggtttcacaattttgccagggtgttcttgaactacttggctcaagagatccacctgcctcggcctccaaaagtgctgggattacaggcataagcctgtaaatttctttattgtattctcccagccttaaaatgtatttattttttaaagttcattgtatattacagatatcatatttttgtctaaacagagattggtaaacattttccgtaaagggccaaatagtaaatatttcaggttttgcagacaatatggtctctgtcacaccatttaactatgctgttgtagccagagataatacatta

SEQ ID NO: 691594 - DNA, 1389 bp, Homo sapiens
ttcagcaatgtattcatccaagcttaatatattcttccaagtctaatactaactcttgattactaacatggtaatatgaagatgtgattataacaatatctaaagtcatcaaattattctctttctctcttctggtgggaaggcatttcaaatactcagagtaggaaaactatgtacatgtacaagtgtaccatgcaaggttgccaaggcttaagaccatcttcaagagagggcccactgaaatggatgcacaccaagcccaaagcaataggggatggattcctatctgtggagttgggggtgtggggagaaaagaaatattcacagtggagtgggagggaagaggcaggagtctcaatagagccatatgaccaaggaaatgcacaaagagaggccccttttagaacacccaaaggaaaaaagatgatatagaagaaaaacatttggaaaccagctrcggagccacagatagatgaaggagcaaaaatttttagataagaaggaccacaaattcagttcaccaccactttccaataggttaagaggcagaacttctccttccttattccttcccacccctccacacacacacacacacacaccacacatacacacacacaaacacacacttgtgattcacaggtacaggtgaatgtaatatgggggagaaaagaggaacaagagaaatcgggctacattcttttcaactggaaatagtttatagcaaccttagaagccaaatatgagctgaactgtgggattttgaagaacttttaacaaaaattagaagaaatacaggtatacctcattttattgtgcttcactcttttgcacttgataggtattgcatttttatttttacaaattgaaggtttataacaactctgtgtccagaaagtctgtttgtaccattttctcaaaagcgtgggctcacctcatgtctctgtgtcacattttagtaatttctgcaatatctcaaactttttcattattatatctgttatggtgatctataatcagtgatcttcaatgttacttttgtaattgttttggagtgccaagaaccacacccatataagatggaaaacttaataaatgttatgttctgactgttccaccaacaggctgttcctctctcttcctcttctctgacctctctattccctgagatgcaacaacattgaaattaggtcacttaataacccaaaatgacctctaagtattcaagtgaaagaaagaattaaacatccatcacattgaatcaaaagctagaaataattaagcttagtgagaaaggcaagtggaaagtcaagagaggctgaaagctaggcctcttgcaccaaatagttaagttgtgaaggcaaaggagaagttctggagggaaattga

SEQ ID NO: 691595 - DNA, 1389 bp, Homo sapiens
ttcagcaatgtattcatccaagcttaatatattcttccaagtctaatactaactcttgattactaacatggtaatatgaagatgtgattataacaatatctaaagtcatcaaattattctctttctctcttctggtgggaaggcatttcaaatactcagagtaggaaaactatgtacatgtacaagtgtaccatgcaaggttgccaaggcttaagaccatcttcaagagagggcccactgaaatggatgcacaccaagcccaaagcaataggggatggattcctatctgtggagttgggggtgtggggagaaaagaaatattcacagtggagtgggagggaagaggcaggagtctcaatagagccatatgaccaaggaaatgcacaaagagaggccccttttagaacacccaaaggaaaaaagatgatatagaagaaaaacatttggaaaccagctgcggagccacagatagatgaaggagcaaaaatttttagataagaaggaccacaaattcagttcaccaccactttccaataggttaagaggcagaacttctccttccttattccttcccacccytccacacacacacacacacacaccacacatacacacacacaaacacacacttgtgattcacaggtacaggtgaatgtaatatgggggagaaaagaggaacaagagaaatcgggctacattcttttcaactggaaatagtttatagcaaccttagaagccaaatatgagctgaactgtgggattttgaagaacttttaacaaaaattagaagaaatacaggtatacctcattttattgtgcttcactcttttgcacttgataggtattgcatttttatttttacaaattgaaggtttataacaactctgtgtccagaaagtctgtttgtaccattttctcaaaagcgtgggctcacctcatgtctctgtgtcacattttagtaatttctgcaatatctcaaactttttcattattatatctgttatggtgatctataatcagtgatcttcaatgttacttttgtaattgttttggagtgccaagaaccacacccatataagatggaaaacttaataaatgttatgttctgactgttccaccaacaggctgttcctctctcttcctcttctctgacctctctattccctgagatgcaacaacattgaaattaggtcacttaataacccaaaatgacctctaagtattcaagtgaaagaaagaattaaacatccatcacattgaatcaaaagctagaaataattaagcttagtgagaaaggcaagtggaaagtcaagagaggctgaaagctaggcctcttgcaccaaatagttaagttgtgaaggcaaaggagaagttctggagggaaattga

SEQ ID NO: 691596 - DNA, 524 bp, Homo sapiens
acccagacctcctgagcccactttccccatctcatcacagatccagacctcctgagcccactttccccatctcatcacagatccagacctcctgagcccactttccccatctcatcacagatccagacctcccccactttccccatctcatcagagatccagacctcctgagcccacttccccaactcatcaccagtgatttcttgggctctgcattagttttctattgctgctgcaacmaacagctacagactcagtggcttccatttctgtcttatagttctggttgccaaaagtcctaagaggatctcactgggctaaagtcaaggtgctggcggggctatgtcccttctggaggctcaagggatgaatcgggtccctgccttttctagcttctaggggctccagcttctaggtttgtggcctccttcctccatcctcaaagccagcaacagcaggtgaagtcctcgcccatcatgcatcactctcccttcttcctccttcaacttttttttttatattta

SEQ ID NO: 691597 - DNA, 524 bp, Homo sapiens
acccagacctcctgagcccactttccccatctcatcacagatccagacctcctgagcccactttccccatctcatcacagatccagacctcctgagcccactttccccatctcatcacagatccagacctcccccactttccccatctcatcagagatccagacctcctgagcccacttccccaactcatcaccagtgatttcttgggctctgcattagttttctattgctgctgcaaccaacagctacagactcagtggcttccatttctgtcttatagttctggttgccaaaagtcctaagaggatctcactgggctaaagtcaaggtgctggyggggctatgtcccttctggaggctcaagggatgaatcgggtccctgccttttctagcttctaggggctccagcttctaggtttgtggcctccttcctccatcctcaaagccagcaacagcaggtgaagtcctcgcccatcatgcatcactctcccttcttcctccttcaacttttttttttatattta

SEQ ID NO: 691598 - DNA, 586 bp, Homo sapiens
tggtgcattcacagttcactgcagcctcgagaaaacctcccacattagcctcccaggtagctgggaccccaggtgcgcaccaccacacctggttaatattttattatttgtagagatggagtcttgctattctgcccaggctggtctcaaattcctgggctcaagcaatcctcctgcactggcaacccaaaatgctgggatgacagatatgagccacagtgcccaacctatttatttatttrtttaataaggacaaggtctcactatgttgcccaggctggtcaactcctggactcaaatgattctccaaacttggcctctcaaaatgttgggattacaggtatgagccaccatgcctggcctaaaaatagtattatatttttgtatcatataattttcaattaggtaatatgaatattctgtacaggaaatacgcccttaattacataggaataaacatttgttacactgagaaaaatctaatagagctaaaaataaaaattaatttggaaaggtaattagatactgatacattcttacatttacacattctttcatatattcatatattcttttaacagtatca

SEQ ID NO: 691599 - DNA, 586 bp, Homo sapiens
tggtgcattcacagttcactgcagcctcgagaaaacctcccacattagcctcccaggtagctgggaccccaggtgcgcaccaccacacctggttaatattttattatttgtagagatggagtcttgctattctgcccaggctggtctcaaattcctgggctcaagcaatcctcctgcactggcaacccaaaatgctgggatgacagatatgagccacagtgcccaacctatttatttatttgtttaataaggacaaggtctcactatgttgcccaggctgrtcaactcctggactcaaatgattctccaaacttggcctctcaaaatgttgggattacaggtatgagccaccatgcctggcctaaaaatagtattatatttttgtatcatataattttcaattaggtaatatgaatattctgtacaggaaatacgcccttaattacataggaataaacatttgttacactgagaaaaatctaatagagctaaaaataaaaattaatttggaaaggtaattagatactgatacattcttacatttacacattctttcatatattcatatattcttttaacagtatca

SEQ ID NO: 691600 - DNA, 586 bp, Homo sapiens
tggtgcattcacagttcactgcagcctcgagaaaacctcccacattagcctcccaggtagctgggaccccaggtgcgcaccaccacacctggttaatattttattatttgtagagatggagtcttgctattctgcccaggctggtctcaaattcctgggctcaagcaatcctcctgcactggcaacccaaaatgctgggatgacagatatgagccacagtgcccaacctatttatttatttgtttaataaggacaaggtctcactatgttgcccaggctggtcaactcctggactcaaatgattctccaaacttggcctctcaaaatgttgggattacaggtatgagccaccatgcctggcctaaaaatagtattatatttttgtatcatataattttcaattaggtaatatgaatattctgtacaggaaatacgcccttaattacataggaataaacatttgttacactgagaaaaatctaatagagctaaaaataaaaattaatttggaaaggtaattagatactgatacattcttacatttayacattctttcatatattcatatattcttttaacagtatca

SEQ ID NO: 691601 - DNA, 1360 bp, Homo sapiens
aattaatgatttcacaggatatctttctccattcttttactttcaacctacttaggtccttaagtgagtttgaagtttctcatgaacagtatttagttgggccatgtgtttattataggctctccatcaatctgtcttttggtttatttagaccatttacatttaaggtgcttattgttacataattgcttatgcctgatgtttttattatttgcttttttgtttcctttttctttccctccatcttgatctatttctgtaaaatgttgttgcgtgtatctctttgtatagtcttaaagtgtttgctctggatgttacaatatgtgtattgtaatatagtagtctactggtaccagtatttaccacttcaaagtgtggaaacctgccttgcatttatgtctctttaccttttccacttgtataaatcactggcttgagtattaggtggtggtatagtttttgtttcagtcgtcaratgtgattttaagaactgtggattgtctcgcgtatgtatccacatttctcgtctttcctttgtccctcctcccatagtcccatattcatcccttctgcataagaactttctatagccatttttttattttgatttttttgttttaattttttgtattgtggaaatgacagaacatatttccgtagccactttttagcatttctaaattgaccagtgacaaattcctatattctcttcctctgagaatgtctttatttctctcttcatttctgaagggtagtttcatgggatatagaatttgcctttcatgtattcagaggttttcagtattcgtataatcaaacctgatagttttccttttggttttgaggttgtgtcttgtttgggtgagtctcctacccctttgactacagaaatgccctttcattttaaatatcctcctattatgaaacacatttccacattttctaaatttttaatttttagctgagaaataaattagtaattatttaagtattaattatttttatcttgttattaattattggttttatttatttacatgtagttggcttacatttagtttagtttaacttaattactttaaagtaatgtataaatatctgcagtttgtacctcatgttctcactcataagtgggagctgaacaatgagaacacgtagacacagggaggggaacatcacacaccaggttctatccaggggttgggggcaagggaaaggagagcattatgacaaatacctaatgcatgcagggcttaaaacctagatgacaaattgataggtgcagcaaaccaccatggcacatgtatacctatgtaataaacctacatgttctgcacatgtatcccagaacttaaagtaa

SEQ ID NO: 691602 - DNA, 643 bp, Homo sapiens
tttgcatcagcagatgctgcttaccagtgcatggttactctcagcaaagaccaggtaagaactcaccttcctttcctacggagtcacccagttaagacatgttgtgtcttcctcgtcaactcctaagtcttcctgaaacctttccattccggttgctggtgctgacccaaagagacaggagatgaagtggcagctctgtggaacttgagcataggtaaagccatagcatcgggagaatgtgaaaatgcttttcaagaaacataaaacagtcacatgaggygcgctcattttctctgataagatataataaaaatgtctctaatatgaatatgatgagaacagtgcaaacgcaacctgattacatggcagtgattgtaataaaaatagcatatagaatggcataagtgaaattctttcctattaaggtcttagaattttcatgattcagtcttttttgtatgaaatattgcacagaggttgacagtgaccatgcaccacaccatttagctgctgaaaaattgtgatagattgggtagagaatgaacaaaccttaaactcaatactaaacacaggctcatccattttacctttctagccttctaattcacattgctcatatatctaatctttcatcccttcttta

SEQ ID NO: 691603 - DNA, 615 bp, Homo sapiens
acacagatagctgtttagcaatttatttcacattggataagcttcttgtctccattactgtctctttcagctaagccttaggttggaaagacaaaagcagctctctcagcgcatgatccatcactctgctcatcagggtgggaactttagggccaaagttgtacatggaaagatgtagggcctgtctctcactgggaaagatcttccacctttgaaagccctattacaagtgttcttaaactgaaggctaagawgagcgtaagagcatctgtaactctcaaattagtaggcattattttatccatttttctagggagaaagttatatgattttcagtaggctgctacaggtttaggacccctgaaaaaggtgcactctactggcttagcaggtccagagtgggcttcaggtagagaagacttggagaagatagccagcactttatggaataacatattcaacataccaagagaaaataattctcaacatggaattctatacccagctaagttattttccaacagtaaatatgtcttataataaagaagaaataaagatatttttacaaaggcaaagacttagagagttgattactcaaagactctgaaagaacta

SEQ ID NO: 691604 - DNA, 615 bp, Homo sapiens
acacagatagctgtttagcaatttatttcacattggataagcttcttgtctccattactgtctctttcagctaagccttaggttggaaagacaaaagcagctctctcagcgcatgatccatcactctgctcatcagggtgggaactttagggccaaagttgtacatggaaagatgtagggcctgtctctcactgggaaagatcttccacctttgaaagccctattacaagtgttcttaaactgaaggctaagatgagcgtmagagcatctgtaactctcaaattagtaggcattattttatccatttttctagggagaaagttatatgattttcagtaggctgctacaggtttaggacccctgaaaaaggtgcactctactggcttagcaggtccagagtgggcttcaggtagagaagacttggagaagatagccagcactttatggaataacatattcaacataccaagagaaaataattctcaacatggaattctatacccagctaagttattttccaacagtaaatatgtcttataataaagaagaaataaagatatttttacaaaggcaaagacttagagagttgattactcaaagactctgaaagaacta

SEQ ID NO: 691605 - DNA, 615 bp, Homo sapiens
acacagatagctgtttagcaatttatttcacattggataagcttcttgtctccattactgtctctttcagctaagccttaggttggaaagacaaaagcagctctctcagcgcatgatccatcactctgctcatcagggtgggaactttagggccaaagttgtacatggaaagatgtagggcctgtctctcactgggaaagatcttccacctttgaaagccctattacaagtgttcttaaactgaaggctaagatgagcgtaagagcatctgtaaytctcaaattagtaggcattattttatccatttttctagggagaaagttatatgattttcagtaggctgctacaggtttaggacccctgaaaaaggtgcactctactggcttagcaggtccagagtgggcttcaggtagagaagacttggagaagatagccagcactttatggaataacatattcaacataccaagagaaaataattctcaacatggaattctatacccagctaagttattttccaacagtaaatatgtcttataataaagaagaaataaagatatttttacaaaggcaaagacttagagagttgattactcaaagactctgaaagaacta

SEQ ID NO: 691606 - DNA, 615 bp, Homo sapiens
acacagatagctgtttagcaatttatttcacattggataagcttcttgtctccattactgtctctttcagctaagccttaggttggaaagacaaaagcagctctctcagcgcatgatccatcactctgctcatcagggtgggaactttagggccaaagttgtacatggaaagatgtagggcctgtctctcactgggaaagatcttccacctttgaaagccctattacaagtgttcttaaactgaaggctaagatgagcgtaagagcatctgtaactctcaaattagtaggcawtattttatccatttttctagggagaaagttatatgattttcagtaggctgctacaggtttaggacccctgaaaaaggtgcactctactggcttagcaggtccagagtgggcttcaggtagagaagacttggagaagatagccagcactttatggaataacatattcaacataccaagagaaaataattctcaacatggaattctatacccagctaagttattttccaacagtaaatatgtcttataataaagaagaaataaagatatttttacaaaggcaaagacttagagagttgattactcaaagactctgaaagaacta

SEQ ID NO: 691607 - DNA, 741 bp, Homo sapiens
attattctcattcgtcactttctagcctgttgcctcgggattacggtgggttgccagcagagacataggaccacagttaataaaacatttttacagatctaggctgcaactacgaaagacacaattaatattcacacacaagcatgcatgcgtgcccttcccctcagcatctccagactcccattacaggaaccctccattactcaaaactaatcccaatgagaagcaaggcctatgactggttagtgtgtgtgtgaaatcattttagtagtactttcatgggaaagtgacccagaagacaccagctgaatatgataaacaagaagtagcataatgtataaagagctctagaatcagacagaattgggtccgaattgggcttcttcatttagtagctgtgtgaccttgggtgagttgmttagcctctctgggccctagttttctaatcactggaacggggataaagatatttattttgtatggttgttgtaaaggttcaagaacatgtgtttaaaacacatatcccagtgcctgacacttaatgaatggtagcaattgttaccggtaataaatcagcatatctgtgctctctcctgtcaccttctccctctctctctctctctctatctctctctcaacttgtacctaccataaccacactgctgttttttgctttggatgcctacatgaccagttggtctctcaaaaaaaatttatcaactaagaccaggtgctgagcaa

SEQ ID NO: 691608 - DNA, 741 bp, Homo sapiens
attattctcattcgtcactttctagcctgttgcctcgggattacggtgggttgccagcagagacataggaccacagttaataaaacatttttacagatctaggctgcaactacgaaagacacaattaatattcacacacaagcatgcatgcgtgcccttcccctcagcatctccagactcccattacaggaaccctccattactcaaaactaatcccaatgagaagcaaggcctatgactggttagtgtgtgtgtgaaatcattttagtagtactttcatgggaaagtgacccagaagacaccagctgaatatgataaacaagaagtagcataatgtataaagagctctagaatcagacagaattgggtccgaattgggcttcttcatttagtagctgtgtgaccttgggtgagttgattagcctctctgggccctagttttctaatcactggaacggggataaagatatttattttgtatggttgttgtaaaggttcaagaacatgtgtttaaaacacatatcccagtgcctgacacttaatgaatggtagcaattgttaccggtaataaatcagcatatctgtgctctctcctgtcaccttctccctctctctctctctctctatctctctctcaacttgtacctaccataaccacactgctgttttttgctttggatgcctacatgaccagtyggtctctcaaaaaaaatttatcaactaagaccaggtgctgagcaa

SEQ ID NO: 691609 - DNA, 618 bp, Homo sapiens
ctgacatggattggcctctagattcttttcttaaatttggaagatgcagagcattatcctgtacccactctgaatagtatgcttcmgtttgtgtaataagagaggatatgaagtatgtgtagaagtgcttatataaacagactatttctggaaggaaacacaagaaacctagtaacactagtggctggagagggaccttttgttatgtaccttttgatatctattgaatttttgttctttgtgaatgaattactttaaaaatgcaaaatattaagaacacttaatacagaagaaaatctgtaaggaggttgtgataattttgcatttagggttttaaccaagaagatctggaagaagaaaaaggtgaaacacaggtaaaagaagcagaagattcagattctgatgataacataaagagaggaaaacagtaagtttgtttttaaggaatttgttaaagagaagtttaaaaatcaaggtagagactattaaactctcttttgtttttcattttggttcctgattaagtttaggagtggatctattcctgttttctccatttacggtgttgtcagtgaattacctgctgttgttacttgtctttcatttaccctgtgctca

SEQ ID NO: 691610 - DNA, 614 bp, Homo sapiens
taaatggcagctgctgcagatgagccagccacaaatttaacccttcttcattttatttaaccagaaactaaaaaatgatctggactaaggaaaattatttatgtgttcatttagtcatttgacatttatttagtgaaaaggttctgtgtgcaaaacacaggctagtattactcatggacttcagccatctggactgctgtgggcacaggtctctgaggcctctctgggcagcttttctgtccccacctcttctgtctgggctgggctgggactgctttactgcagaatgtggaggaagtaatgttcttgggctttgagtccaggcattaagaaaacctggaagcttctgcttccttcctcttggatctcctgctttttgggarcacagagctgccacctaagaagtccagccaccctgctggagagaccactgggggaggaaatgcctggccaccctagtttccaggtggagcttccagatgagacccatttagccaccatatgactgaaaccacatgagagaccccaagtgaggcccataaaagttcccaaactacagaaacgtagacacaatagttccaactagaactcaagctacagaaccatagagacaa

SEQ ID NO: 691611 - DNA, 1182 bp, Homo sapiens
taaaatagctatgcttctgtacattcttaactcattctcatcattacagttagaacaatattatcttgaagcgttctacatccagagtagaggcagcagtctcttgtttacttttattactcctctgataacagctgggctgactctgatccactatttgaaactcttagtccttagatgaacatgatctctgatcaacttgcctttgactcaaccttgaccctaatctttttgtattccctgcatctgaactgggcttgcctgtcttcttattctaagattctgctttggcttttcaatcctgtattattttcctttgaatctatagttactagcacactgttgttgctcaataaayattgtgctgaccttggacagtttaaatctattgctcacatattccttctcaattcctctaaccttctatattctgaagcaacatcttttttgcatagttcttcgattacctgattccttgcctttttctctgtttgtgttgtccaggatccatttcggcacattgaacatgaccaggcatggctaggagggacaagaaataccagcgtatctatgagatcagcaaatataccaggcagacttagcaggtgagcagagcataactagagaaaaaccttggcacatacatacccatagtagaagagaattttaaatgcttggcattcaaagacagggcacaaatagctgaaaagaaaaaacggacaaagcaagacaatatgcttaaagaaaccaggtagaaatcaccattgatgccatatagtcttgtagttttctttgctgggaggtttttgattactgattaagagattacagtctcttcactcatagatctgttcagatattctatttcttcttcataagttttagtggtttgtatgtttttaggaattttccatttcatctatgttatctaatttgttggtatacaattgttcatagtattgtaatatttttattgttataaggttcatagtaatatctccactttcatttccaattttagtaatttgagacttctctctttttttcttgatcagtctagctaaatgtttgtcaatttcgttgatattgaaagaatcaactttgcgcgggtcattaactctatcatttttctaatctctgttgcatttatcttcaatttttattacttccttcattctccta

SEQ ID NO: 691612 - DNA, 643 bp, Homo sapiens
agccccagactgtttctttaatggtcattcatgaactattaaaaatttcctgaatttctttttaaactacatctagatagcctaaacatctatgtagtcttccattagttaacatgtgtatagggctttcataataagtagtcacactgttacaaggtaaattttctattacaaaatccaaatttctattgcatacacttataatcatctattcataaagctaattcattgtacttgttaatgcatgaatgttccatgcagtaggagaataaagcactacagttcggttgttcaaatcttaaatcttaggctatttagctaaaacatgttaggatattgccttcaccacttgttaggacagttatttgatagccattatgcttacctatggatagcataatggtatttaaggttcaacaaaccgcagattattatsatcagctagaactgacatatgttacaagaaaactgtaaattaacctcctgagagaaccattctgccctgcattttaagtcaggtatttaaatactgcgtgttgttaatattgcgttgtcttagtgcaacatttcttaaagtattcccgttatcttccttggctgtttttcagaggagacgtctccatgttaatgggtccttcccaca

SEQ ID NO: 691613 - DNA, 1921 bp, Homo sapiens
tttgtttatcttagtactaatttgaaaactttgtttcatttgttatatttctgagatatcctagcatctttcttatcttaattagatctagtatacagaattcctttgtgatttgatctctaagaattctgcagcaactgagtcatcaacctgaaggttaattctcaccatatggggtagacgttgcagtacaagacatggacagttaaaaaaataaaataaaaaaaaataataataataataaaaaaagacatggacagttaggatctgtcttatgcttctttccatctctcatagcacccaagcacaaacgatcaacaaatatttgttgaaacgaaatgctgatgaaactcttgatgtaagtttgttttctcctgagaacacaggcctgacaaaaatcctggcaaactgggttgaagctcaagaaggctttaatattctaatattaaaaaccagataacttcctaaaagggtattaaggaaaactgttcttttcaatttcaaaattaaagcacaataaactttaagtacgaagtaatttctaataaataatgtttgtttgtttgttttcagacagagtttcgctgtcacccaggttgaagtgcagtggcgtgatcttggttcactgcaacctccctctaccaggttcaagccattctcctgcctcagcctcccgagtagctgggattacagttgcgtgccaccacgcccagctaatttttgcattctaagtagagatggggtttcaccatgttggccaggctggtcttgaactcctggcctcaggtgatttgcctgtcttggccccccaaagtgcagggattacaggtgagccaccctgcttggccaataatatgttaaaatatggtagaatctatttctaactaaactaaaccagttatcagtatttgttcagtgtctactgaaaaaaacaaagacataaacacaatacatatcaatatatgtaactgcttttaacgaaaagtaacttttttccaaaacaaaacatttagtgattggccttattttacatttctgcaaggctttttgatatgtggtttaacagaacacaggtcaattttcatacctgtctctgcattcaatcgactgaggtattcttacctcagaaaattctggaaaacacaagaacacacaagtgcacgtttcattagctaacagtgtgatgccatcatgtcatcaaacgtcatgtggctactggaaaactccatgtatacttgtggaaaaaataagcgtgccaaacataaacacacacacacacacacacacacatacacacacacacacacacaaatactttacatcttatggaccctgtgacaggatcctggaaacctctctggggtttctggaccacactttgagaaccagtgccccagtcctgaataatcacatgaccacaaacaccagtactgaacttcatgtggggaaaaaaaaaacttttatgttattgaaggaaagaaaggaatgagggcaacagggctaacttctcaacttattaggaagttaacagataatatcaaatagaagaaaatcagccggaagacttgaaagtggtgcctctggggaataaaaactggggactataaaaactatgttttgttattaaaactatttgatattttattttacttatttatttatttttagagggagtcttgctctgttgcccaggctggggtgcagtggcgtgatctcggctcactgccacctccatctcctgggttcaagcgattctcctgcctcagcctcccaagtagctgggattacaggcgcctgccaccacacctggctaatttttcgtaatagagayggggcttcactatgttggttaggctggtctggaactcctgacctcaagtgatctcctgccttggtctcccaaagtgctaggttcacaggc

SEQ ID NO: 691614 - DNA, 1921 bp, Homo sapiens
tttgtttatcttagtactaatttgaaaactttgtttcatttgttatatttctgagatatcctagcatctttcttatcttaattagatctagtatacagaattcctttgtgatttgatctctaagaattctgcagcaactgagtcatcaacctgaaggttaattctcaccatatggggtagacgttgcagtacaagacatggacagttaaaaaaataaaataaaaaaaaataataataataataaaaaaagacatggacagttaggatctgtcttatgcttctttccatctctcatagcacccaagcacaaacgatcaacaaatatttgttgaaacgaaatgctgatgaaactcttgatgtaagtttgttttctcctgagaacacaggcctgacaaaaatcctggcaaactgggttgaagctcaagaaggctttaatattctaatattaaaaaccagataacttcctaaaagggtattaaggaaaactgttcttttcaatttcaaaattaaagcacaataaactttaagtacgaagtaatttctaataaataatgtttgtttgtttgttttcagacagagtttcgctgtcacccaggttgaagtgcagtggcgtgatcttggttcactgcaacctccctctaccaggttcaagccattctcctgcctcagcctcccgagtagctgggattacagttgcgtgccaccacgcccagctaatttttgcattctaagtagagatggggtttcaccatgttggccaggctggtcttgaactcctggcctcaggtgatttgcctgtcttggccccccaaagtgcagggattacaggtgagccaccctgcttggccaataatatgttaaaatatggtagaatctatttctaactaaactaaaccagttatcagtatttgttcagtgtctactgaaaaaaacaaagacataaacacaatacatatcaatatatgtaactgcttttaacgaaaagtaacttttttccaaaacaaaacatttagtgattggccttattttacatttctgcaaggctttttgatatgtggtttaacagaacacaggtcaattttcatacctgtctctgcattcaatcgactgaggtattcttacctcagaaaattctggaaaacacaagaacacacaagtgcacgtttcattagctaacagtgtgatgccatcatgtcatcaaacgtcatgtggctactggaaaactccatgtatacttgtggaaaaaataagcgtgccaaacataaacacacacacacacacacacacacatacacacacacacacacacaaatactttacatcttatggaccctgtgacaggatcctggaaacctctctggggtttctggaccacactttgagaaccagtgccccagtcctgaataatcacatgaccacaaacaccagtactgaacttcatgtggggaaaaaaaaaacttttatgttattgaaggaaagaaaggaatgagggcaacagggctaacttctcaacttattaggaagttaacagataatatcaaatagaagaaaatcagccggaagacttgaaagtggtgcctctggggaataaaaactggggactataaaaactatgttttgttattaaaactatttgatattttattttacttatttatttatttttagagggagtcttgctctgttgcccaggctggggtgcagtggcgtgatctcggctcactgccacctccatctcctgggttcaagcgattctcctgcctcagcctcccaagtagctgggattacaggcgcctgccaccacacctggctaatttttcgtaatagagatggggcttcactatgttggttaggctggtctkgaactcctgacctcaagtgatctcctgccttggtctcccaaagtgctaggttcacaggc

SEQ ID NO: 691615 - DNA, 694 bp, Homo sapiens
ggcttcagtgagctgtgatcacgccgctgcattccagcctgggcgacagagggagaccctgtctcaaaaattaaaaataaataaataaataaataaataaataaattaattaattaattaaaaagctccctatacttgtttttcagtaggtaagaatataatgctcataagccaaagttacataggttcaaagcctcagcctcccaagtagctgggattacaggcgtgtgccaccacgcctggctaattttttatatttttggtagagatggggtttcaccatgttggccaggctggtatcgaactcctgacctcaagtgatmcgcccaccctggcctcccaaagtgctgggattacaggcgtgagccaccgcactgtaagtgagccaggatctcacttcttaacctttgccacttgtttcagagtctctcacccacctgccaagggggcctgggtgacatactaatgctgcatcagcacaaatttctctgttttactggaaaaacaactcaaagtacatgttttgtcatttcaaaggttgtgttcagccaaataattttacattggaggagttaaatatttaaggagtaatttctgtgaaaccaccagactcaggatacatcttttgatcaatagtcaatggccaaaaaataaaataaaataaaataaaataaataaattcaggcctaggtgg

SEQ ID NO: 691616 - DNA, 646 bp, Homo sapiens
gaaaaaaatatttgaggaaatagtgaaggaaaacttcacaaatttggtgaaagacatgaacctatcaatttaaattgagaggtcagcaaacttctaaactcataataatttatgcacaaacacattataatcaaactgcagacaagctaaagacatatwtcttgaagacaatcaaagaaaaataacatattacctagaggggaacaatgattcaaatgtctttggatttctcatcagaaaccatggagccatatatgcaaaagggttgtaagcaaatgagcactaagtaaaaaattaccatcttgctatttattcttaaaagcactgatgaaataagatgtttactaaagtactattggttgtgaaaacaatacaaaatttctgacgtgcatatgcaacctaaaatatgaaatccagaatatagtttgttcaatttttatggaaagtgacatttaacaaagagtaaagcaagaatattttattccctgatttttgtgtgcttaatcagtctttacttagttctcatcattactgtaataggtacacaaaagttcaacttttaagccaaagattgcgtttatgaattctgtaacttagcactgtattttgctttaaagcctgaatattaaaacttcaagtgaaattt

SEQ ID NO: 691617 - DNA, 646 bp, Homo sapiens
gaaaaaaatatttgaggaaatagtgaaggaaaacttcacaaatttggtgaaagacatgaacctatcaatttaaattgagaggtcagcaaacttctaaactcataataatttatgcacaaacacattataatcaaactgcagacaagctaaagacatatatyttgaagacaatcaaagaaaaataacatattacctagaggggaacaatgattcaaatgtctttggatttctcatcagaaaccatggagccatatatgcaaaagggttgtaagcaaatgagcactaagtaaaaaattaccatcttgctatttattcttaaaagcactgatgaaataagatgtttactaaagtactattggttgtgaaaacaatacaaaatttctgacgtgcatatgcaacctaaaatatgaaatccagaatatagtttgttcaatttttatggaaagtgacatttaacaaagagtaaagcaagaatattttattccctgatttttgtgtgcttaatcagtctttacttagttctcatcattactgtaataggtacacaaaagttcaacttttaagccaaagattgcgtttatgaattctgtaacttagcactgtattttgctttaaagcctgaatattaaaacttcaagtgaaattt

SEQ ID NO: 691618 - DNA, 1100 bp, Homo sapiens
ccaagactgaatgcatcctcatctcccatgttcttatccatggcatggaaccgaactagttggttctgcctctgagatctcctttaatctgacagctcctggtcctcctctctgcctcagccttggtcaggatgtgtactatttattcagtcttaaagtttgtttcccagcctccaggttcttcttattcctgtcaatttggggaggtgccaatccctatgacatgtcagcactcagagctcctcatcccaccactgtagacagttaacttaattgagaaagaaggtatactgaaatgatcwttgagttcaagaaatggacatttttgaataaacatacattaagaatatttttatttattcatgtataagttaccaaaaggctaggaagcttatcctagataggaagcacggtgctggacagtatggagtccaaataaataagatgaagtacctgcttcaagatgaacaccaccacaatctatatgccatgactttctcacaataaacctgagtcaattgtacacagcatgactactaaggttgttcaataaagaaaactaaactttgcctttcttaggatgaactttaaatagtaaaacactctgtttcacaacattttttaaaaactgaaaccttatttatgtcttgctgatcttaattagccaaggaaaatccaaaaatttcaactcagatctgaagatcttaaattagaaggagtttacttacttaaaaagaggtatgagaaacaaagttaaatgaaatagctaaaataattcagggtaaaacacaaatttctgatacaggtttaatatttaaattttcaaatacttctaactaatgatcaatatttgaaaatatgtgtcaaatatcctataataagtaaaaatcagtaacgttttcagcattttcagttacagatatgtgatagtgacttattttttagttattaagaatataacaaatgtcaatagacacatacatgcacatgcatgcaggagagcatatacacatgtgcatgggatgctggacagcatgagtgaaggcgtcttaggaaaggtagttcacccacactctggtgctctgttcccgtgcacagca

SEQ ID NO: 691619 - DNA, 1100 bp, Homo sapiens
ccaagactgaatgcatcctcatctcccatgttcttatccatggcatggaaccgaactagttggttctgcctctgagatctcctttaatctgacagctcctggtcctcctctctgcctcagccttggtcaggatgtgtactatttattcagtcttaaagtttgtttcccagcctccaggttcttcttattcctgtcaatttggggaggtgccaatccctatgacatgtcagcactcagagctcctcatcccaccactgtagacagttaacttaattgagaaagaaggtatactgaaatgatctttgagttcaagaaatggacatttttgaataaacatacattaagaatatttttatttattcatgtataagttaccaaaaggctaggaagcttatcctagataggaagcacggtgctggacagtatggagtccaaataaataagatgaagtacctgcttcaagatgaacaccaccacaatctatatgccatgactttctcacaataaacctgagtcaattgtacacagcatgactactaaggttgttcaataaagaaaactaaactttgcctttcttaggatgaactttaaatagtaaaacactctgtttcacaacattttttaaaaactgaaaccttatttatgtcttgctgatcttaattagccaaggaaaatccaaaaatttcaactcagatctgaagatcttaaattagaaggagtttacttacttaaaaagaggtatgagaaacaaagttaaatgaaatagctaaaataattcagggtaaaacacaaatttctgatacaggtttaatatttaaattttcaaatacttctaactaatsatcaatatttgaaaatatgtgtcaaatatcctataataagtaaaaatcagtaacgttttcagcattttcagttacagatatgtgatagtgacttattttttagttattaagaatataacaaatgtcaatagacacatacatgcacatgcatgcaggagagcatatacacatgtgcatgggatgctggacagcatgagtgaaggcgtcttaggaaaggtagttcacccacactctggtgctctgttcccgtgcacagca

SEQ ID NO: 691620 - DNA, 1100 bp, Homo sapiens
ccaagactgaatgcatcctcatctcccatgttcttatccatggcatggaaccgaactagttggttctgcctctgagatctcctttaatctgacagctcctggtcctcctctctgcctcagccttggtcaggatgtgtactatttattcagtcttaaagtttgtttcccagcctccaggttcttcttattcctgtcaatttggggaggtgccaatccctatgacatgtcagcactcagagctcctcatcccaccactgtagacagttaacttaattgagaaagaaggtatactgaaatgatctttgagttcaagaaatggacatttttgaataaacatacattaagaatatttttatttattcatgtataagttaccaaaaggctaggaagcttatcctagataggaagcacggtgctggacagtatggagtccaaataaataagatgaagtacctgcttcaagatgaacaccaccacaatctatatgccatgactttctcacaataaacctgagtcaattgtacacagcatgactactaaggttgttcaataaagaaaactaaactttgcctttcttaggatgaactttaaatagtaaaacactctgtttcacaacattttttaaaaactgaaaccttatttatgtcttgctgatcttaattagccaaggaaaatccaaaaatttcaactcagatctgaagatcttaaattagaaggagtttacttacttaaaaagaggtatgagaaacaaagttaaatgaaatagctaaaataattcagggtaaaacacaaatttctgatacaggtttaatatttaaattttcaaatacttctaactaatgatcaatatttgaaaatatgtgtcaaatatcctataataagtaaaaatcagtaacgttttcagcattttcagttacagatatgtgatagtgacttattttttagttattaagaatataacaaatgtcaatagacacatacaygcacatgcatgcaggagagcatatacacatgtgcatgggatgctggacagcatgagtgaaggcgtcttaggaaaggtagttcacccacactctggtgctctgttcccgtgcacagca

SEQ ID NO: 691621 - DNA, 1100 bp, Homo sapiens
ccaagactgaatgcatcctcatctcccatgttcttatccatggcatggaaccgaactagttggttctgcctctgagatctcctttaatctgacagctcctggtcctcctctctgcctcagccttggtcaggatgtgtactatttattcagtcttaaagtttgtttcccagcctccaggttcttcttattcctgtcaatttggggaggtgccaatccctatgacatgtcagcactcagagctcctcatcccaccactgtagacagttaacttaattgagaaagaaggtatactgaaatgatctttgagttcaagaaatggacatttttgaataaacatacattaagaatatttttatttattcatgtataagttaccaaaaggctaggaagcttatcctagataggaagcacggtgctggacagtatggagtccaaataaataagatgaagtacctgcttcaagatgaacaccaccacaatctatatgccatgactttctcacaataaacctgagtcaattgtacacagcatgactactaaggttgttcaataaagaaaactaaactttgcctttcttaggatgaactttaaatagtaaaacactctgtttcacaacattttttaaaaactgaaaccttatttatgtcttgctgatcttaattagccaaggaaaatccaaaaatttcaactcagatctgaagatcttaaattagaaggagtttacttacttaaaaagaggtatgagaaacaaagttaaatgaaatagctaaaataattcagggtaaaacacaaatttctgatacaggtttaatatttaaattttcaaatacttctaactaatgatcaatatttgaaaatatgtgtcaaatatcctataataagtaaaaatcagtaacgttttcagcattttcagttacagatatgtgatagtgacttattttttagttattaagaatataacaaatgtcaatagacacatacatrcacatgcatgcaggagagcatatacacatgtgcatgggatgctggacagcatgagtgaaggcgtcttaggaaaggtagttcacccacactctggtgctctgttcccgtgcacagca

SEQ ID NO: 691622 - DNA, 676 bp, Homo sapiens
atctttttgaagaatcgccccttttatccattaattgtattttttcatttttagcattcagagtcattaatttatgcttttatttaattaattgtataattttatatatgcatctatatggcttattttgttaacttttctgtattgaattgaaggcctggttgttattttgggccttttgaatttaaatgtatgaatagtgcttatgcttagtaccagcccatacttttgctgtatactgttcttatttttgttgatttttakatctcagaatatagttttgatttgatttacaattttttaaagaaatttgagattttacttgtttagtttttgtttttttcagtaggtctcagttttgatctagcatttatgtggatctagcttgattgtgtgatagtcctagaatgcagtacacattttttttcctgcttctatgggcatataatatacattctttataaggtaccatatgctagattatctagtaaattcatcctattaattatgtgactaaactcattaatattctatttttggtctatttggtcaattaaatttaaagacaaggtgtttaaaaactcttttttgtacagaaaaattggaatgaataaaaattatttaattctagtgagtcaaattttattcttatatctaagaactgtgctttctatat

SEQ ID NO: 691623 - DNA, 676 bp, Homo sapiens
atctttttgaagaatcgccccttttatccattaattgtattttttcatttttagcattcagagtcattaatttatgcttttatttaattaattgtataattttatatatgcatctatatggcttattttgttaacttttctgtattgaattgaaggcctggttgttattttgggccttttgaatttaaatgtatgaatagtgcttatgcttagtaccagcccatacttttgctgtatactgttcttatttttgttgatttttatatctcagaatatagttttgatttgatttacaattttttaaagaaatttgagattttacttgtttagtttttgtttttttcagtaggtctcagttttgatctagcatttatgtggatctagcttgattgtgtgatagtcctagaatgcagtacacattttttttcctgcttctatgggcatataatatacattctttataaggtaccatatrctagattatctagtaaattcatcctattaattatgtgactaaactcattaatattctatttttggtctatttggtcaattaaatttaaagacaaggtgtttaaaaactcttttttgtacagaaaaattggaatgaataaaaattatttaattctagtgagtcaaattttattcttatatctaagaactgtgctttctatat

SEQ ID NO: 691624 - DNA, 597 bp, Homo sapiens
ttttcattctgccaagaaaagttattcattaagactccaaactaccatctccccatagctatcatttcataaaagataaaaaaccctagagtaagggcaaaccttttaaataaacaaatttgtgaaacctcattgccactactcaatccttctatttctcattttattagggactgacaaaaactcatraactagcatatgggaccccagttctggatttaaatgacaacttttctgacaagcttaaactcactgacaaaggatacttaggtttttaatacagatgagcatttccatgttaagcatagtatttattatttatgacagattttcttctaatacatttgaaatcaggccctccccgataatgcaacttcagttttttgtttgtttgtttttgagacgaagacttgctctgtcacccagacttgagtgcagtggcatgatctcggcttactgcaacttccgcctgcttcagcctccccagtagctaggacaacaggtgtgcgccaccacacccagctgatttttgtgttttttgtacagatggggtttcaccatgttggtgaggctggtctcaaattcctgacctcaagt

SEQ ID NO: 691625 - DNA, 597 bp, Homo sapiens
ttttcattctgccaagaaaagttattcattaagactccaaactaccatctccccatagctatcatttcataaaagataaaaaaccctagagtaagggcaaaccttttaaataaacaaatttgtgaaacctcattgccactactcaatccttctatttctcattttattagggactgacaaaaactcataaactagcatatgggaccccagttctggatttaaatgacaacttttctgacaagcttaaactcactgacaaaggatacttaggtttttaatacagatgagcatttccatgttaagcatagtatttattatttatgacagattttcttctaatacatttgaaatcaggccctccccgataatgcaacttcagttttttgtttgtttgtttttgagacgaagacttgctctgtcacccagacttgagtgcagtggcaygatctcggcttactgcaacttccgcctgcttcagcctccccagtagctaggacaacaggtgtgcgccaccacacccagctgatttttgtgttttttgtacagatggggtttcaccatgttggtgaggctggtctcaaattcctgacctcaagt

SEQ ID NO: 691626 - DNA, 867 bp, Homo sapiens
cgaaaatcggaaaagtgaaagtaagaaaggctttcagcagggatagaatgttggaagggctaaccttgatagaaaatacttagcagaatcatggggaaagaagaaaccaaactgtagtcatatttcagagatgaatcaagtctggggcatggtatccttattaaaataaagaatgggaggctgagacggtcggatcacaaggtcaggagatcaagaccatcctggctaacacggtgcaaccccgtctctactaaaaatgcaaaaaattagccaggcatggtggtggacccccgtagtcccagctattccggaggctgaggcaggaggatggcgtgaacccaggaggcggagcttgcagtgagccgagatcrcgcccctgcactccagcctgggtgacagagcgagactcatctcaaaaaaaaaaaaaaaaaaaaaaaaaaaaaaaaaaaaaagaatgaagtatcttagccaacttctaatacatgtgtgtttgttttctcaaatagattttctagcaagagaaatacatgatgataaaatatttagccatttaagtataaaatttatttagaaaatagctaacaaactaatattttatccatggcaaattgaacagctttatcttctatctcttgcaggtctctctgtatgttcaaatctttctgatgcttcacttgtttactcttgagatttgatttatatttctgaaaatccatccatggcaaaatttctttgtgcaaagtatattgatgttgtgactgctgatataccctttactttttcaaccacagtatagacattttatatcattcttccatatacaggaaaggattatatatcaaattagaacagccattaatgattata

SEQ ID NO: 691627 - DNA, 867 bp, Homo sapiens
cgaaaatcggaaaagtgaaagtaagaaaggctttcagcagggatagaatgttggaagggctaaccttgatagaaaatacttagcagaatcatggggaaagaagaaaccaaactgtagtcatatttcagagatgaatcaagtctggggcatggtatccttattaaaataaagaatgggaggctgagacggtcggatcacaaggtcaggagatcaagaccatcctggctaacacggtgcaaccccgtctctactaaaaatgcaaaaaattagccaggcatggtggtggacccccgtagtcccagctattccggaggctgaggcaggaggatggcgtgaacccaggaggcggagcttgcagtgagccgagatcgcgcccctgcactccagcctgggtgacagagcgagactcatctcaaaaaaaaaaaaaaaaaaaaaaaaaaaaaaaaaaaaaagaatgaagtatcttagscaacttctaatacatgtgtgtttgttttctcaaatagattttctagcaagagaaatacatgatgataaaatatttagccatttaagtataaaatttatttagaaaatagctaacaaactaatattttatccatggcaaattgaacagctttatcttctatctcttgcaggtctctctgtatgttcaaatctttctgatgcttcacttgtttactcttgagatttgatttatatttctgaaaatccatccatggcaaaatttctttgtgcaaagtatattgatgttgtgactgctgatataccctttactttttcaaccacagtatagacattttatatcattcttccatatacaggaaaggattatatatcaaattagaacagccattaatgattata

SEQ ID NO: 691628 - DNA, 623 bp, Homo sapiens
gcaggtaaacctgtagggacaaaagcatttttcacctgtttttagtggggataaaaaaccactcatatcctaaaccttgccacyattttagtatccagaaatgctttgtcactaggatacattatataggttcagtctgatgttccaacttaaaggcgaaccactaatatattgttattctctcccctgtcaccttcaaaacctctaaaatgttcttgtttccattaaacctacatcaagaggtccaggggtagtggtgacagtggtgtcagactcacaaggcatactctttctaatcacaaattcctgactttacactgatacaagatccaccccccattcagtaatgttactgaaatttgaaatatgcccaagcttaccgaagtgtgataaaccatataatcccactattctctgtgaaaatgaattacaacgtttactgaacaatttctgtgtacaagtcactcttctaaaagagctttacatgtattaactcactgaatccttttagctttcctattagatagaggctacattacttttaaaccgcttttttgggttagaaactaacccaagttgcaaagactagataaggggctgagcttccttcaaacctaggtctg

SEQ ID NO: 691629 - DNA, 623 bp, Homo sapiens
gcaggtaaacctgtagggacaaaagcatttttcacctgtttttagtggggataaaaaaccactcatatcctaaaccttgccaccrttttagtatccagaaatgctttgtcactaggatacattatataggttcagtctgatgttccaacttaaaggcgaaccactaatatattgttattctctcccctgtcaccttcaaaacctctaaaatgttcttgtttccattaaacctacatcaagaggtccaggggtagtggtgacagtggtgtcagactcacaaggcatactctttctaatcacaaattcctgactttacactgatacaagatccaccccccattcagtaatgttactgaaatttgaaatatgcccaagcttaccgaagtgtgataaaccatataatcccactattctctgtgaaaatgaattacaacgtttactgaacaatttctgtgtacaagtcactcttctaaaagagctttacatgtattaactcactgaatccttttagctttcctattagatagaggctacattacttttaaaccgcttttttgggttagaaactaacccaagttgcaaagactagataaggggctgagcttccttcaaacctaggtctg

SEQ ID NO: 691630 - DNA, 623 bp, Homo sapiens
gcaggtaaacctgtagggacaaaagcatttttcacctgtttttagtggggataaaaaaccactcatatcctaaaccttgccaccattttagtatccagaaatgctttgtcactaggatacattatataggttcagtctgatgttccaacttaaaggcgaaccactaatatattgttattctctcccctgtcaccttcaaaacctctaaaatgttcttgtttccattaaasctacatcaagaggtccaggggtagtggtgacagtggtgtcagactcacaaggcatactctttctaatcacaaattcctgactttacactgatacaagatccaccccccattcagtaatgttactgaaatttgaaatatgcccaagcttaccgaagtgtgataaaccatataatcccactattctctgtgaaaatgaattacaacgtttactgaacaatttctgtgtacaagtcactcttctaaaagagctttacatgtattaactcactgaatccttttagctttcctattagatagaggctacattacttttaaaccgcttttttgggttagaaactaacccaagttgcaaagactagataaggggctgagcttccttcaaacctaggtctg

SEQ ID NO: 691631 - DNA, 750 bp, Homo sapiens
aaacagaataaaaagcaagccagattagtatggctgtataaaaaatttaaaacttgtaattaaaaacaacacaatataacaggatgaaaaggaaagcactagaatggagaaatacttgagatagttaaaagtttaatattatagtatgtgaggacatagtatgtgaggacatatttctaagattatgtcaagggaacttgttatgtcaatgtgttggttcacaccattgaaaacaaaacagcaaaattattgaattatgtaatttattgatcattttaaaatataatcttaaggctgtaaataaatgtctactaactgaacaaaaaatgattttaaaatcctggcaatgctggtgagaaataaatatattgctttcatgttatgtatttagtattcaatcacttgtaacaggagctattaaaatgactacttttttattcagtaatcttaccctttgacattcaaataattgaaacaaataagaacctctgccaggcatggtggctcatgcctgtaatcacagtacattgggaggccaaggcagatgcatagcttgagttcaggagtttgagaccagcctgggcggcatggcaaaacaccatctccaccaaaaaatacaaaaattagtcgggcagtggcacatgyctgtggtcccagctacttgggaggctgaggggggccgagatcatgccactttcactgagccactttcagtgagccaagatcgtgccacttcactccaacctgggt

SEQ ID NO: 691632 - DNA, 708 bp, Homo sapiens
tttaacttcttttttcctctttattcatttagccaaaactcattttatataattgaaagtaaatataatayaccttttggttttagaaaaaaaggaaaatgactttcatggtatcaagaaagtaactgattaagaactattggaatatgaacttccatattaattggaagctttatcatgggaagttaaaatattgccttatatgaagattttattaaaatggtataaacagcagaaattacacttactgagtaacttgtatgtgctaggcattgagtgctttgtagctgaagctcaggaaagttaagtcaattccacagaagtgtggctggtactggtgtttgaacccagacctgtgtgatgacttcagaacctttgctttcgtgttatactgtgctacttcaaatttgttgaagattgtggtaagtattttacatgttttatcttaggaagctgtaagatatattactgataaaccgtgttcatttaaatgagacaagtcatcaattttccttaaaataagaaatatttaatacaggcttttttcccttaagaaatatgtgaaagaagaggaaaattgtcagtgatcctattacagtttggtggaccagtattaataggatttctattatttaagaatatcgagattttatttataaaattgctattatgatataatttttttatattgtaaattgtcagtttgat

SEQ ID NO: 691633 - DNA, 572 bp, Homo sapiens
gcactcctgtaatttttccccaatttgtctttgattttctttttcctttttattgtaaattcagggagcacatgtgcaggtttgttacatgggtatattgcatartgctggggtttgggcttctagtgagcccataacccaaatagtgaatatagtacccaataggtagtttttcaacccacaccccactcctaccctgctgcctcaagtagtccccagtgtctgttgtttccatctttatgtccatgtgtatccattgtctggctcctacttataagtgagaacacatggtatttgattttctgtttctgcattaattcacttaggataatggctcctaattgcatctatgttgcttcaaaggacatgatttaattattttatatgactgtgtagtattccatggtgtatatctataacattttctttatccagttcactgttgatggacactaaagttgattccatacccttcctattgggaataggttgactgatgtctgatgttgagtggaagcacctgccctggtgtgggctgcagggagggaaggatggtaaaaagcgatcatgtt

SEQ ID NO: 691634 - DNA, 589 bp, Homo sapiens
tgttactcagtgacttaagtgtatatcatcccatctgggaraaaaatattgtgggctcacatacccttcaaattttagatttcccaaaaatgcttctatgcctggcaatgagagtgaatttgtactcctagtaaatatagtaaaaagtttgagctgatcactgactattttaattaaataaatgcaatttggtaaaagtagtcgtttagtgtgagatcatatttgtgttactgaccagctagagcttgaggattttgtcttctttgctactgtttttttaaaaagcagtttctatgtaagtttaattctggggaaacaagtttttccttccagataaatttctaggttttctttgatctcaaaaggtaagtagtacaattagctaatctacagcccatctcagactactggtaacagttactcttatcatttaatattctaaatctcaattttctaattttgccttttatataattcgccaactttcaacctttcaactctaggtagggtataaataccagaatagaatttgggaattgaaggaaggactaaaatggtttatcggcattttttagcatgaggaattaaa

SEQ ID NO: 691635 - DNA, 693 bp, Homo sapiens
caaaattcatttaatagtaagtattaccagaacgataatttagcaagggagaaagctttgagttttgttaatctcttgaaatgataactccatctcacagtatcagggtgaggtgcatcctctgggcatattctattccagattgccgggaatggagctcatctcctgctcctgtccccataccctctcaccctggccccaacacctcagagcaatttggcattgatggattggggatttttacactaagtctggcctctgtcgatatcagtggatttaaggaccaattccagcttttgcctgattgtcaacttccaatgagttatgcaagttgggtttgaccctcagaagatgcccaaagtctgccttcattcctttgcagaaacaaaggacacttcttagttttcaagccatagaatgcctccccctgccccaaatgttgagggtttttttwatttgttttgatgtttgtttgtttttttgctggaactggagtgcagtggtgcaatctaggctcactgcaacctctacctcctgggttcaagcgattctcgtgcctcagcctcccccagtagctgggattacaggcgcccgccaccacgcctagctaattgtgatattttttagcagagactaggtttcaccatgttggccaggctggtctcaggtaatccgcctacctcggcctcccaa

SEQ ID NO: 691636 - DNA, 772 bp, Homo sapiens
taaaggatcagatgaagaaagcagatgcgaagtcgctcagatggaaatgtggcctaacccccaacccaaggtctgagagagtgacagaagctagtgtcacctttgaatacaaaacatggctacagatgaattcaagaaagaatgaaaatktattgcttatataattttagggctagtttcttttttttctttcttttttttttttttacgaggcggagtcttgctctgtcacacaggctggagttcagtggcaggatctcagctcactgcaacctccggctcccgggttcaagcaattctcttgcctcagcctcccgaatagctgggattacaggcgcctgccaccacacacggctagttttttgtacctttagtttctttttagttaattattaaaatacaagatgatttattttcaggattcttgaaggcatatagactccctttcaaatgtaaatgagtggaggaaaaactggaagcctgcgtcctcctcctttgctaacaaagggtgtttattagctaggatggcaatgaaaaatttaatacaacgtagtttatagcagtggactgtgtctttggctcctcatctggatgtgtagctctggctcctcatggataagctgtataaagccttattagattcaaatactaaccgtcgctatgccatattaaaaaaaatcattatagctataagctgtatttcttatataagtggggttaaattggttgacttaaagatttccccctttgctaccagtgctaaaaaattgtc

SEQ ID NO: 691637 - DNA, 772 bp, Homo sapiens
taaaggatcagatgaagaaagcagatgcgaagtcgctcagatggaaatgtggcctaacccccaacccaaggtctgagagagtgacagaagctagtgtcacctttgaatacaaaacatggctacagatgaattcaagaaagaatgaaaatgtattgcttatataattttagggctagtttcttttttttctttcttttttttttttttacgaggcggagtcttgctctgtcacacaggctggagttcagtggcaggatctcagctcactgcaacctccggctcccgggttcaagcaattctcttgcctcagcctcccgaatagctgggattacaggcgcctgccaccacacacggctagttttttgtacctttagtttctttttagttaattattaaaatacaagatgatttattttcaggattcttgaaggcatatagactccctttcaaatgtaaatgagtggaggaaaaactggaagcctgcgtcctcctcctttgctaacaaagggtgtttattagctaggatggcaatgaaaaatttaatacarcgtagtttatagcagtggactgtgtctttggctcctcatctggatgtgtagctctggctcctcatggataagctgtataaagccttattagattcaaatactaaccgtcgctatgccatattaaaaaaaatcattatagctataagctgtatttcttatataagtggggttaaattggttgacttaaagatttccccctttgctaccagtgctaaaaaattgtc

SEQ ID NO: 691638 - DNA, 772 bp, Homo sapiens
taaaggatcagatgaagaaagcagatgcgaagtcgctcagatggaaatgtggcctaacccccaacccaaggtctgagagagtgacagaagctagtgtcacctttgaatacaaaacatggctacagatgaattcaagaaagaatgaaaatgtattgcttatataattttagggctagtttcttttttttctttcttttttttttttttacgaggcggagtcttgctctgtcacacaggctggagttcagtggcaggatctcagctcactgcaacctccggctcccgggttcaagcaattctcttgcctcagcctcccgaatagctgggattacaggcgcctgccaccacacacggctagttttttgtacctttagtttctttttagttaattattaaaatacaagatgatttattttcaggattcttgaaggcatatagactccctttcaaatgtaaatgagtggaggaaaaactggaagcctgcgtcctcctcctttgctaacaaagggtgtttattagctaggatggcaatgaaaaatttaatacaacgtagtttatagcagtggactgtgtctttggctcctcatctggatgtgtagctctggctcctcatggataagctgtataaagccttattagattcaaatactaaccgtcgctatgccatattaaaaaaaatcattatagctataagctgtatttcttatataagtggggttaaattggttgacttaaagatttccccctttgctaccrgtgctaaaaaattgtc

SEQ ID NO: 691639 - DNA, 1771 bp, Homo sapiens
ggtgtggtgggtcacacttgtaatctcagcactttgggaggctgaggtaggaaaattgcttgaggccaagagtttgagaccagcctgggcaatatagcaagaccctgtctcattcttttttaaggtataaaaatgttaacaacaacaacaaaaaaccacagtcttgttgagagaaaaaagaaagatcaacactggaaatggtaagttaactgagaagacagtaatttgttttaaattgtcagaaagagacttagcaaaatggactctagtgaacttttttccgatcttccattactggaaaatctaatgatcagaatgtcctagataatgcccaaactaacttaccactcttcacaaatatgaagatttagaaggaatgagcgaacacaccacaaatcattttgcaagtaggaacatggccccagcttgtgtgtgaaactgctagaggtcagccacaagttcagtctccaaatggaccatctggctttgcttatgtctatgaatgcagtttacctcccacaccatctaatattcacccttcaccctgaatgcaagaaacatttgttattgagagggcactaagaaatcatgtcaaatcatatcaaatgatatcaaatcatatcaaatcaaatcatatcaaatgaaataatgagaaaattaagcccacagatttatatgaaaaaggacaatagcatcaaaggcagaactactgaggagactcctcagtgagagtggtccagaaaagagctctgggaaacaatatcccaatgaacagacaaaaataagcttcaagaaataaattttattaaacacttttttttttttaagatggagtttcgctcttgttgcccaggctggagtgcaatggcgtgatcttggctcactgcaacctccacctcccaggttcaagcttcagcctcccaattagctgggattacaggcatgcgccaccacgcccggccatattagccacagtcaatagcctatgctcctggaatggagggcaggtgcttggtgcatgcagagttcatgctacctgcactggatgtccaggggctcatgtagacctctctttgtttctttatcatgaactttaaatttttttctctcctttcttttccccctagtggaacaactgacaatcttcttagaacaactaaaaaagctgaaaaaatactgaaaacatcccactgaaggcctcagtgagttaactaactactgaagaattattagaacttagaaaaaacaggaatccagaagtttaactcagctctttgggagctttgtcaattattcaagaggtagccaagaggctttttgctcttttgactacctgtacggctaaaaggacaaaagtcagagtccggggcctctagaggaaggtatgcctggtaaacacccttaactttgagtttgcactctgaagagctgccctgtagcattaaagtagaccaggtctcacggatctgaagccagctccaaatcatctcaagccccaaaaactggtgatccccactgttagtgcccaaggtgtctggtgagactttctgactctctagcctagtctagagaaagatgacactattttatgattcaaacaatgcctccaaacaggttttgaaatacaatatctaacacaaagtgaccaagcacacaaagaaatagggccggcgcagtggctcacacctgtgatcccagcactttgggaggccgaggcrggtggattacttgaggtcagaagttcaagaccagcctggctaacatggagaaa

SEQ ID NO: 691640 - DNA, 639 bp, Homo sapiens
cttccaaagtgctgggattacaggcatgagccaccgtgcccggcctggcccaaaattttaaagctagaaatgacttcacaattaagctcattttactgataaggaacttgagggctacaggtgaaaaattagcttttattatagcagagtttaraaacagttccatcagaattttttattttatgttgtttcttttttgcttgtaagctaaggggtacatgtgccagtttgtttcataagtaaacttgtatcatgaggggcttgttgtgcagactattttgtcacccaggtattaagactagcatccattagttattttttctgatcccttccctcctcctaccttccaccctccaataggctccagtgtgtgttgttcccctctgtgtccatgctttctcatcatttacctcccacttttaagtgagagcatgcagtatttggttttcttttcctgcattagtttgctaagaatgatggcccccagttcatccattttcctgcaaacggcataatctcattctttttatggctgtatagtattctctgttgtatatgtatcacattttctttatccagtctatcacagatgggcatttaggttgattttatgtttttgctgttgtgaatactgctgca

SEQ ID NO: 691641 - DNA, 639 bp, Homo sapiens
cttccaaagtgctgggattacaggcatgagccaccgtgcccggcctggcccaaaattttaaagctagaaatgacttcacaattaagctcattttactgataaggaacttgagggctacaggtgaaaaattagcttttattatagcagagtttaaaaacagttccatcagaattttttattttatgttgtttcttttttgcttktaagctaaggggtacatgtgccagtttgtttcataagtaaacttgtatcatgaggggcttgttgtgcagactattttgtcacccaggtattaagactagcatccattagttattttttctgatcccttccctcctcctaccttccaccctccaataggctccagtgtgtgttgttcccctctgtgtccatgctttctcatcatttacctcccacttttaagtgagagcatgcagtatttggttttcttttcctgcattagtttgctaagaatgatggcccccagttcatccattttcctgcaaacggcataatctcattctttttatggctgtatagtattctctgttgtatatgtatcacattttctttatccagtctatcacagatgggcatttaggttgattttatgtttttgctgttgtgaatactgctgca

SEQ ID NO: 691642 - DNA, 651 bp, Homo sapiens
gagccaacagctttagtgtcttcagaaggatgaagaaaacttgaacaacattttaaaatagcttgagatataattcacatcccagagagtgcatccatctaaagggtacaattcaatggattttagtatattyacggagctgtgcattcatcactacaattaattatagaacttcttcatttactcaaaataccccagcaccccttagctatcaccctgattcctctatctcccccagccctaggcaaccattaatcttttttgtatccatagatttgtctatcctagacatttcatataaatggaatcatgcaatatacgacccttctttcactttgtgtaatgctgtcaaggtacatccacgtgatatcagttcctcattctttttatggccaaatcacattccattgtatggatatattacattttatttatctgttcatcagttggtggacatttgggttggtttccatgtttttggctgttaggaatgatgtccccatgaacattcatgtacaagtttttgtgtggacatgtgttttcatttctcttggacatatgcctaggagtggaattgagtcacatggtaactttataaccatttgaggaacttccagactgtttttcaaagtggctacaccattgtacatc

SEQ ID NO: 691643 - DNA, 651 bp, Homo sapiens
gagccaacagctttagtgtcttcagaaggatgaagaaaacttgaacaacattttaaaatagcttgagatataattcacatcccagagagtgcatccatctaaagggtacaattcaatggattttagtatatttacggagctgtgcattcatcactacaattaattatagaacttcttcatttactcaaaataccccagcaccccttagctatcaccctgattcctctatctcccccagccctaggcaaccattaatcttttttgtatccatagatttgtctatcctagacatttcatataaatggaatcatgcaatatacgacccttctttcactttgtgtaatgctgtcaaggtacatccacgtgatatcagttcctcattctttttatggccaaatcacattccattgtatggatatattacattttatttatctgttcatcagttggtggrcatttgggttggtttccatgtttttggctgttaggaatgatgtccccatgaacattcatgtacaagtttttgtgtggacatgtgttttcatttctcttggacatatgcctaggagtggaattgagtcacatggtaactttataaccatttgaggaacttccagactgtttttcaaagtggctacaccattgtacatc

SEQ ID NO: 691644 - DNA, 1741 bp, Homo sapiens
gtcttgctctgtcacccaggctggagtgcagtggcatgattttggctcactgcaacctctgcctcctgggttcaagtgattcttctgcctcaccttcctgagtagctgggattacagtcgtgcaccatcatgcctggctaatttttgtatttttagtaaagacaaggtttcaccatgttggccaggctggtcttgaactcttgacctcaagtgatctgcctgcctcagcctcccaaagtgctgggattacagacgtgagccaccatgcccagacaaggcctctacttaaacttgctcattcatttatcttacaagcattttttgtgtcttacaatgtgccagaaaccagggatataaagataatgaagacaaagtttctgccctgaactcacagtacrggggagtgattagtaatcaataagcagaaactagtgcacagaagatgtaagtgagaacccacaggaagtgatgtgaaatctgaatggggaaaaggggatgtggggaatcgccacatgcctgacttttgaatttggccttgaaaaaatgagcttggttttgccagcaggagaataaagaaaaggacatttggggacacaattcaagaattgttggaatgtgcagaaagcaaaggcacaaaacaccgtgacattgtgagtttgtggcatgtgtgtcagatgcatggatgagaactggcacgggaaatcagacagcagggcccaggctggtaaagattcctatatgcctttgtcctgaagaccttacactggagaggcacaagatcagcattttagctaagcattagtggtcaatggccctgagcaggcacaaccgccacctggaaggtcattgcagtggcctgatggagaagtgctgtaggcctgagcagcagctgtgaaagcagagaagacaggaagggtagggacttatttagacaatagaatcagtagaaactgatgaccaaatccagagggatgagatcaaggagggagaggaatgagtggggaaggggaagtatgttggttgaactctagaatgaattagatggagaaattagaaagagattgcaactactaagcaaaatagggactaaaggaaaaagaataatcttgatatcagcttgggacatagtgacatggattgaggaataggtaggtaaagatgtctagttagtgggtgagaatattggactagtggcccagagggagatcagggctagtcatctaggtttgttgagctacctgcatgctagacacagctgtagagagtcagcaagattgtccaggagaatatgcattttgcaaagagaagaggctcccttgaggaacatgaatattcaagcagaagatggatggctagaatataagcaacatgcagtagagatgtttgtctgttctgttgactgatatgtgctaggcacaccttaaatacttcttaaacaaatgcagggtaggagggagataaattatccaaggagtctgagaaggaattatcagagatagacaagaaaaacaggcattaagtggtattgccaaaatcaggggagcaagggagaagagattttcaaggaagagagattggtgaagagtaccacatgtggctgagaggtaaacgttggggaggtctggagactttctttcttttttttttctcctccctttttctaaaattacactttaagttctgggatacatgcacagaatgtgcaggtttgttacataggtatttatgtgccatggtggtt

SEQ ID NO: 691645 - DNA, 597 bp, Homo sapiens
caacctagaggctagaccattctgctcattccacaggtaacctttacaaactcagagggcacatagcccgggtctgctggcatctgctgtctttagacacatttaggaagctatgtggctaagacatatcctaggaactgcttgctacctgtttgacctctttgcctgttctagttttcttgaccaatatggtgagtaggtcaggaaggctgtgtgagcatatatgaaaactaaggtcaattctaaatcaggggagtcttcmttgaggagaggcatttcctttggttgcagtgaacttgatgtccccttccgggctgctctgttttttcctaagctgcttacacccattctccaggccattctcaataccttcaaccttcaccaacctgagccagggactctttaagctcagaatcacctgggaaagaagccagaggcaggccctgctttgaggctgcttctaaaagtgggggtaaaggaggactttagaccagaaggaggaggaaacggtgacttcagggatggtaatgaccagtccacatctctgtctcatagcccaacgagtccaaccactcgcacaggctcaggctgaggtca

SEQ ID NO: 691646 - DNA, 2042 bp, Homo sapiens
tggaaaaatgacttaattatagttaaaaacattatataaacaagtttataatggtcagcaatagaaaaaaatttcttttatattagcactatatatgcaagtagattttatattccacctcaaatgtttcaatatgccattcattttcattgtaatgtgaacttgtagctctatagcttggcctcttacagagacaatctgtgactctttggagtttggatggcttagaataacgacatgcacatttcattaacgagcatgttttcacatgtcacagaatatactatttttaaaaatatagcattttaaatgtaatttatttgtgtatattggcaaaagatgatattaggtctttttatttaagattttgtttgyttttattgacatgtggacagggggcagaaatttttgcttacctctaaaatcttgacctagcgaggtcaagataaattaaggaacttaagatagaaaagtgatgagaatttttgtgcatgtaataaattggaactgtgtcatttgcaagcttgataaatgttctttgatagcccatatttgatagcaaattttaatgcacttgatttttaatggtctcattgatctacggagacaaagtacagagttcatagcttatctaatcttcccctgaacccattccagactactattccttaaggaaatgatatttttaactttagaatgagcaggtctcaattatctactgccattaagaaagcagtgactggaatatgatgatttttgtttgatttaaatctttataacttctatgatgtaacatttttattaactgtattacttcaccagcacaatcttctgaatactgtgaaaagatattatagttaagtactggagtgtgcttaacaagatccttcaaatgttcttcttctatatgcttaaagacaagtaagaaaaaaaatcatttcaattaatatgtaagagatgaaggtgacctcaataagttgtaaaaattcttcttcaaacttttagatggagttgtttctgaattattcaaatgagaccttcccatctgcaccccattttttagacaatccagcccatcaacttttggtattcatattgcattttctctagggacagaggtattattagctttgtaagagacacatgtccttcatatatttcatgttaatgagtagggtaagttgagtggaatcattttagaaagagaccaattttgataaaaatggaagcattaacataaaagctatgtttccctgactgaaatttaaaatatccttgtttgaaatatatatttgatttagccagtagttgttccttgcctctgaataagagagcctccaactcagaggttaaagcaagttttaagcacattaaaagatcacacattacaacataaaaagaatagtgattaagttcattttgcaactttataacaaaatcatgtagtagttaacattagaaaacataataacataatacacctttattcgattatttactatatttatcatatacactatgttcatgtaaagtgttttatttataaacaaacataattaaaaacaaaatagtcaatatgaaacaaaagcaattttaaaagacaaattaattattttcatatagaggataattggtatttcaacattttgatacagatttgagtaaaagcaaaagtaaaataacacagatgagtataataatataaagtcaaacattgcaaaaaattcaaggccaatgctggaatgtatagaatatttggcaaaacaatttattaggagagtaacaaagtgtttataagaactttaaatgcttgacatattaactattaggtttgattagtaatcttcttgtgaaatgttttattttctcttgaatggatctgagatatatgcaaattagtaaaaacttaattaggagatcaatcatcaaatcatacattaactcttcagtattttcatggataaaataattagaatatagtaaaaattatcttatttttaagctgaagtctatataataaaaaaataaacctaggaaagggc

SEQ ID NO: 691647 - DNA, 981 bp, Homo sapiens
gtgtgttatctttccattccctgtgcccagcataacctgcattggggatgctcactcagtactggatactggtggagtgagcccccaccatgtgacaggtcctcttttgagccttgggatgcagcagagaagaaaatgggtgaaaatcctggctctaatggagtttagactctagtggaggtgatggggagacagacaataaataygtgacattcctaggatttcagagggtaatattttctacaaaagaagagaaggcagggaggggtacagggagtgctggagtagaatggccaggtaggagcttgctgagaaggtgacacttaaggaaacacttgaagaaagtgagtggtgagccaggagcccttgtggagggagaaagccctggcagaggggagagcaagtacaagggtgtgggtgagaggaagggcagcagatttcacaggcccttgtgagacaagatttttaaaaattggcttttactttgaaggggatgggatgccatcctgagggtttccttctgacttacatttaaggggattaatttgaataaaagaatgaatgaatgaataaaatcctttaggcaaacagctcattctgatgtttacttacttttaaaatgatttccagtccatttcattctggctaaatgagttcattcattctctgggcacctattgtaggtatcagaccctggagttgagtttgcatatgctctctcctctcctccaacacttcctgaatgtcaaagagccagtgcaggtaaagttctctaggaattctcaggagggacggcttgtttgttggttggacatggaagtgctggcgcagtttttaggcccatgttattggcattattttcaaatttagcttgaaaccaagaaaagaaatgttaacttttgaagtgtgggagtagattttattatgttctttttcttcatctttcccatcatttttgatcctgcagcactttgcaggatt

SEQ ID NO: 691648 - DNA, 2488 bp, Homo sapiens
tgggttgtcaggcatttatcctatgccaccacagtacaggttctttggagaatatatatgtgcatatatacacacgtatacatttttttcttagacacattagaaagggatttatgataaagtcactggatgaaattaaatagtttaccttaaatgtcacctacgcaggtcacctctctaatgaccacagccccaggagcagatgaatttaacacgggtgttgaatatgttgtagcctgtgaatcatcttgtcactgtcaattttctgggatatctctattttgcaagaaaagaaagttattcctaattctggatgcgtctgggggtctctggaggacaattgccctgtgtttcccctatttggaagtttggatctcacaaggggggtggattgcacttgtcaatgtcatttatgcactcctgattatattcccatttttttatttctgtcataatgtaggtacacgaattatgtgacaatttctgccaccggtatattagctgtttgaaagggaaaatgcctatcgatttggtgatagacgatagagaaggaggatcaaaatcagacagtgaagatataacaagatcagcaaatctaactgaccaggtatgcgcttttcaatttcaacatccctgggaaaaaaaaaaatctgtatgcatattgcttgctgggtcactaccacctccttttattatttgcatatgattaagtcccttttagatacatttccatcgaaatgaaaatttttgaataatgtggctattattgcttcattaaggctggctctgggattcgacctgaagagatgagcttgtaaaagctttgctagcaaacttgacctgtttcttgtcgcttttaatttttgtctttattttatttaccctctataataatgggagtgttaactgccagtgaccgcctctgattgtaggggctttgttccggagcatttttcccccttctatcttcaagaaaagacaagtgtagggtctgcttatttcttattttattaggaataaatccaagataggtggtctaagaaagacagcgagagtttgaaatctagcaaatgctggctattttctccctgtctgtacggttcattagcctgtcttgtcagttttcctcggccgaacgcttctagacctcactgaacattgctttgtgtggtgttcactgcaagctcacccattttattgtacttaatagaaaaaataagaccaggccgaggttataaaaacagataaatatggacttttctcctccttctttccactcatcctccagctggtatgtgctctgggccctctgggttggcagcttgtggacatatcagcatcaggggcaccccggcggctccctgggtaaggagtgtgggggacctcgcaccgcctttgctctcaactgagggccttggcttgctgcaccctctcctctcctgtcttccctccaggcccttcttccgatgcgttactaagtggggacgacttttatttggaattgctgtggggatttctctctctctgtcaccccaacaccaccgtttgctcccagggtgcctctctctctcctgtggctgtatctctggattggtccaaaggagttgcaaaaatgcaatgaaagtgaaaacgtgtagagtgagtgagatgaaacagggctcagaacagttccgttgcgaattgttgcaaggcgtctagagatttgggtagctggcctgctctgcaccctcccacccttcccccctatataagtgaagtcccagtgttgtttctctttctgactcggcacgtgagtccagatttgggggaagagatcagcctgcctttgttaagccaaaggccagctactctgcaagctctgccatgatctctgttggccagtggctgtcttgtacagtccttgtcgagcgcctgacgcctggttcttagtgtcatcttatggttttcttctctcaacatcatcctcttaaaatacattctcagcttgattttctctgggcaatccccgcgacatgggctgaattcctcttttgcccatggggagcgagaaacaggcagagcagagatttaaaagtgccaatgcgccgggtccgcactgtgatctggagagttggaaactttcggcagtgtagtccattgcacagaacacgcagcgtgcgcaatcccagtgcggccccacagaagtgggaaaactgcaggcggctcccagccttggcccccgcgggcggcccgggcctcacgtctggttcagcccgccagccctggcccgggagctgttgagtgcmgattctgctgaggaaccctcgagtagctgctgtggaataaaaattgcaatccaacaagcctaactggaaaatgggattctaaaagctccggagtgctgggtacataaagctatttgagcaaattacaagaatcgcttaggggcatgaatgaaatcaacactttaattgcctccaaaatgaagatttataccccattttctcaa

SEQ ID NO: 691649 - DNA, 594 bp, Homo sapiens
tgttatattttaaaaaccagcaaatatatttttaaaatcacctaatggaaaaattggcataggatatgaatttgcacttcatgaaaaataataactgcccaagtgctcttatatgttaaacctaaccaatgaagacatacaaataataataattatgaaatagttttcatgcgtgtatgtttcaaacggtcaaatatgattaaaaaaaaccaccgtgttgtcaggagtatatgaaaaaattctcagtctattcttgaagtgaatataaattgaagcaaaatttggaatgcctattactaatgtatattaaaatttacaaccttttactctctgactcagcaattccacttttagaactttaccctgccagtatttatacaaacgtattctttccaaccttatttgcagtagaaaaaaaaattagaaacactacaaatgactcccagtagggaattgggtaagtgaattatgatctgagtatatggtatcatactctgcagtcactaaagtagtaagattaaattatatatgtgattaagaggacaaagatatattttgaagtgggtacaaattttcaaaamaatatgtctagca

SEQ ID NO: 691650 - DNA, 653 bp, Homo sapiens
ccttctggagcttttagaagcaacagaagcattcatgtaagaagagatttagaaaactacctaaagtattagggtcatgtacttcctaaataaccccccttacctctaggagccagagatcaccaccatcctgggtgttgttatcaatgaacagtgcttgaaaactccaggtccttcatctttggttttatttttgactctcagaataaccttagggaccctttcaagtttcagttggttcaaattaaaatgaagaggccaaactagattgtctctgtggtttctgtggggctgagaytcatgatgttggatgttaatggcaatgtagatttctaaatagtgtgaacaaacttcatttttagataggctaatgttttcctattgtagttggagccttgatcttaaaattatgtcatctggaaagtgatacttgaaaggttttaggccctcaatttattctgggaacaagccttttagtcatattcataaattttctaggtaaaaaatattcatttgctttattctcaaatagctcctgggaaagccccaagtgaggaaaatgatccaaatgcggatgcttaagatgaaggttcaaagtaccaactttaaatcattctccatagatttaattgtatcagggcatccctgcatga

SEQ ID NO: 691651 - DNA, 1487 bp, Homo sapiens
taaaaatacaaaattagccgggcatggtggctggcacctataatcccagctacttgggaggctgaggcaggagaatcacttgaacctgggaggtggaggttgcagtgagctaagatcatgccactgcactccagcctgggcaacaagagcaagactccatctccaaaaaaaaaaaagagaaataaacgtttttcctactcaattaagacattatttgtgtttctgttatatgaagctaaacagaatcctaatgttatactttttacttcagtgattttttttttaatcctcaaacttctacttattgtttccttttctttcatttccaaagggagtgatcctggtctggcatttctgatgtctgcatttaaagttgccatctaaatcatcaatctgttttctgctactatcacagaataccacaaactgggtaacaaaatttatttggcttatgcttctcgaggctgggaagcatggcactggcatctggtgagagcctcatcccatggtggaaggcaaaaggcagaatgcaaaggacaagcaatcatgagagacagagagaaaaagtagggagacccctgctataattaaccactcctgaaatgagagcattgaccatcttatgagagctctacctcttaaatgtcccatctctcaacaccatcacagtggcagttaatttcaacaagagttttaaaaggggggatgtttaaaccatagtaatcatgatagaagatttttttgtttgtctttattacgcatatgcagcccccttgttagtaacagtaacatggccccctgggctttagcagggccgggggataaaaccaaggtgacttgcctacctgagaactgtgtcctgctggctaatttcattagccttgttgcttgactttatgaaatgactggtccaggatgaaattctgctagtttttcttcctaattatgtttatatattagctgttttaccaccctttcaaagttataagtttctgactctgtaatctgatttcgaagtcctgaattatgttatctccaagtagttgtacttataatatcaaaaatttgttattttctaagtagatgatatgaaacctttgaatttattttttggctgttactgtctttatgctgataaaatatgttaatgagcagaaatggaggtgaaataagattaaacttgtgataacctgaactaagcccacctttaaattttcaaatgtggagaacaattggattgttgaacaggcttatcaatccagttttgttccatgtcaccacaagagattcttgaggaaactgggtgagcgttgattactgtttgagaatttgatctctccaggacataacctttttgagaacaccatctttcagcaccatttttatagtccaagtgatgaaatacagctttgcattttattttagtatgttatcactgaagcacttgtcacttatctgagttgrgtattagtctctttgataggttg

SEQ ID NO: 691652 - DNA, 2814 bp, Homo sapiens
ttctgccataatcatggcatcaccttcctcacacagcctcagtactcacacacctgagctggatgcttccaccaaggaccaaagtacccagctggcgatgtcacccacccatctgatacttggtcatgaccaggtcctcagcgatagtttgctcttgctgctcatccctgcccaacatcttcctaccaccagcagtgcagcctcattttccctgagccacctcctctgtctcccatcccagctgcaggctgtggtcagagcacaccttggatcctcgagaagggggcaagtgaaagcgcaagtaagcaagagagcaggcaggcaggcgagagcgagattttggggattcctatatatgggtttacattttaatgtcaatgtttattttttagagtctgttaggaaatttttgtatttgttaaacctagtgttctccctattatgtataatgtataactgaataagcattagtaactttataattttttttgttgttttcaggtacttagggttaaggagaaagcaacaatttgttgaaaatatatctttaacacctttctaatgattgctagtacccattcttaaaaacatgaaagccattattgaccactgatcaggaaactgcatctaagtatgacttaacagtattatttggttttcattgtatttatttttacgtatttaccaaacattcatggcaaacggtattaatttcttacttacggtactgatttaaattttatattttacataattgtgttgcaggacttttccttacttcagctaaagacggggttcttgtctggcccacgaccatgaaaatttaggttcacagatggtttaaagggtgagtaaagcagggttttattgggtgaaaaaggggaaaaaaaaaccaagggagaaaccctccgctacagcacttcctgccagagggttggaatcctaggttccgcacaggaagaggaggggccaagcttcaccccactgcaaagggcatgaacttcccaaggctccacctcagtggggaggctggttggagtttctccagggaccgcctcccacctggctgtctcaattgtttttaggtacaaatagcaagttgatgcaaagaaaaatatataaagtaaatcatggagattatatgtgatttggcaaaggtcatgaaggataccatcgctgaaactaaactttggaataaattagtcttatcaaattacaaaggtaagataattttttctttttttttttgagacaagagtctcgctctgtcggccaagctggagtgcagtggcgccatcttggctcactgcaagctccgcctcctgggttcaggccattctgcctcagcctcccgagtagctgggactacaggcgcccaccaycacgcccagctaattttttgtatttttttttttttagtggagacagggttttactgtgttggccaggatggtctcgatctcctgacctcgttatccgccctcctcagcctcccaaagtgctgggattacaggcgtgagccaccacgcccggcctggtaagataatttttaaaggtgcttaacagtttaatcatgatctaggccaaattttttaagtggaaattgctggtcagtaagctctaatcactgtaagactgaggactatattataattgcatgtgcaaacttgtggctagcataatgccagaattcagtaactatttgtggaataaatgagcagatgaacagattctgcattcccatcttctttctggcatcaggtctcaacttcaaaaatttcttctttgcctaccaagtacctggatacttgactctaccccttggctgtcacaatgcctctaaaaatctcatctgtactctgtagttcaaaattgtgtttcctcctctcatggccaaagcttcctattgttttgagattgatattaaaattatgagattgtaaagtcattcatactaagctgcagaactgacatgtctaattgccacaaaatggatgtcattttaattgatgcctttctgaatccaaagtaatgcctaattgacaaaatgcattaataacactcatcttaagactagggactttctagatgtaacatttatatactgcacaaaaaagcggaaccctatcatccactcattcactggtttttcaagttcttgttagtgtaaaagaattaggagaattgctagcagtccttgtaacactggctggctaggttttagtaataaaagcacctaaggagctttcttaaactgcaaattcctaggccttatcttccggatatttgcttttagtttttcaagtgaagatatcacgacccagtaagtttcaatgacctacccaaggtcatacagacaacttgctgtcagctggaactaactttcctagctctcactatagggttctttctattatagagactatgatgattgaaaacagctctaaaacttttgttaaatccctgaattcttagtttttaagaaaaggagacatgttactaacaagagatatttttgaaaagggcttgacattttatgtttatgtgttttgctggcatggttgataggaaagcatcttacacagcacacacttacgtttgtatagttggttatccatggaatatgtttcataggtgtgaatacttatgtgtcttacttatcatttttacatagcatctacctgtccgtaatggattctaacaattgtttgaataattaaattaatacaaataataataactaatatttactgagctttgattacatgctggtactattctaaacccatatacatgttttatgtgattaaaaac

SEQ ID NO: 691653 - DNA, 599 bp, Homo sapiens
aatttccaacttcatgggactttttttttttttttttttttttttttgagatggagtctctgtctgtcgccgaggctggagtgcagtggcgcgatctcggctcactgcaaggtccacctcccgggttaacgccattctcccgccttagcctccccagcagctgggactacmggtgcacgcggccacgcccggctaacttttgtatttttagtagagatggggtttcactgtcttagccagagtggtctcgatctcctgaccttgtgatccacccgcctcggcctcccaaagcactgggattacaggcgtgagccaccgcgcccggccacttcatgggatcttaagttttaaactgaaaaagacaaattaacctgttggagtcttaaatttaaactgatgaaggtgacatagatactatatatagatactatggctactgattttaaacagtttgtgatggcattttaacaaatcacatgtctcccaatgtgatgtctatcctagaagaggttgtatttcaacaaatacttactttgggcatagaaaaaggttggtggggggggggccctaaccttataatccgttttgttttgtttttt

SEQ ID NO: 691654 - DNA, 599 bp, Homo sapiens
aatttccaacttcatgggactttttttttttttttttttttttttttgagatggagtctctgtctgtcgccgaggctggagtgcagtggcgcgatctcggctcactgcaaggtccacctcccgggttaacgccattctcccgccttagcctccccagcagctgggactaccggtgcacgcggccacgcccggctaacttttgtatttttagtagagatggggtttcactgtcttagccagagtggtctcgatctcctgaccttgtgatccacccgcctcggcctcccaaagcactgggattacaggcgtgagccaccgcgcccggccacttcatgggatcttaagttttaaactgaaaaagacaaattaacctgttggagtcttaaatttaaactgatgaaggtgacatagatactatatatagatactatggctactgattttaaacagtttgtgatggcattttaacaaatcacatgtctcccaatgtgatgtctatcctagaagaggttgtatttcaacaaatacttastttgggcatagaaaaaggttggtggggggggggccctaaccttataatccgttttgttttgtttttt

SEQ ID NO: 691655 - DNA, 1339 bp, Homo sapiens
tggcctattgatttgaactgctcttataattctggcacactccacatattaacaattctttctaatccctacttggctgggtaatttatgcataggtcaggaagtcagcctgggctgtagctggctccatatacataccatgtgaaatgacatttagtatttgttttcttcctgatagggcctgtgcttccttcagagactcacacaagaggtttatcatgagaaggaccgcactatttcatttcactcctacaagttttcatttacgttacacattgagaaagttatgagaagcaactgtcactctctggaggtggagactgccgtgattcacaaagacaagaggtaattttcctgtaatcacaggatgactcaggttagtagctttcagcgcttctgcaactcacataccatgaggtgtttttagcaatgtgcatatttagtgaacctaattcttcccaatccctataattttaaatttatgacaatgtgatataaagtaagttggaatttatttttgcatgaggtggaaaacagtatttgaaagtagttgtacagggtatgtaaaaattataagaacatatttagcatttttagaaagcaaaatacttttgtaggacttaaacatatttttaaatgagatttttatcacacaaaagtttacaatatcatttgtacttggaaatgatatatagatgttaagtgtgaagttgcatgtattaaaaagtaaaatgaaaaagctatgcattttgtaattaggtcttttttataatgtaagttgtcttttaactgttcggaccaacttgcattttcactttagaattgtagtttaagtgtgtctttgaaatttaaagcagaattttatgctctctcttttttaattctgtgtcttctgtggcatttataataggagagccatttccaatatttrtatttctttttagttatgaaaaagtgaccatcgtatgcctagattgtacctataatacagacctggctgggcgcattggctcatgcctgtaattccagcactttgggaggccgaggcaggtggatcacctgaggtccggagttcaagaccagcctggccaacatggtgaccccgtctctactaaaaatgcacaacttagccaggcgtggtggtgggcgcctgtaatcccaactactcgggaggctgggttaggagaattgcttgaacccaggaggtggaggttgcagcaagccgagattgcgccactgcactccaggctgggcaacaagagcaagactctgtctcaaaaacaacaacaacaacagacctctggggcagcaaatcagaaaacacaaaataaaactggaa

SEQ ID NO: 691656 - DNA, 1408 bp, Homo sapiens
cctgtcagctttttcttccaaataaaacattttaattattcagaaagttttgttattaaaacaaggcacagccacagctttctcccctcctctcccttttcttctcatgggtaaagcatattggcttcagtttcaaaagtgggacttcctcaggcctggaatacacaatttaaataatacaaagaatktcaaatattaatagtactggactcatagataaagtatatgaatgataaactgttttaaaaagtgatgttgctatttatggatttttagatactcgcttatagttcttgaaaaattacaaatctaaaatattgcctttatatcctcaacctgttaaaactttcagaagttatattctgaaatccagacttttcccagactcttttaaactattttatcaatccattccttaattttctcctcaaaacaagtttatttctacattttttataatttttcccactctgttcagctagtagctcagtaatgacttttgctgaattgttacagctatatttgctaaataattctactcaatcaaagtctaacaacattctctgcctatgtgttaagcttccattaccacatagaattttaaatcaagggtatttgatcagtacgatatatgactttttaaataaaaatactacttaaaatacaaaggagaatatcatattagtcagagacattataagtgtatgttgatcattaatattattatgtaaacatttttttcttcaaaataatgtttcaaacacacctcagatattttctgtgtagtgtattaaggtgctaagaattatttctacctctagagaaaatgaagacagtagtacccccctataaagagactatggaagggagaattttgtgtgtaaatatttcaattcatatgcgtgtatgtttatatatgtttactatgtatttccatacacagccattgtattcgtcacttttaaaaaaattatattttagaagatattcggtgtctaatctctaccttcatggtttattatttcaatggttgcttgtaggatcttttgccgcttttggagtcactgtacttttaaaacagtggtagattaagcacatcctttctccataccagccgtaaatttttaaataacttttgcttcaataccatttttgagactagttcctaagcttttttcagtaactttctacccttggatttgggtttaaatggcagatttttttcccaaaagctatatacaaaacatatttttatcttctagaagataaaagcaattaatagtcttcaaatccattgtaatgttaagaagtagatactgagtatattttatcttaaaaagaaaaatacaagatgagtttcataaaagttccactaccatccttaggaagaagtaaatctatattaata

SEQ ID NO: 691657 - DNA, 1704 bp, Homo sapiens
tgggatattttatttctttaggcctgaaataacatattgtaaggaatttttatgaggttatttgtttgcagcctaaagatgtttcaacagtgtctgaattgtctatacaatttagagctgttatataggctattttttatgcaaaattggataagcatatagaattttaatgagcttcaatcattttcaaaattatctatttcttaagcaatgaagtcgtttaaaacgttgtgattagagaagatgaattctaagggaaaataatgtaagggattatgatatgtgaaagctgcctgaaaacaagaattaattatctgctgaataaaaagacgtatgtcctccaaaaccctttatttgatttatgcaaattagttttatatcacatctgagtgaaggtttgtaatgatttaccttaacaatgaatggtcttaatgctaaaggtggacagctaaacaggagaaacaccattattaatatgtacaataaaggctacgttgtcaatagaagttgtgaactagaaatgagcccagtaccaaactcctacctgactacagaaaaactcttgttgtggagcagtggggaaagaaattattttctgaaggtttgtgctataagcttcccctaagaatatgcagaaacatttgcatcactgatatgaccgaaaaatccaaaatgatatctttaactccaagtgtatcatatgtgctcccccaaaagtgaaacagttataattatcaaaatcaacttccagaatgcaaatatgtcacaacctggccctgagccatattctatttaaaaatggcatttatctgtatcctcaactctataacctgaactcccagatgggtttggcaagcagtgtcaagagttacatactaattcaatactagcaaagggaatataatgagctgtgattaggaatcattgatacatttctatcattctcattttttttatttaaagcatgaatcagtttwaaaaaagcaatttcacacaaatgaaactgaacttcagtagaggttaatattttattgccagtccatcactgacataagttagcaaaggcaaagtttgcatggtttttctttagagcttgtggatatagttcatacacaaattctattcaatgggttaccataccacaagtagtaataactaaaaggggttctattctcccataaatattttataatttatgaagaataacaaaatagtcatttgttcagcttaccttttgtgtttattctgtttatcaatgctatttaggtaatgcaataacataaggcaagaaaaataaagcaaaaggccttaagaaaagcatttcaatttttttatagatgatatgatcttttatataagaattagtataggatctccaaaatgctgctagaaccaataagtgaatttaacaatgtgcaggatataagatcaatacacaggatcaattttatatccatatattcacaaaaaacaattgcaaaatgattttagtaagctaatataacataatagcatatacatatcttaaaatggatctataaaaattgtgcaaatcttttacacagtacactacaatgtagagctaaggaaatattaaaaagatttaaataaaagtagatatgtaatacattcagaaattatgactgtattttatgatattcattctgcataaattaatacatagtttcaacacaactgcattca

SEQ ID NO: 691658 - DNA, 1704 bp, Homo sapiens
tgggatattttatttctttaggcctgaaataacatattgtaaggaatttttatgaggttatttgtttgcagcctaaagatgtttcaacagtgtctgaattgtctatacaatttagagctgttatataggctattttttatgcaaaattggataagcatatagaattttaatgagcttcaatcattttcaaaattatctatttcttaagcaatgaagtcgtttaaaacgttgtgattagagaagatgaattctaagggaaaataatgtaagggattatgatatgtgaaagctgcctgaaaacaagaattaattatctgctgaataaaaagacgtatgtcctccaaaaccctttatttgatttatgcaaattagttttatatcacatctgagtgaaggtttgtaatgatttaccttaacaatgaatggtcttaatgctaaaggtggacagctaaacaggagaaacaccattattaatatgtacaataaaggctacgttgtcaatagaagttgtgaactagaaatgagcccagtaccaaactcctacctgactacagaaaaactcttgttgtggagcagtggggaaagaaattattttctgaaggtttgtgctataagcttcccctaagaatatgcagaaacatttgcatcactgatatgaccgaaaaatccaaaatgatatctttaactccaagtgtatcatatgtgctcccccaaaagtgaaacagttataattatcaaaatcaacttccagaatgcaaatatgtcacaacctggccctgagccatattctatttaaaaatggcatttatctgtatcctcaactctataacctgaactcccagatgggtttggcaagcagtgtcaagagttacatactaattcaatactagcaaagggaatataatgagctgtgattaggaatcattgatacatttctatcattctcattttttttatttaaagcatgaatcagttttaaaaaagcaatttcacacaaatgaaactgaacttcagtagaggttaatattttattgccagtccatcactgacataagttagcaaaggcaawgtttgcatggtttttctttagagcttgtggatatagttcatacacaaattctattcaatgggttaccataccacaagtagtaataactaaaaggggttctattctcccataaatattttataatttatgaagaataacaaaatagtcatttgttcagcttaccttttgtgtttattctgtttatcaatgctatttaggtaatgcaataacataaggcaagaaaaataaagcaaaaggccttaagaaaagcatttcaatttttttatagatgatatgatcttttatataagaattagtataggatctccaaaatgctgctagaaccaataagtgaatttaacaatgtgcaggatataagatcaatacacaggatcaattttatatccatatattcacaaaaaacaattgcaaaatgattttagtaagctaatataacataatagcatatacatatcttaaaatggatctataaaaattgtgcaaatcttttacacagtacactacaatgtagagctaaggaaatattaaaaagatttaaataaaagtagatatgtaatacattcagaaattatgactgtattttatgatattcattctgcataaattaatacatagtttcaacacaactgcattca

SEQ ID NO: 691659 - DNA, 654 bp, Homo sapiens
gagggctgactttgcccatacatgagatctgtagggcaggtattttgctatgtatggggatcctcgaaccaatcccctgtggacaccaagggaggactgtatgcatcgtggaatgcactgtgcctttcaaatagcgctgccaggaccaagtaatcacatgtaagcttgcagctggaggagtaattcataatgtggaagctgcatccatttttgttttatatgtataagtatattaatcatayacaggcctgggatttagtagtgagttaggattaatatacatatagtgatgtataccttaaagtggatgtattttaccatttcttttcttttcctttctttaaagctgctgcaaaagagctaattctcaggcacctgagattttctttgccttttttttttctctcttttgaaatgtaattgtaatggtggtattttgttggtggtgttcattttagatctcctgattttgatgcagttttttctctatgaaaaatgtattgcattgcagtgagtttttcttcagttaatgaggagagtctcctacaacatttcaaacagggcatcaggcaaagctacgtattttttaaacttttatttatttattttgacattttccaagcactgccagtgtttcttactaatgaacgattt

SEQ ID NO: 691660 - DNA, 611 bp, Homo sapiens
ccagtcattcttatatttttctatatgtaataggaggtgcctccaagcttctggttaagtaatgaagtaaataaaatttaatcactttcttctcagtgaaaagtatattatgccatgcactatgtgctaagtacaaagtttttcactgagaaagtgatcaaattctattaataatgcaatcaaattttataaataatatgagtaagtcaagtcaaataaggactgagaaatgactgcttatgaggctcataaaaaagaaaacaaatatatttgaagtttgaaacaaacaaaatggaaagaaaaagatcaggaaaatactaacaaaagctaacagcaatttttaacattagactccaaaacaaaatttaaaagatggaatatttcacattgctgccagaaataaaataattgctatccacttggtatcagcagcctcacaaatctaccatcccagtagtggcatgtgaataaagtagttctggtaggaaatgcgtgggcccaacagcasagcttcgcatttacgagcctgctgctatgatttgaatgtttgtgttccctccaaaatttatgttgaaacttaatcgccaatgcaggagtattaactggtgagg

SEQ ID NO: 691661 - DNA, 585 bp, Homo sapiens
gaattctttttgcaaaaaagattttgcaaaatgagattttgatgaggagacgtgttatctgactccctttgcagttatagagaggccatggatatggacatcattttcctcttttggagtcagatattgaaactcaagggcaaggaaggaaaagtaacaccatgaatcccaaatgaagaccacctcctttcccctcagatctgggcctctgctgtgacttaggatgtctgttcttattttgttttcacccatcaccaagaatgaagccctcagtgccatctttgtcttcttattctctcccctgtctccaccatacccatttgttgcaaaacttctcttggctcttttatgctgtctttcgtctcttcccccctttcgcccactccattgctgctcctctgatgcaggccctttaaggaaggggagcsggggacataaagggtggctgcatgtgcactggcatcccgggagaacccccaaatgggggatcagtgtactctctcttagatttttaggaactgaacatcaaatctggaagcctgagtatgtcctaactcagggagtcgcctctctagtccagagttt

SEQ ID NO: 691662 - DNA, 1332 bp, Homo sapiens
aaaaaaaaaaaaaaaaaaaaaaaaaaaaaaaaccagaaaagaaagaaaaagaaattgaaggagttcctagttttaatctataatcactttctttttccccaagcctttaataaaagccttgtgtgtaacagctttgttgtattagtccattttcacactgctattaatataaagaactacccaagactaggtaatttataaatgaaagaggtgtaattgactcacagttccacatggctgggaaggcctcaggaaccttacaatcatggcaggaggtgaagaagaagcaagtaccttcttcacaaagcagcaggaaagagagaagtgcaaaggaggaacttccraacacttataaaaccattggatctcatgagaactcactcattatcatgagaacaatatgggggaaacagcccctaggatccaatcatctccctccctcaacaagcagggattacaattcgagatgagatttgggtggggacccagagccaaaccatatcacttgtgctggtggagcctgtagaaataaaggagtgattgtgtttgtgtttcagatgaaatgagagtggctcttatcctggataactatcggttggctaattggctggatccctcactggattataaggaacactgtcatgaaaccaggggccttgtcatgatcatcatgtagaatcgtactaggaaactaattcaaactcaataaacatttgttgaataaatacaagaatgaacagcacacagcagctgcaggaggacagggaatgctttggatttgagagctgggctgataacagacatttatagacagtagcaataggaccctttttgctgtttatccatcaaccctcaaatcccaagtagagtactggacttcccacagttaatggggaaggagctcaagcagttccatttggacatgaacagaaaaggcccccaaaagaccacataactcaggggcaatcagtttccatcatttttttatagttatctttcatattagattttttcaggtaaaatttacatatagtaagtgaaaggcaaatatcctaagtgtacttgatgcgttttgacagtattctctcatgttaccaacatataaacaaaatatagaacatttccatcacccaagtaagttccctttgtgcccctcttccagtcaatgcccaacacctttctcacagacaacacgttttcttatgtcattcaccatagattcatttaacctgtcacaaatgtcatataaataaagtcaatagcgcacactttttgtttggcttcttttgtgcaacgaatgtttttgagatgctttcatgttgatatatgaat

SEQ ID NO: 691663 - DNA, 1284 bp, Homo sapiens
tgtaacatatggtcaaatgcaggtcatttctagcgttctgttttccatgctttccccaacaacaactacaaacttattaggtgcccatctgcctcttcaaccatgatggcagcctccaggttctgtctccttgatgcccactgctgatccaacacaaatgccaggaccttcagggtttttgtttacagtagcacccatttctagtactgatatacatagtggtcaagataagttagattatggtgtggtgataaccccaaatttcagtgcttctcagaactaaagctgcctcctcaggcatgggcctccctggtgcccaccgcagggaaaaagggaggatgcagacccactcatgggtatctcctgcttctgcctgcaagttacttagacctagaacagcatctcccacacagaagacattcagtgtactttatggattgaatgcatgatttttagctttataattaacattaatgtttaataagaaacacacacactgataggatttggctgtgtccccacccaaatctcaccttgaattgtaatgatccccacgtgtcaagggtggggccagatggagataattgaatcatgggagtggtttcccccatattgctctcgcggtagtgaataagtctcgtgagatctgatggttttataaatgggagttcccctgcagaagctgtcttgcctgctgctgtgtaagacttgccttgttcttccttctccttccaccatgattgtgaggcctcctcagcgatgtgcaactgtgaattaattaaacctctttaccttgtaatattacaaggttcattaaacctttttaccttgtaaaaaatataccttgtgtaatttctttttcagaaatgtctggattattctacaagtattttcctttttcttttttttttttctttttgagagagagtgttgctcttgtttcccaggctatagtgcagtggcacaatctcggctcactgcaacctccacctcctgggttcaagcgattctcctgccttagcctcccaagtagctgggattacaggcttgcaccaccacgcctggctaattttgtatttttagtagaggtagagtttctccatgttggtcaggctggtctcgaactcccaacctcaggtgatccacccacctcagcctcccaaagtgctgggattacagacgtaagccacctcgcccrgcctctacaagtatttttcttacaaataaaacctagaattatttggtcaagttttaaaaaatcccattgggatactgattggatta

SEQ ID NO: 691664 - DNA, 1321 bp, Homo sapiens
tgctacaaacacctcccattcctgttcttaaaccagaaaacctatatttacatgtttttataacaaaatgatgatcctaatccaaagtgggaaattagtgcaatcaagctaacatttatttcaaatataagtatgccccatttttaactaaacttgatacatgaatcctgaacgcagaataatagaaatgttaggagctagagaagggctttagagatcatataatacaacctcctaattttatagatgaagcaattgaaataaaagtgtccatttttcacccaaattaaaatagtgctagactacatctgcggtctcctcacttcagggttatagatctaattacaagagggagctcaattatttgcatgagatcttttcaagagcatctacatagctacagaatttttttaaaaagatttaatttgcctgattattggcagtaaacatttcagaaatatggaaagcaaactgcctaaactgggtctcacagatcaatagaaaaatattgtttttatgccagaacagtggccggcccataattggtgtacaacaaatatttgttgatgaaagtgtgccaacctaaagaaagtattgccatcactggctcaatagagtccatatgtccaactcaaagcaaggcaccgtgaatagaactgcgtgtgtatttctttcatattcttaaaagtcgatctaaaaactgcaggatttaagaagatgccggtaagagtctcagcataattcaccgaaggcatttttgataagaaaactctttataatcctccaaataagtaactcttaaaattgctatgattctccaaatgatttagaaggagcaaatctaaacaggaggctaaactggaagctctaacactcattttggcaatcagggaactaagactttaggcttagtcctaatcttgcacacacatagtaactattaacactatcttcaaaaaatctgacctctctccactcctactttctcctaagcagcagaaaagcaagcggtgttcaagaggggtggttttctcgaaaggaatctgaccccaaaggtaytggaaagctttgcaccccattcaccacctggaaaacctcgggcaagaaattttccaagggctagaaacaccctacagcaaccacgggagaataccaaagccttccccgctcgatcccgtagcccccttaccacccaccttgcaaagccgagcccggaaatgagcggcccgaggtccgaggtggggcgtgagtgacgtgcagaggcccaagcgagcgctgcaaggagcgagggctaaaggagtctccggcgcccattttgtcc

SEQ ID NO: 691665 - DNA, 651 bp, Homo sapiens
attgtatttcttcaaaagttttacatgttgctttacattcagacttataatacattttgatttaacctttatataaggtgtgaatcatgggtctatgttcattttttagatatagatctctaattgctttctgcacaattcattgaaaatacatttctctattgaattttctgcacctttttaagaaaattaattaataataatggtataggtttgttctgtgactgtatctttcgcacccaatatctatttacatacagtaatggtttytatgtagaaaatccccaacaatctataaaacaaatcctaaaacaaatacgtgattttagtaaggttgcatgccacaaggacaatgtaaaaaaaaaaaaaaaaaaaaaggaaatgtaggttcatataccttgtttctgatcttagtggaaaagcactgagctttccactaataaatatgatgccagttatttctataataagtgtcttatttaaggttaacgaattatcttcctattttttagtattttgagaagtttaacaggaatagatgttgaattttgtcaaatgctttttctgcatttatgagatcatcatatgaattttcttctttattaatatgattaattacattgattttctaatgttaaatcaattttggat

SEQ ID NO: 691666 - DNA, 1435 bp, Homo sapiens
aaagttaaagaaacatatacctagcttctcttgatagcagcagttgtttttattttaacsacaaaaaaaaaataaatcgaagtatttaagtaacattttccccttacttatatttgtacgcatctgggaattagtcaatttaagctgtcccatcaagatgaaaagggataataaactcgctgtgtgcttggataagcctctgagaaaagagcaaagggcccaagcttgaatgtagattccagtgttgtttctcatttccacattatggtttggggccataaattccaaccacattgcaaacaactgaagaataaatcaaagacactagaacttcagtcttgcagattatgtagtgaagaattttttaaggtatttaaaaaatatcatagtgggcacaggtttccaggatgccaaaaatcacacagaataaatgcataaacctgaaaataaaattcgcaacaaataaaaaatataatatgaatcaaactcccacaactataagtagaggagtatcatccttgtaattactctacaaagtaaggtaattattgcttgtatatcaataccaatataacagcaatttcaccaaccaataattttaaatcattttcaatataaccatcatataaattttacattcaattagctgaaatgactgaagacaaaattcgaaacatatgtagtaattacagaggtaaaatacagaaaatcaatttgaaaaatgaaacatgcacaaaataaggtcaattttctgcacagtgatggaattctaaagcaacagattatattgagcccttattaaaagttactaaatttgccatactatcttttctaattttaaaggtatactttagggattaaatactattttctgagactacaagcaataatttagtatgtaaaatgctgatatcactgagtcactatctacctggtatgtgtatttgtttgtttagcattgtgtaaagattcattctctttgcaatcaataacatatatttgaaacataactgtgccaaaattatgtttctcaccaatagaaaagtttaataccctaccacttcaaagatcagaggtaacagagtaatggcaaatcaatttttgtgacactagtggcatcagaaatgagaactgatctatggtacgactgagatactagctgtcgatcaaaacactaagagatcaatctacaatatgtagtaagaaaggctgactcatattcattttaagttccatgttctgtcagaaatgaatctctccttcaatgtattaaatttagcactggctgggtgcggtggctcacatctgtaatcccagcactttgggaggccgaagcaggcagatcatgaggtcaagagaacaagaccatcctggctaacatggtgaaaccccctctctactaaaaatacaaaaattagctgggcgtggcgatgca

SEQ ID NO: 691667 - DNA, 594 bp, Homo sapiens
ttccaaaggtatctcaagttcaaactaatattccccacattaagctcatcttcccttttttctccaaacttctcttgcccctccatttctattattagataatactgattaattttgttttcctcaagtcacttctccagttagccatgaagtcctagatacactctggctttcatgtctcacggctatcccatccttaccatctctaccagccctgtttttatccctttgtcctgcttcctgcaatagccttcctaattcatctgcatggggtttcctttctacgtttcctacatcatgcacagtaagctttccaaagcataaaggtaattgttttactcctygcttaacatctttatgtgtctcattactttcagggttcagtgtgagcttctcagccagacctgtgtgatctggcctgtgcttatctagatactttattaccatacaactctgtgtctacataccacatttcatctaacttatttatttgcagttcccctaatacacatgctatctcatgcacctgtttgtgtttactattaaattcatctaacaccattggcttactttaactgatccatcaaaattcat

SEQ ID NO: 691668 - DNA, 1675 bp, Homo sapiens
tgaagataagaaaaacattccatgcagtaaaactagttttgtcggctcaaagtttggggaatgacatttatccaaaggccaaatgtcccatcttcagagcagaggcatcatacagctatggcctcatcacagaacgcagaccatctggaaaagtggccactcaccacaccctttaggccttccctgacagagagagagcacgtgtaatgctggaytgctgtttcacagctgctggctccagatattccccaatggaattctttaattagttagctctctctagcctattccccatggaggatgaaacaaacaaacaaaaaagatgcaaaaggctagcacctgcagccttcctgtgctaagactgaatagaacataggcactgagagagtcctctaagcaaatgagggtgaaataatgcagccaggaagcttaacagagtctgccaataggaagagtttccagtggcttaagtgtttggacagttaaattatgactgaggaaatattagaataaaatgtgtatttaattcccactgcagggttgacctgacacaccaaaaactgtcttgtgttgaggagagcagagtagaagtaattctatcaggtcagtttgggtaattttcattttctctttgaacaattatcttcagagaagtgacttgctctaccataattaaactgaacttaaattccctataatcccagcactttgagaggccaaggtaggcagatcacctgaggtcaggagttcaagaccagcctggccaacatggcaaaaccccgtctctactaaatacacaaaatcagccaggtgtggtggcacacacctgtaatcccagctacttgggaggctgaggcaggagaatcgcttgaaccaggaaggcagaggttgcggtgagccgagatcacaccactgcactctgccctgggtgacagaggaagactccgtctcaaaaaaaaaaaaaattgtgattgaacattagatttatctttattttcaacaaattatccacttgaggccaggagtttgagaccagcctgggcaacatagcgagacccatccttgcaaaaaatttaaaaattatccaaacatcctgatgttcactgtggttccagctactcaggaggctgaggtgggaggatcacttgagcctgagaggttggggctgcagtgagctgaggtcatgctactgcactccagcctgggtgacacagtgagaccctgtttaaaaaaatacacacacacacacaaacacatatacatatatatacctaatctccattagtagtagtagtagtagtagtagtagaaaatttttaaaatttctgttataggatgtcagaaaatattcattatgacattaatttcattatttaacaatataggtttatagccaactatgtttaataaatagcacaattttttaaatgagaaatatttaaagagtataaaaataatttcatagaatattaaaatatacatatacacaaagattctaagattgtaatttttgagaagcccccaaatgtttggagccttttaaatttttgtagtatgttctatttttgtctcacatgtacttcttgttcaaattatacaaaaatttgttctttgtttttacaaatactggttggtgaatcatatggtgatatactgggatttgaatattacctta

SEQ ID NO: 691669 - DNA, 1675 bp, Homo sapiens
tgaagataagaaaaacattccatgcagtaaaactagttttgtcggctcaaagtttggggaatgacatttatccaaaggccaaatgtcccatcttcagagcagaggcatcatacagctatggcctcatcacagaacgcagaccatctggaaaagtggccactcaccacaccctttaggccttccctgacagagagagagcacgtgtaatgctggattgctgtttcacagctgctggctccagatattccccaatggaattctttaattagttrgctctctctagcctattccccatggaggatgaaacaaacaaacaaaaaagatgcaaaaggctagcacctgcagccttcctgtgctaagactgaatagaacataggcactgagagagtcctctaagcaaatgagggtgaaataatgcagccaggaagcttaacagagtctgccaataggaagagtttccagtggcttaagtgtttggacagttaaattatgactgaggaaatattagaataaaatgtgtatttaattcccactgcagggttgacctgacacaccaaaaactgtcttgtgttgaggagagcagagtagaagtaattctatcaggtcagtttgggtaattttcattttctctttgaacaattatcttcagagaagtgacttgctctaccataattaaactgaacttaaattccctataatcccagcactttgagaggccaaggtaggcagatcacctgaggtcaggagttcaagaccagcctggccaacatggcaaaaccccgtctctactaaatacacaaaatcagccaggtgtggtggcacacacctgtaatcccagctacttgggaggctgaggcaggagaatcgcttgaaccaggaaggcagaggttgcggtgagccgagatcacaccactgcactctgccctgggtgacagaggaagactccgtctcaaaaaaaaaaaaaattgtgattgaacattagatttatctttattttcaacaaattatccacttgaggccaggagtttgagaccagcctgggcaacatagcgagacccatccttgcaaaaaatttaaaaattatccaaacatcctgatgttcactgtggttccagctactcaggaggctgaggtgggaggatcacttgagcctgagaggttggggctgcagtgagctgaggtcatgctactgcactccagcctgggtgacacagtgagaccctgtttaaaaaaatacacacacacacacaaacacatatacatatatatacctaatctccattagtagtagtagtagtagtagtagtagaaaatttttaaaatttctgttataggatgtcagaaaatattcattatgacattaatttcattatttaacaatataggtttatagccaactatgtttaataaatagcacaattttttaaatgagaaatatttaaagagtataaaaataatttcatagaatattaaaatatacatatacacaaagattctaagattgtaatttttgagaagcccccaaatgtttggagccttttaaatttttgtagtatgttctatttttgtctcacatgtacttcttgttcaaattatacaaaaatttgttctttgtttttacaaatactggttggtgaatcatatggtgatatactgggatttgaatattacctta

SEQ ID NO: 691670 - DNA, 657 bp, Homo sapiens
tgaaatataaaaaggtagagtatcaagaagatacaaatccaatatgattgctaatgtgaaatytcagaattgatgggagcttcctggcaacatcaaggaaaagggctgaatataagcaattttgtaattcttctattcacagagaagcaaactttgtcctgaacagctttgcaatctctgtagtttgtagtattcttttcacacgtctttctcgtcattctttttaacaacagtgataatgagcagtaaccccggtcatcatacgtgcacagctcatgtgacgtagtgtatccttaatatcctaacacacagtgtagagtacctaaagtcagaacttttaagagagatacctgtaaatttgggcattacatcagagagtatttttttaagttttgaaagttctcagctcactgcaccccttgttgttagtgggggttgataaagccaaaggtacatgcatttcctcaatttgtaaatagtataagtacaattgcaccatgacaggcatcagcaaaaattttttatattaaaaacctttttttttttttttagaaattcagagaacatagagaaggaggaatgcaaatgatcagattgtgttttgacagaagaaaagctgagtagttcacacatagtcaaaattatcttgctaaagtc

SEQ ID NO: 691671 - DNA, 657 bp, Homo sapiens
tgaaatataaaaaggtagagtatcaagaagatacaaatccaatatgattgctaatgtgaaatctcagaattgatgggagcttcctggcaacatcaaggaaaagggctgaatataagcaattttgtaattcttctattcacagagaagcaaactttgtcctgaacagctttgcaatctctgtagtttgtagtattcttttcacacgtctttctcgtcattctttttaacaacagtgataatgagcagtaaccccggtcatcatacgtgcacagctcatgtgacgtagtgtatccttaatatcctaacacacagtgtagagtacytaaagtcagaacttttaagagagatacctgtaaatttgggcattacatcagagagtatttttttaagttttgaaagttctcagctcactgcaccccttgttgttagtgggggttgataaagccaaaggtacatgcatttcctcaatttgtaaatagtataagtacaattgcaccatgacaggcatcagcaaaaattttttatattaaaaacctttttttttttttttagaaattcagagaacatagagaaggaggaatgcaaatgatcagattgtgttttgacagaagaaaagctgagtagttcacacatagtcaaaattatcttgctaaagtc

SEQ ID NO: 691672 - DNA, 1735 bp, Homo sapiens
  misc_feature 375, 376, 377, 378, 379, 380, 381, 382, 383, 384, 385, 386,387, 388, 389, 390, 391, 392, 393, 394, 395, 396, 397, 398,399, 400, 401, 402, 403, 404, 405, 406, 407, 408, 409, 410,411, 412, 413, 414, 415, 416, 417, 418, 419, 420, 421: n = A,T,C or G
  misc_feature 422, 423, 424, 425, 426, 427, 428, 429, 430, 431, 432, 433,434, 435, 436, 437, 438, 439, 440, 441, 442, 443, 444, 445,446, 447, 448, 449, 450, 451, 452, 453, 454, 455, 456, 457,458, 459, 460, 461, 462, 463, 464, 465, 466, 467, 468: n = A,T,C or G
  misc_feature 469, 470, 471, 472, 473, 474: n = A,T,C or G
tactgaataaaaatagaatgtataagataagctatgtgaaattatatttagtgaaggagctggctgaagttttaaataactattgatctcttattttaattttattcctttacaaataaaatatttttaatttaaagtactatattattttcactgatactcctttaaatatgaatactcaatctttactttttaaactcaaatgtttgttttggttcccctcctttattaactcagctatttatttagatyaatttccaccatctttcataaaattttcagtgaaaattatgtactaaggtttgctttgaattttgtaggctattgcttatgtaagcaccattggtaattttgtcagacaaagaattccgcggnnnnnnnnnnnnnnnnnnnnnnnnnnnnnnnnnnnnnnnnnnnnnnnnnnnnnnnnnnnnnnnnnnnnnnnnnnnnnnnnnnnnnnnnnnnnnnnnnnnngactcagcctcccgagtagctgggattacaggcatgcggcaccacgcccggctaattttgtatttttagtagagatggggtttctccatgttggtcaggctggtctcagactcccaatctcaggtgatctgcccgccttggacttccaaagtactgggatgacaggcgtgagccactgcgcccggcctgggctatttttgtttcccacagatgtttacaccagaatggctgttgcccggtttgattgcgccagtgtctgacagctgtgtggtgcctgtatcataacagttgttaaataatttgaatatataatgtttaaatatgtagcttgtctttgatcttttgacaacagagatagcttcatttacctaaaggggtactgattttaaaaattaattcatttgaatttaaacacagcatatgctagacaaaactcttagggaaagaatatgtatatacgtgcatgtaaaccacacagactgaaagagaagcattcagtacataaattattaggctcaagtaggaggttactatagagttagctgctacttattttcagaatttgattttatattttgaattggaagaatgccgatctgggagtcaaaaactcttaattttgagccatggatgcataaccttgggtattttaatattgggcttagtttactggtttgcaaaagagatgagtggacaagatatctttaaagtctattctaggcatgaattttcatgattctgcagtatatgttccttttaagaagtgagacattaccaggataaatataggaaaaactagtagtatccccttaccccctcaccctcctgagtaaccaatttaatatgcacagaacatccttctatcatcctttttggtacacacaaacatatataaacaaaaataaatgtatgtaagctttcttgcctgaaaaaagtaaaataaaatatacattattcagatgtgtttccctgctaatagacatctgaaagtcttcagtttttatttttgtcactataaataatatttcagtaaacaccattgtagaagtatcactatatgctgatgcttttgttttttttctgtcagatacatttttgaaaataggatttttgggtcaaaggtatatgcagttttcattttaatagataattgctaatttatttctaaaatatttgtggtgatttagaatggtaacagtgccaattgccagcactgagttaatattttgttttctattgctgctcacctgaaggctaaaaa

SEQ ID NO: 691673 - DNA, 1735 bp, Homo sapiens
  misc_feature 375, 376, 377, 378, 379, 380, 381, 382, 383, 384, 385, 386,387, 388, 389, 390, 391, 392, 393, 394, 395, 396, 397, 398,399, 400, 401, 402, 403, 404, 405, 406, 407, 408, 409, 410,411, 412, 413, 414, 415, 416, 417, 418, 419, 420, 421: n = A,T,C or G
  misc_feature 422, 423, 424, 425, 426, 427, 428, 429, 430, 431, 432, 433,434, 435, 436, 437, 438, 439, 440, 441, 442, 443, 444, 445,446, 447, 448, 449, 450, 451, 452, 453, 454, 455, 456, 457,458, 459, 460, 461, 462, 463, 464, 465, 466, 467, 468: n = A,T,C or G
  misc_feature 469, 470, 471, 472, 473, 474: n = A,T,C or G
tactgaataaaaatagaatgtataagataagctatgtgaaattatatttagtgaaggagctggctgaagttttaaataactattgatctcttattttaattttattcctttacaaataaaatatttttaatttaaagtactatattattttcactgatactcctttaaatatgaatactcaatctttactttttaaactcaaatgtttgttttggttcccctcctttattaactcagctatttatttagatcaatttccaccatctttcataaaattttcagtgaaaattatgtactaaggtttgctttgaattttgtaggctattgcttatgtaagcaccattggtaattttgtcagacaaagaattccgcggnnnnnnnnnnnnnnnnnnnnnnnnnnnnnnnnnnnnnnnnnnnnnnnnnnnnnnnnnnnnnnnnnnnnnnnnnnnnnnnnnnnnnnnnnnnnnnnnnnnngactcagcctcccgagtagctgggattacaggcatgcggcaccacgcccggctaattttgtatttttagtagagatggggtttctccatgttggtcaggctggtctcagactcccaatctcaggtgatctgcccgccttggacttccaaagtactgggatgacaggcgtgagccactgcgcccggcctgggctatttttgtttcccacagatgtttacaccagaatggctgttgcccggtttgattgcgccagtgtctgacagctgtgtggtgcctgtatcataacagttgttaaataatttgaatatataatgtttaaatatgtagcttgtctttgatcttttgacaacagagatagcttcatttacctaaaggggtactgattttaaaaattaattcatttgaatttaaacacagcatatgctagacaaaactcttagggaaagaatatgtatatacgtgcatgtaaaccacacagactgaaagagaagcattcagtacataaattattaggstcaagtaggaggttactatagagttagctgctacttattttcagaatttgattttatattttgaattggaagaatgccgatctgggagtcaaaaactcttaattttgagccatggatgcataaccttgggtattttaatattgggcttagtttactggtttgcaaaagagatgagtggacaagatatctttaaagtctattctaggcatgaattttcatgattctgcagtatatgttccttttaagaagtgagacattaccaggataaatataggaaaaactagtagtatccccttaccccctcaccctcctgagtaaccaatttaatatgcacagaacatccttctatcatcctttttggtacacacaaacatatataaacaaaaataaatgtatgtaagctttcttgcctgaaaaaagtaaaataaaatatacattattcagatgtgtttccctgctaatagacatctgaaagtcttcagtttttatttttgtcactataaataatatttcagtaaacaccattgtagaagtatcactatatgctgatgcttttgttttttttctgtcagatacatttttgaaaataggatttttgggtcaaaggtatatgcagttttcattttaatagataattgctaatttatttctaaaatatttgtggtgatttagaatggtaacagtgccaattgccagcactgagttaatattttgttttctattgctgctcacctgaaggctaaaaa

SEQ ID NO: 691674 - DNA, 1600 bp, Homo sapiens
aaacaaaaatatttaattcacctgaactttaaaaaatatataaatagtctaaatttgtatttttacatggggtttttaatggagatgtactgaattaaaagctcattttgtcatatataaggctcttatgtgtacttggatgtaattctagattccgtgctctattctctagatttgcttattcatgtgccagtgctatactattctattttttttaaaggtttaaaacatttatcactaaagatactagaatgttctttgaaaacctattaagacatttaactattcttttatgctattctgatcaaaagaaagaataaaagtttaggaaagggaaaaatgcacatttcttaaaaaagtttatttctagccctgaaagaacaaaattattgaacaaagtcataaaatacagcagttaatgtcaatgtataacaattaaataattgaatgggattaaattaaaaataaaagacattataaaatttgaagacaacagaaaagacaaactataattttacttaattccatttctatcacaacaagaaaaaaaagccaatgcgttccaaccaaagatgctgaattccaaacataattgtttctcttaataaagaatagaagtgtgcttgacagaattatcatccatttctttctgcctctgtcttggcagcattctagagaagtgaatgggaaagacttccgttctttcaaggccaggccagtgcttgcttcttctttctaactccaacctcgtctaccacagcatctttgccagagtgttcaatcagtgtgttgactgagaaaaaagaatgtgtgtatatattttttcttatatacacacactatcaaaaaactgatttcaccagtttcaatacctactgtgggagcagcagagacaggaagacaatctgcttcttgtattactatgaagttccactataaaaaaccccaaatgagtattaatctggattttagctataatctataatattttgacactgacatttcactagatgtggatctcagtatatttaaaaagatttagactcaaaaatggatgcaaattctttaagcayctattttgtttttttctaattttagctactacctgatcagatctaaaattattctggctagaatacagtatatacaaacgtatttaagtgagccctataaagaaatactcataggtagtttaaaatttcttgttaaaggcacaggctcgtttacagttggtggttactagactctaagcagcttaacatttatatgttaaagggaagagaattagtactatgtgccaggcactcgacacatgaagacagagttgtattagcctcggtgtcttacgcttcacaattactcatttactattctaggtaggataaaatgttccatgtttcatagtttcccagttttaactgtccctaaaagcagcagaagaaaaaagaaaaagtctaaaatataataaataagtactatagtaacactgtcctaataacacaagaggactattaaagtaacttttagatttaaatgggaattttcattctaaagtgatgacaaaaagggtaaatataaaaggcaattatttaaaaaacat

SEQ ID NO: 691675 - DNA, 1600 bp, Homo sapiens
aaacaaaaatatttaattcacctgaactttaaaaaatatataaatagtctaaatttgtatttttacatggggtttttaatggagatgtactgaattaaaagctcattttgtcatatataaggctcttatgtgtacttggatgtaattctagattccgtgctctattctctagatttgcttattcatgtgccagtgctatactattctattttttttaaaggtttaaaacatttatcactaaagatactagaatgttctttgaaaacctattaagacatttaactattcttttatgctattctgatcaaaagaaagaataaaagtttaggaaagggaaaaatgcacatttcttaaaaaagtttatttctagccctgaaagaacaaaattattgaacaaagtcataaaatacagcagttaatgtcaatgtataacaattaaataattgaatgggattaaattaaaaataaaagacattataaaatttgaagacaacagaaaagacaaactataattttacttaattccatttctatcacaacaagaaaaaaaagccaatgcgttccaaccaaagatgctgaattccaaacataattgtttctcttaataaagaatagaagtgtgcttgacagaattatcatccatttctttctgcctctgtcttggcagcattctagagaagtgaatgggaaagacttccgttctttcaaggccaggccagtgcttgcttcttctttctaactccaacctcgtctaccacagcatctttgccagagtgttcaatcagtgtgttgactgagaaaaaagaatgtgtgtatatattttttcttatatacacacactatcaaaaaactgatttcaccagtttcaatacctactgtgggagcagcagagacaggaagacaatctgcttcttgtattactatgaagttccactataaaaaaccccaaatgagtattaatctggattttagctataatctataatattttgacactgacatttcactagatgtggatctcagtatatttaaaaagatttagactcaaaaatggatgcaaattctttaagcatctattttgtttttttctaattttagctactacctgatcagatctaaaattattctggctagaatacagtatatacaaacktatttaagtgagccctataaagaaatactcataggtagtttaaaatttcttgttaaaggcacaggctcgtttacagttggtggttactagactctaagcagcttaacatttatatgttaaagggaagagaattagtactatgtgccaggcactcgacacatgaagacagagttgtattagcctcggtgtcttacgcttcacaattactcatttactattctaggtaggataaaatgttccatgtttcatagtttcccagttttaactgtccctaaaagcagcagaagaaaaaagaaaaagtctaaaatataataaataagtactatagtaacactgtcctaataacacaagaggactattaaagtaacttttagatttaaatgggaattttcattctaaagtgatgacaaaaagggtaaatataaaaggcaattatttaaaaaacat

SEQ ID NO: 691676 - DNA, 1600 bp, Homo sapiens
aaacaaaaatatttaattcacctgaactttaaaaaatatataaatagtctaaatttgtatttttacatggggtttttaatggagatgtactgaattaaaagctcattttgtcatatataaggctcttatgtgtacttggatgtaattctagattccgtgctctattctctagatttgcttattcatgtgccagtgctatactattctattttttttaaaggtttaaaacatttatcactaaagatactagaatgttctttgaaaacctattaagacatttaactattcttttatgctattctgatcaaaagaaagaataaaagtttaggaaagggaaaaatgcacatttcttaaaaaagtttatttctagccctgaaagaacaaaattattgaacaaagtcataaaatacagcagttaatgtcaatgtataacaattaaataattgaatgggattaaattaaaaataaaagacattataaaatttgaagacaacagaaaagacaaactataattttacttaattccatttctatcacaacaagaaaaaaaagccaatgcgttccaaccaaagatgctgaattccaaacataattgtttctcttaataaagaatagaagtgtgcttgacagaattatcatccatttctttctgcctctgtcttggcagcattctagagaagtgaatgggaaagacttccgttctttcaaggccaggccagtgcttgcttcttctttctaactccaacctcgtctaccacagcatctttgccagagtgttcaatcagtgtgttgactgagaaaaaagaatgtgtgtatatattttttcttatatacacacactatcaaaaaactgatttcaccagtttcaatacctactgtgggagcagcagagacaggaagacaatctgcttcttgtattactatgaagttccactataaaaaaccccaaatgagtattaatctggattttagctataatctataatattttgacactgacatttcactagatgtggatctcagtatatttaaaaagatttagactcaaaaatggatgcaaattctttaagcatctattttgtttttttctaattttagctactacctgatcagatctaaaattattctggctagaatacagtatatacaaacgtatttaagtgagccctataaagaaatactcataggtagtttaaaatttcttgttaaaggcacaggctcgtttacagttggtggttactagactctaagcagcttaacatttatatgttaaagggaagagaattagtactatgtgccaggcactcgacacatgaagacagagttgtattagcctcggtgtcttacgcttcacaattactcatttactattctaggtaggataaaatgttccatgtttcatagtttcccagttttaactgtccctaaaagcagcagaagaaaaaagaaaaagtctaaaatataataaataagtactatagtaayactgtcctaataacacaagaggactattaaagtaacttttagatttaaatgggaattttcattctaaagtgatgacaaaaagggtaaatataaaaggcaattatttaaaaaacat

SEQ ID NO: 691677 - DNA, 626 bp, Homo sapiens
catctcaaaattaaccaaactatatttctgctagaggttagtttatccatgtaacttaagaataaaccacagtgtagctcccttaaccaaagagccaggttttaatgactgaagtcagctgccagcaatggacatgcaggtaactatcgaagaagttgtagctacaaatcccaaactgcttctatcaatggaaaagccctttgttgagtcacaagcctgaagtgaggccttggcacatagtcagtgagaatggtctttgacttagaagggaagtgcctctgagtgcatgaggatcacagtcttctcatctcgttggttttctatttcattggtagcatcttctttatcataatccatccgtttacaaagaatgttaaaatttggaactcaggtggcactgcagctttctgacagaaataaaccagtttctgtaattcagtaatagctgtagaaggccaatatattccagagaaaaatgaaatcaagaattatattgaaaacagagaccaytaagtgctctaaatatgtttcattaattattttactcatttttctgaaaatcttgccttatcaataaaaaacagtcacttctctccttataattgtatcttatcatagatatagtg

SEQ ID NO: 691678 - DNA, 626 bp, Homo sapiens
catctcaaaattaaccaaactatatttctgctagaggttagtttatccatgtaacttaagaataaaccacagtgtagctcccttaaccaaagagccaggttttaatgactgaagtcagctgccagcaatggacatgcaggtaactatcgaagaagttgtagctacaaatcccaaactgcttctatcaatggaaaagccctttgttgagtcacaagcctgaagtgaggccttggcacatagtcagtgagaatggtctttgacttagaagggaagtgcctctgagtgcatgaggatcacagtcttctcatctcgttggttttctatttcattggtagcatcttctttatcataatccatccgtttacaaagaatgttaaaatttggaactcaggtggcactgcagctttctgacagaaataaaccagtttctgtaattcagtaatagctgtagaaggccaatatattccagagaaaaatgaaatcaagaattatattgaaaacagagaccactaagtgcyctaaatatgtttcattaattattttactcatttttctgaaaatcttgccttatcaataaaaaacagtcacttctctccttataattgtatcttatcatagatatagtg

SEQ ID NO: 691679 - DNA, 3276 bp, Homo sapiens
cagtccttctaggactcaaattacatgtattattggctgcttgaaggtgttctacagtttagtttcttaaaatccttttactctatttccttttggatagtttttattgctatgtcttgtatttggcaatgtttaatctgctattaatcatgttcygtgtatttttcatctcaaatttataagagtttttgggtgggcatggtggctcacacctgtaatcccagccttttgggagactgaagtgggctgatcatttgagctcaggagtttgagaccagcctgggcaacaagataaaaccccatgtttacaaaaattagccaggtgtggtggcacatgcctgtagtcccacctactcaggaggctgaagttgaggatagcttaagcccagaaggcagaggttacagtgagccgagatcacgccactgcactccagcctggacgacatagccagaccctgtcaaaaaaaaaacaaaaactttcataaccaattatataaccattctactacttagaggaacaaaaaagtcaataattcacgatttaaaagctactaaaaacataaaatataaaactatgcactaaggagttttatatataaatttacccattaaataaatatgtgtatgtacttctttaatttaaaaaattctaatgacttacagtttataccacaagattatttatacaaacagattattctcattccagagtgggctttttgggggatgaagtttactaagcaatttacaatgttctgtgaaaatcatcagctttttcaggttctgtagtaaagttataaaagttctaggcaccatatctttttaaaccataagaaaatacgagggcacatgtgtgtatgtatgtatgcatgaatgcttttatggcagttttattcgtaattaccaaaaactggaaacaacccaaatgaactggggaatgaatacagaacctgttgtacatccatacaacgcaatgctactaagcaacagaaagtaattactgatacataaaaacatggatgaatctcaaaatacattaggttaaataaaagacgtccgtctcaagaagccacatactgagtcaagcagggggatcccttgagaccaggagcttgaggccagcataggcaatataacaaggcctcccatttctattaaacaaacaaaaattaaaacaaaaaggctaaatactgcgtgattttgtttacacggaattctgaaaagaaaaaaaaaaaagacaagacagaggaaaaaacagatcagtggtggccagagactagaggtaaggaaatgggctgactatggaaaggggcatgaggaaattttttgagaaactaactctatatcttgatcatcatggtggttgcacaactagatgtgtttcccagtcttacagaaccatattcaaatacaccttaataaagataattttcaaccatacatatgatagaatcataattattactcttatactaagaccaaatagatgctgcttaaaccactgaggcaagaacactaaaccttggtctgatctgcctccaagtttgaaaactcccttccattaacattttgcctaaaaattaaacaatatttgtaaattagtcacaaaatcctttaagattaaaatatacatatattcttaaagaaaactacctagtgcttgcaaccaagtcattttaggagaaaattagctttgttaagaagggaataaagcccaagtaataaatattaacatccatcttttccagaatcatgatggtcaaaacaatgagactcttctcctaattttggttcaaaataccaaaatttttacttcaaaaactctctaacagattattataaaatcttaacatttgcctaaaagtctttaagtattttcacataactaggcagtataacaaaaaaagagcacaggcttaggctggatgcagtggctcacacctgtaatcctagcattttgggaggccaaggcagatcgcttgagtccagcagtttgagaccagtctgggaaatgtggcaaaaccccgtctctataaaatacattaaaacgtggcccatacctgtagtcccagctacttcaggggatgaggcaggaggatggcttgagccttagagacagaggctgcagtgagccaagatcacgccactcactccactctgggtgatagagtgggaccctttctcaaaaaaaaaattttttttaaagcacaggctcaagaactcaacccacctaggcaagttatttaacctaattttccatcgattgtatcatcagtaaaattgggataattttacctacctctaggaataatcctagactattacatgagttaacacatgtattataataaatcacagggtaatgcctggcatagttaactaagtctcaataccaacctaacataaatgaatgacaccaataatcaccagctgtgtagtctttgcataccacaattctgccctgtaaggtaagtggcctaaattcaatggcctaaataaagacctatctagtaatactactctatattcctattattttacctgaattgcacctacctaattcagtttgcaaaagaaaggttaagtattatacctcttatatataaaaaagtgaactataaataagttaaatgacttatccaaagaaacagtaacttgaaggcagagccaagatgaggatttggtattgagactccttaaaactttgtcctctccaaaatttttagccctccatgaattccttccctcctaacaaagatacgggtataatgcaccccccaaaacctccaatttaataatttaaaaatttcattaagctatacatttgatttgtgcactcttctgtatgttttatatcataatagaaaggttaagtggcttattacctaatacactagtattcacttgtattcacatatgaatacatacacttgtattcacatatgaagagaagtagtggaaaagttacattaaaagctaaaaggtgacaaactaagcagattatgttctttaaaattttgtgagaggcaaaagtttttaactgaggtatataatacatgtacaaagaagtgcacacttcctaagtctactattcaatgattctcataaactgaacacaaccatgaaatcatgacccagatcaagacagagaacattaccagcacacctacaatctcccttgtcctcatcaccaaagataaccattattctgattccattcccatctgttagttttgtctgttttttaagctttacagaaatggagtgctcgcttcg

SEQ ID NO: 691680 - DNA, 3276 bp, Homo sapiens
cagtccttctaggactcaaattacatgtattattggctgcttgaaggtgttctacagtttagtttcttaaaatccttttactctatttccttttggatagtttttattgctatgtcttgtatttggcaatgtttaatctgctattaatcatgttccgtgtatttttcatctcaaatttataagagtttttgggtgggcatggtggctcacacctgtaatcccagccttttgggagactgaagtgggctgatcatttgagctcaggagtttgagaccagcctgggcaacaagayaaaaccccatgtttacaaaaattagccaggtgtggtggcacatgcctgtagtcccacctactcaggaggctgaagttgaggatagcttaagcccagaaggcagaggttacagtgagccgagatcacgccactgcactccagcctggacgacatagccagaccctgtcaaaaaaaaaacaaaaactttcataaccaattatataaccattctactacttagaggaacaaaaaagtcaataattcacgatttaaaagctactaaaaacataaaatataaaactatgcactaaggagttttatatataaatttacccattaaataaatatgtgtatgtacttctttaatttaaaaaattctaatgacttacagtttataccacaagattatttatacaaacagattattctcattccagagtgggctttttgggggatgaagtttactaagcaatttacaatgttctgtgaaaatcatcagctttttcaggttctgtagtaaagttataaaagttctaggcaccatatctttttaaaccataagaaaatacgagggcacatgtgtgtatgtatgtatgcatgaatgcttttatggcagttttattcgtaattaccaaaaactggaaacaacccaaatgaactggggaatgaatacagaacctgttgtacatccatacaacgcaatgctactaagcaacagaaagtaattactgatacataaaaacatggatgaatctcaaaatacattaggttaaataaaagacgtccgtctcaagaagccacatactgagtcaagcagggggatcccttgagaccaggagcttgaggccagcataggcaatataacaaggcctcccatttctattaaacaaacaaaaattaaaacaaaaaggctaaatactgcgtgattttgtttacacggaattctgaaaagaaaaaaaaaaaagacaagacagaggaaaaaacagatcagtggtggccagagactagaggtaaggaaatgggctgactatggaaaggggcatgaggaaattttttgagaaactaactctatatcttgatcatcatggtggttgcacaactagatgtgtttcccagtcttacagaaccatattcaaatacaccttaataaagataattttcaaccatacatatgatagaatcataattattactcttatactaagaccaaatagatgctgcttaaaccactgaggcaagaacactaaaccttggtctgatctgcctccaagtttgaaaactcccttccattaacattttgcctaaaaattaaacaatatttgtaaattagtcacaaaatcctttaagattaaaatatacatatattcttaaagaaaactacctagtgcttgcaaccaagtcattttaggagaaaattagctttgttaagaagggaataaagcccaagtaataaatattaacatccatcttttccagaatcatgatggtcaaaacaatgagactcttctcctaattttggttcaaaataccaaaatttttacttcaaaaactctctaacagattattataaaatcttaacatttgcctaaaagtctttaagtattttcacataactaggcagtataacaaaaaaagagcacaggcttaggctggatgcagtggctcacacctgtaatcctagcattttgggaggccaaggcagatcgcttgagtccagcagtttgagaccagtctgggaaatgtggcaaaaccccgtctctataaaatacattaaaacgtggcccatacctgtagtcccagctacttcaggggatgaggcaggaggatggcttgagccttagagacagaggctgcagtgagccaagatcacgccactcactccactctgggtgatagagtgggaccctttctcaaaaaaaaaattttttttaaagcacaggctcaagaactcaacccacctaggcaagttatttaacctaattttccatcgattgtatcatcagtaaaattgggataattttacctacctctaggaataatcctagactattacatgagttaacacatgtattataataaatcacagggtaatgcctggcatagttaactaagtctcaataccaacctaacataaatgaatgacaccaataatcaccagctgtgtagtctttgcataccacaattctgccctgtaaggtaagtggcctaaattcaatggcctaaataaagacctatctagtaatactactctatattcctattattttacctgaattgcacctacctaattcagtttgcaaaagaaaggttaagtattatacctcttatatataaaaaagtgaactataaataagttaaatgacttatccaaagaaacagtaacttgaaggcagagccaagatgaggatttggtattgagactccttaaaactttgtcctctccaaaatttttagccctccatgaattccttccctcctaacaaagatacgggtataatgcaccccccaaaacctccaatttaataatttaaaaatttcattaagctatacatttgatttgtgcactcttctgtatgttttatatcataatagaaaggttaagtggcttattacctaatacactagtattcacttgtattcacatatgaatacatacacttgtattcacatatgaagagaagtagtggaaaagttacattaaaagctaaaaggtgacaaactaagcagattatgttctttaaaattttgtgagaggcaaaagtttttaactgaggtatataatacatgtacaaagaagtgcacacttcctaagtctactattcaatgattctcataaactgaacacaaccatgaaatcatgacccagatcaagacagagaacattaccagcacacctacaatctcccttgtcctcatcaccaaagataaccattattctgattccattcccatctgttagttttgtctgttttttaagctttacagaaatggagtgctcgcttcg

SEQ ID NO: 691681 - DNA, 3276 bp, Homo sapiens
cagtccttctaggactcaaattacatgtattattggctgcttgaaggtgttctacagtttagtttcttaaaatccttttactctatttccttttggatagtttttattgctatgtcttgtatttggcaatgtttaatctgctattaatcatgttccgtgtatttttcatctcaaatttataagagtttttgggtgggcatggtggctcacacctgtaatcccagccttttgggagactgaagtgggctgatcatttgagctcaggagtttgagaccagcctgggcaacaagataaaaccccatgtttacaaaaattagccaggtgtggtggcacatgcctgtagtcccacctactcaggaggctgaagttgaggatagcttaagcccagaaggcagaggttacagtgagccgagatcacgccactgcactccagcctggaygacatagccagaccctgtcaaaaaaaaaacaaaaactttcataaccaattatataaccattctactacttagaggaacaaaaaagtcaataattcacgatttaaaagctactaaaaacataaaatataaaactatgcactaaggagttttatatataaatttacccattaaataaatatgtgtatgtacttctttaatttaaaaaattctaatgacttacagtttataccacaagattatttatacaaacagattattctcattccagagtgggctttttgggggatgaagtttactaagcaatttacaatgttctgtgaaaatcatcagctttttcaggttctgtagtaaagttataaaagttctaggcaccatatctttttaaaccataagaaaatacgagggcacatgtgtgtatgtatgtatgcatgaatgcttttatggcagttttattcgtaattaccaaaaactggaaacaacccaaatgaactggggaatgaatacagaacctgttgtacatccatacaacgcaatgctactaagcaacagaaagtaattactgatacataaaaacatggatgaatctcaaaatacattaggttaaataaaagacgtccgtctcaagaagccacatactgagtcaagcagggggatcccttgagaccaggagcttgaggccagcataggcaatataacaaggcctcccatttctattaaacaaacaaaaattaaaacaaaaaggctaaatactgcgtgattttgtttacacggaattctgaaaagaaaaaaaaaaaagacaagacagaggaaaaaacagatcagtggtggccagagactagaggtaaggaaatgggctgactatggaaaggggcatgaggaaattttttgagaaactaactctatatcttgatcatcatggtggttgcacaactagatgtgtttcccagtcttacagaaccatattcaaatacaccttaataaagataattttcaaccatacatatgatagaatcataattattactcttatactaagaccaaatagatgctgcttaaaccactgaggcaagaacactaaaccttggtctgatctgcctccaagtttgaaaactcccttccattaacattttgcctaaaaattaaacaatatttgtaaattagtcacaaaatcctttaagattaaaatatacatatattcttaaagaaaactacctagtgcttgcaaccaagtcattttaggagaaaattagctttgttaagaagggaataaagcccaagtaataaatattaacatccatcttttccagaatcatgatggtcaaaacaatgagactcttctcctaattttggttcaaaataccaaaatttttacttcaaaaactctctaacagattattataaaatcttaacatttgcctaaaagtctttaagtattttcacataactaggcagtataacaaaaaaagagcacaggcttaggctggatgcagtggctcacacctgtaatcctagcattttgggaggccaaggcagatcgcttgagtccagcagtttgagaccagtctgggaaatgtggcaaaaccccgtctctataaaatacattaaaacgtggcccatacctgtagtcccagctacttcaggggatgaggcaggaggatggcttgagccttagagacagaggctgcagtgagccaagatcacgccactcactccactctgggtgatagagtgggaccctttctcaaaaaaaaaattttttttaaagcacaggctcaagaactcaacccacctaggcaagttatttaacctaattttccatcgattgtatcatcagtaaaattgggataattttacctacctctaggaataatcctagactattacatgagttaacacatgtattataataaatcacagggtaatgcctggcatagttaactaagtctcaataccaacctaacataaatgaatgacaccaataatcaccagctgtgtagtctttgcataccacaattctgccctgtaaggtaagtggcctaaattcaatggcctaaataaagacctatctagtaatactactctatattcctattattttacctgaattgcacctacctaattcagtttgcaaaagaaaggttaagtattatacctcttatatataaaaaagtgaactataaataagttaaatgacttatccaaagaaacagtaacttgaaggcagagccaagatgaggatttggtattgagactccttaaaactttgtcctctccaaaatttttagccctccatgaattccttccctcctaacaaagatacgggtataatgcaccccccaaaacctccaatttaataatttaaaaatttcattaagctatacatttgatttgtgcactcttctgtatgttttatatcataatagaaaggttaagtggcttattacctaatacactagtattcacttgtattcacatatgaatacatacacttgtattcacatatgaagagaagtagtggaaaagttacattaaaagctaaaaggtgacaaactaagcagattatgttctttaaaattttgtgagaggcaaaagtttttaactgaggtatataatacatgtacaaagaagtgcacacttcctaagtctactattcaatgattctcataaactgaacacaaccatgaaatcatgacccagatcaagacagagaacattaccagcacacctacaatctcccttgtcctcatcaccaaagataaccattattctgattccattcccatctgttagttttgtctgttttttaagctttacagaaatggagtgctcgcttcg

SEQ ID NO: 691682 - DNA, 2546 bp, Homo sapiens
atctggtgcttagaaaactctcattaaaacatttattgaattcatacagattgaaagagaaaacatagcctatcaactgatctaaggtagctttagaaaatttccagtcatataagagttactgagcaaagactgtcaaaacaaagcaaagtctttgttaaacaaagactgtcaaaattatgcctcttaaatgtttcaaaagggaatcatacattctcactggcctgtgacggtttaaattttctatgattcagaacaagaacaaagatatgtttcttttaactctcatactaaactattatttgaaataataaaaaggatgtcagcaatgaaaagctgtacaggttgtacagaacagattgatacaaataaaaagctaataaatatttatgtggccgygtgtgggaggtgttgcctggagtgtttcccccacatccctgactatggagtgaaaaaggaaacttaggaaaaaatatacccaaagagggagatttaaatagcacagtgggcagtgggggaagtgatgactaatattgctgttagtagtggtttaggaacaaaagagacaagtcagctggaaaccttctggtgtcttctgctagggctccttgctaaagctgatgctggaaaggaggaaggaaggaaagaaggaaggaaaagagggagagagggagcgaggaaggaaggaagggaagtcattagaatgtaagctgaacacccatttggtgcttttggccaaacaataatacacatgtttaaaagttcattacggtgggaacccaacttaagtagaattaatgaaattgatacagaacttgaaattcactacctaaaattattcattaaaaatgcaacatgcattgaattaatgtagcagcacctgaaggaagtcaaagaaactccagtttgaattttgggagaaaagaaagtatcatttaatttgaaataaatgaaaagaacctaaaagagcaaatggctaaataagtagaagaggttttttgcaacctataattactgggggatttttttcaggaagcttcaggaaagaagctccgaccctcagattagtcattcatcacccaatcactggctgctaaattagaggccaggaaaaagagatcagacatgtgcaagaaggaagaagaagaaggaagaggagaaggaggaggagggtgggggagagggaagaggaagggaaggaaggggaagcagctgtcacttttttgtttcagtgaaactatacagggcaaaatcccattagagctttctgagaagttatgtctgggacagatctgatggtaggcttgaaacttcgaacagagtccaagaaaaatcccccccttttttttttttcttggttttgtagaatttagaactatttttctaggtgtctgaaataaaataaaattttaagtagttgaaatgttaagtaaattgttttcaacaatttgcagatttatgtcagaatatatgttatgggattaagcagataaaataataatattaaacatcaaagtaagaatagtgtgagagatgaataatttaaggcaatttcagttgcatgaggttttttttctttttcttatgaataaaaatataatatagttttattactctgtagagaggttagtaaactaggagaaactcaagaggggaaatgcaaaacataataaaatagaatacattcgattttaaaagaatgtctgtatttcatttgagtgctggccaaaagataatggcatttcttggaagaaaagcagttatcagaatttaaaatttcaaaaacctgtattaggaagacacatcacttatgtagtatgtagtattcttgtcaacaatattttgtctaaatctaatcatgatgaaacaatcagaaaaatccaaattgagaataatctgtaaaaggaatggtctttgttttgttacatgtatacatatatgtaaatatatatccccaaagccgaccttgagaaggaaattcactgagccattccttacgagtgttcccaggagaaacaggaaagtgagaagtcaagtcggtccaagaagaataaagaggccaagcccagttgcatatcagcaatctcacagagagagctgcctcagtccctcgagggtaagtagatgacctcagagttgtcccatcagttgctgcttcagagccacactttcagctcatccttgcacttcatgcaatctgtgagccccacaggcagagcaggtcctggctgcctgaggttattccctatgaaagaagcagatctaggttcccacagcagtctcggctgtaactaaacagaaggcttcattcatgattggattaaggatgggggaagggcaggtggctatgaaggttattacttggaccacaaggacaatttttaaatgagctgtacattaaatatttaattttattgttgttaaattttgagtgtgataattatgtcacgcttatgtggaagaatatccatgtacttataagatacatactgaagtatttaggacaaaaatgctgtgtctaaatttattctctaatagcctcacaa

SEQ ID NO: 691683 - DNA, 2546 bp, Homo sapiens
atctggtgcttagaaaactctcattaaaacatttattgaattcatacagattgaaagagaaaacatagcctatcaactgatctaaggtagctttagaaaatttccagtcatataagagttactgagcaaagactgtcaaaacaaagcaaagtctttgttaaacaaagactgtcaaaattatgcctcttaaatgtttcaaaagggaatcatacattctcactggcctgtgacggtttaaattttctatgattcagaacaagaacaaagatatgtttcttttaactctcatactaaactattatttgaaataataaaaaggatgtcagcaatgaaaagctgtacaggttgtacagaacagattgatacaaataaaaagctaataaatatttatgtggccgtgtgtgggaggtgttgcctggagtgtttcccccacatccctgactatggagtgaaaaaggaaacttaggaaaaaatatacccaaagagggagatttaaatagcacagtgggcagtgggggaagtgatgactaatattgctgttagtagtggtttaggaacaaaagagacaagtcagctggaaaccttctggtgtcttctgctagggctccttgctaaagctgatgctggaaaggaggaaggaaggaaagaaggaaggaaaagagggagagagggagcgaggaaggaaggaagggaagtcattagaatgtaagctgaacacccatttggtgcttttggccaaacaataatacacatgtttaaaagttcattacggtgggaacccaacttaagtagaattaatgaaattgatacagaacttgaaattcactacctaaaattattcattaaaaatgcaacatgcattgaattaatgtagcagcacctgaaggaagtcaaagaaactccagtttgaattttgggagaaaagaaagtatcatttaatttgaaataaatgaaaagaacctaaaagagcaaatggctaaataagtagaagaggttttttgcaacctataattactgggggatttttttcaggaagcttcaggaaagaagctccgaccctcagattagtcattcrtcacccaatcactggctgctaaattagaggccaggaaaaagagatcagacatgtgcaagaaggaagaagaagaaggaagaggagaaggaggaggagggtgggggagagggaagaggaagggaaggaaggggaagcagctgtcacttttttgtttcagtgaaactatacagggcaaaatcccattagagctttctgagaagttatgtctgggacagatctgatggtaggcttgaaacttcgaacagagtccaagaaaaatcccccccttttttttttttcttggttttgtagaatttagaactatttttctaggtgtctgaaataaaataaaattttaagtagttgaaatgttaagtaaattgttttcaacaatttgcagatttatgtcagaatatatgttatgggattaagcagataaaataataatattaaacatcaaagtaagaatagtgtgagagatgaataatttaaggcaatttcagttgcatgaggttttttttctttttcttatgaataaaaatataatatagttttattactctgtagagaggttagtaaactaggagaaactcaagaggggaaatgcaaaacataataaaatagaatacattcgattttaaaagaatgtctgtatttcatttgagtgctggccaaaagataatggcatttcttggaagaaaagcagttatcagaatttaaaatttcaaaaacctgtattaggaagacacatcacttatgtagtatgtagtattcttgtcaacaatattttgtctaaatctaatcatgatgaaacaatcagaaaaatccaaattgagaataatctgtaaaaggaatggtctttgttttgttacatgtatacatatatgtaaatatatatccccaaagccgaccttgagaaggaaattcactgagccattccttacgagtgttcccaggagaaacaggaaagtgagaagtcaagtcggtccaagaagaataaagaggccaagcccagttgcatatcagcaatctcacagagagagctgcctcagtccctcgagggtaagtagatgacctcagagttgtcccatcagttgctgcttcagagccacactttcagctcatccttgcacttcatgcaatctgtgagccccacaggcagagcaggtcctggctgcctgaggttattccctatgaaagaagcagatctaggttcccacagcagtctcggctgtaactaaacagaaggcttcattcatgattggattaaggatgggggaagggcaggtggctatgaaggttattacttggaccacaaggacaatttttaaatgagctgtacattaaatatttaattttattgttgttaaattttgagtgtgataattatgtcacgcttatgtggaagaatatccatgtacttataagatacatactgaagtatttaggacaaaaatgctgtgtctaaatttattctctaatagcctcacaa

SEQ ID NO: 691684 - DNA, 2546 bp, Homo sapiens
atctggtgcttagaaaactctcattaaaacatttattgaattcatacagattgaaagagaaaacatagcctatcaactgatctaaggtagctttagaaaatttccagtcatataagagttactgagcaaagactgtcaaaacaaagcaaagtctttgttaaacaaagactgtcaaaattatgcctcttaaatgtttcaaaagggaatcatacattctcactggcctgtgacggtttaaattttctatgattcagaacaagaacaaagatatgtttcttttaactctcatactaaactattatttgaaataataaaaaggatgtcagcaatgaaaagctgtacaggttgtacagaacagattgatacaaataaaaagctaataaatatttatgtggccgtgtgtgggaggtgttgcctggagtgtttcccccacatccctgactatggagtgaaaaaggaaacttaggaaaaaatatacccaaagagggagatttaaatagcacagtgggcagtgggggaagtgatgactaatattgctgttagtagtggtttaggaacaaaagagacaagtcagctggaaaccttctggtgtcttctgctagggctccttgctaaagctgatgctggaaaggaggaaggaaggaaagaaggaaggaaaagagggagagagggagcgaggaaggaaggaagggaagtcattagaatgtaagctgaacacccatttggtgcttttggccaaacaataatacacatgtttaaaagttcattacggtgggaacccaacttaagtagaattaatgaaattgatacagaacttgaaattcactacctaaaattattcattaaaaatgcaacatgcattgaattaatgtagcagcacctgaaggaagtcaaagaaactccagtttgaattttgggagaaaagaaagtatcatttaatttgaaataaatgaaaagaacctaaaagagcaaatggctaaataagtagaagaggttttttgcaacctataattactgggggatttttttcaggaagcttcaggaaagaagctccgaccctcagattagtcattcatcacccaatcactggctgctaaattagaggccaggaaaaagagatcagacatgtgcaagaaggaagaagaagaaggaagaggagaaggaggaggagggtgggggagagggaagaggaagggaaggaaggggaagcagctgtcacttttttgtttcagtgaaactatacagggcaaaatcccattagagctttctgagaagttatgtctgggacagatctgatggtaggcttgaaacttcgaacagagtccaagaaaaatcccccccttttttttttttyttggttttgtagaatttagaactatttttctaggtgtctgaaataaaataaaattttaagtagttgaaatgttaagtaaattgttttcaacaatttgcagatttatgtcagaatatatgttatgggattaagcagataaaataataatattaaacatcaaagtaagaatagtgtgagagatgaataatttaaggcaatttcagttgcatgaggttttttttctttttcttatgaataaaaatataatatagttttattactctgtagagaggttagtaaactaggagaaactcaagaggggaaatgcaaaacataataaaatagaatacattcgattttaaaagaatgtctgtatttcatttgagtgctggccaaaagataatggcatttcttggaagaaaagcagttatcagaatttaaaatttcaaaaacctgtattaggaagacacatcacttatgtagtatgtagtattcttgtcaacaatattttgtctaaatctaatcatgatgaaacaatcagaaaaatccaaattgagaataatctgtaaaaggaatggtctttgttttgttacatgtatacatatatgtaaatatatatccccaaagccgaccttgagaaggaaattcactgagccattccttacgagtgttcccaggagaaacaggaaagtgagaagtcaagtcggtccaagaagaataaagaggccaagcccagttgcatatcagcaatctcacagagagagctgcctcagtccctcgagggtaagtagatgacctcagagttgtcccatcagttgctgcttcagagccacactttcagctcatccttgcacttcatgcaatctgtgagccccacaggcagagcaggtcctggctgcctgaggttattccctatgaaagaagcagatctaggttcccacagcagtctcggctgtaactaaacagaaggcttcattcatgattggattaaggatgggggaagggcaggtggctatgaaggttattacttggaccacaaggacaatttttaaatgagctgtacattaaatatttaattttattgttgttaaattttgagtgtgataattatgtcacgcttatgtggaagaatatccatgtacttataagatacatactgaagtatttaggacaaaaatgctgtgtctaaatttattctctaatagcctcacaa

SEQ ID NO: 691685 - DNA, 2546 bp, Homo sapiens
atctggtgcttagaaaactctcattaaaacatttattgaattcatacagattgaaagagaaaacatagcctatcaactgatctaaggtagctttagaaaatttccagtcatataagagttactgagcaaagactgtcaaaacaaagcaaagtctttgttaaacaaagactgtcaaaattatgcctcttaaatgtttcaaaagggaatcatacattctcactggcctgtgacggtttaaattttctatgattcagaacaagaacaaagatatgtttcttttaactctcatactaaactattatttgaaataataaaaaggatgtcagcaatgaaaagctgtacaggttgtacagaacagattgatacaaataaaaagctaataaatatttatgtggccgtgtgtgggaggtgttgcctggagtgtttcccccacatccctgactatggagtgaaaaaggaaacttaggaaaaaatatacccaaagagggagatttaaatagcacagtgggcagtgggggaagtgatgactaatattgctgttagtagtggtttaggaacaaaagagacaagtcagctggaaaccttctggtgtcttctgctagggctccttgctaaagctgatgctggaaaggaggaaggaaggaaagaaggaaggaaaagagggagagagggagcgaggaaggaaggaagggaagtcattagaatgtaagctgaacacccatttggtgcttttggccaaacaataatacacatgtttaaaagttcattacggtgggaacccaacttaagtagaattaatgaaattgatacagaacttgaaattcactacctaaaattattcattaaaaatgcaacatgcattgaattaatgtagcagcacctgaaggaagtcaaagaaactccagtttgaattttgggagaaaagaaagtatcatttaatttgaaataaatgaaaagaacctaaaagagcaaatggctaaataagtagaagaggttttttgcaacctataattactgggggatttttttcaggaagcttcaggaaagaagctccgaccctcagattagtcattcatcacccaatcactggctgctaaattagaggccaggaaaaagagatcagacatgtgcaagaaggaagaagaagaaggaagaggagaaggaggaggagggtgggggagagggaagaggaagggaaggaaggggaagcagctgtcacttttttgtttcagtgaaactatacagggcaaaatcccattagagctttctgagaagttatgtctgggacagatctgatggtaggcttgaaacttcgaacagagtccaagaaaaatcccccccttttttttttttcttggttttgtagaatttagaactatttttctaggtgtctgaaataaaataaaattttaagtagttgaaatgttaagtaaattgttttcaacaatttgcagatttatgtcagaatatatgttatgggattaagcagataaaataataatattaaacatcaaagtaagaatagtgtgagagatgaataatttaaggcaatttcagttgcatgaggttttttttctttttcttatgaataaaaatataatatarttttattactctgtagagaggttagtaaactaggagaaactcaagaggggaaatgcaaaacataataaaatagaatacattcgattttaaaagaatgtctgtatttcatttgagtgctggccaaaagataatggcatttcttggaagaaaagcagttatcagaatttaaaatttcaaaaacctgtattaggaagacacatcacttatgtagtatgtagtattcttgtcaacaatattttgtctaaatctaatcatgatgaaacaatcagaaaaatccaaattgagaataatctgtaaaaggaatggtctttgttttgttacatgtatacatatatgtaaatatatatccccaaagccgaccttgagaaggaaattcactgagccattccttacgagtgttcccaggagaaacaggaaagtgagaagtcaagtcggtccaagaagaataaagaggccaagcccagttgcatatcagcaatctcacagagagagctgcctcagtccctcgagggtaagtagatgacctcagagttgtcccatcagttgctgcttcagagccacactttcagctcatccttgcacttcatgcaatctgtgagccccacaggcagagcaggtcctggctgcctgaggttattccctatgaaagaagcagatctaggttcccacagcagtctcggctgtaactaaacagaaggcttcattcatgattggattaaggatgggggaagggcaggtggctatgaaggttattacttggaccacaaggacaatttttaaatgagctgtacattaaatatttaattttattgttgttaaattttgagtgtgataattatgtcacgcttatgtggaagaatatccatgtacttataagatacatactgaagtatttaggacaaaaatgctgtgtctaaatttattctctaatagcctcacaa

SEQ ID NO: 691686 - DNA, 628 bp, Homo sapiens
cattttcttttttttttwattattattatactttaagttttagggtacatgtgcacaatgtgcaggttagttacatatgtatacatgtgccatgctggtgcgctgcacccactaacccgtcatctagcattaggtatatctcccaatgctaaccctccaccctccccccaccccacaacagtccccagagtgtgatgttccccttcctgtgtccatgtgttctcattgttcaattcccacctatgagtgagaatatgcggtgtttgattttttgttcttgcgatagtttgctgagaatgatgatttccaatttcatccatgtccctacaaaggacatgaactcatcattttttatggctgcatagcattccatggtgtatatgtgccacattttcttaattcagtctatcattgttggacattgttggttccaagtctttgctatcgtgaatagtgccgcaataaacatacgtgtgcatgtctctttatagcagcatgatttatagtcctttgggtatatacccagtattttcagttaaagaaagtctgagagaccgtgttgccatcacacccaaaccccaataaataaacttgttcaggatgaagaaaaataacagttggaaattct

SEQ ID NO: 691687 - DNA, 628 bp, Homo sapiens
cattttctttttttttttattattattatactttaagttttagggtacatgtgcacaatrtgcaggttagttacatatgtatacatgtgccatgctggtgcgctgcacccactaacccgtcatctagcattaggtatatctcccaatgctaaccctccaccctccccccaccccacaacagtccccagagtgtgatgttccccttcctgtgtccatgtgttctcattgttcaattcccacctatgagtgagaatatgcggtgtttgattttttgttcttgcgatagtttgctgagaatgatgatttccaatttcatccatgtccctacaaaggacatgaactcatcattttttatggctgcatagcattccatggtgtatatgtgccacattttcttaattcagtctatcattgttggacattgttggttccaagtctttgctatcgtgaatagtgccgcaataaacatacgtgtgcatgtctctttatagcagcatgatttatagtcctttgggtatatacccagtattttcagttaaagaaagtctgagagaccgtgttgccatcacacccaaaccccaataaataaacttgttcaggatgaagaaaaataacagttggaaattct

SEQ ID NO: 691688 - DNA, 628 bp, Homo sapiens
cattttctttttttttttattattattatactttaagttttagggtacatgtgcacaatgtgcaggttagttacatatgtatacatgtgccatgctggtgcgctgcacccactaacccgtcatctagcattaggtatatctcccaatgctaaccctccaccctccccccaccccacaacagtccccagagtgtgatgttccccttcctgtgtccatgtgttctcattgttcaattcccacctatgagtgagaatatgcggtgtttgattttttgttcttgcgatagtttgctgagaatgatgatttccaatttcatccatgtccctacaaaggacatgaactcatcattttttatggctgcatagcattccatggtgtataygtgccacattttcttaattcagtctatcattgttggacattgttggttccaagtctttgctatcgtgaatagtgccgcaataaacatacgtgtgcatgtctctttatagcagcatgatttatagtcctttgggtatatacccagtattttcagttaaagaaagtctgagagaccgtgttgccatcacacccaaaccccaataaataaacttgttcaggatgaagaaaaataacagttggaaattct

SEQ ID NO: 691689 - DNA, 1298 bp, Homo sapiens
gagctttgaaaataacctaacagtcaatcaattgctgagcttctattaccagtagtgggacataatgtacatcatgtagataggcaggcttgtcactgacaagggggctgacccctggaaaaccagcacagagccagctcttctgtgtgaatccactctctccagaatataccataagtcatggaaagaaataagagtctcaggaaatgagactcttaccgcgatgagaggtgaaccttgaaatctattttagcaattaggaagagaagtcccatttcgcatcccaaatcaagtagaggcctgctagtccaaacatagtttctgaataacctgagtcacctgggccctgaggaatcctggcctcttcgtccacatttgcagaaatatcaggaggtcaatcaggaagctggttaggcagctcaacacagggtcagaaagctcctaggtatgcaaataaatgtgcacactggaaattgagttctgtaatttttccatgacctagaaaactatgatgatgaaaatgttctacattcatgctgcctagttcagtagccactagccacatgtggctattgagtaattgagatgtggctagtacaagtgaccagctaatgttaaattttgttttatttgaattaattttaattttaatagtcacctgtggctattggctactgcactggatagcacagagatgagaaataatagaaaccttttttgttgttgtttcaatggctaacattgtcaaaagctgaattcctgttttatgtaaaattttggtttatattttctcaaagaagggaagtacaaaaaacaaaacaaaacaaaacaaaaggatgatcaagcagaactttggtaaggaagggtgaagcagagacacttaactcagagtggggaaaacagcaatgaccttgtttgaaatgcagctcctgtctatgtggctctctgtgctctgttggggtgtcagttctttacttcttagttaaagcagttatttcggcggtgcaatgcatttttgttcaataagcatgactttttacacagctggtttatctccagtatggaaactctctgcttaatcatcttgatttctctgggcttgttcctactctgcagatttaagcatgacacttgtatctctctctccaggctctgatctaggatgacagcttctatgatgtgcccatctacagaaatatgcaaattgcaaatttaggargattaaaagagggccctgcaaaaggcatctacaggccccatgtgctgttcacctttcttatttattggtgaagtgagtc

SEQ ID NO: 691690 - DNA, 589 bp, Homo sapiens
tccttctgggtaatctttttcatgtcaccactcttgtcagcatctgcattgggcaaatttcctaggacctcccttctgygtcttttaaaatatgaaaacaaaatcaatgtagcgcagcaagccagggaaagtctgctttgattgacttacggccatagtcacccagcagttccttcagatgtggcttcccaggtcagccactgagcccaccgctgtcctcctgcctgcagaagtggctctgtgagccgtttgaggagaaaatgggggactttgggcttcagcccgaggagaacacggtggagatggaggagcccctgggcgtccgcaggttaactgaaaacatgagaggacacaagcacgggaccaagtctgtcactaacctgtaaagtactctcaccaagccgaccgggcactttgtctgagcgcctgcctttgccaccactgtgtgcaggaatgcctgggtcatgactgggccatcccagtgttcttatttctatacattccgaggttacccctcagcaaaacgccagaggctggcagacacagcggagcatcctgcagtagggatccgaagccgtggaatctccaa

SEQ ID NO: 691691 - DNA, 640 bp, Homo sapiens
ttaatccatcttgaaaagttaataataataaaaataataatatggaagaaatttaaaaaaaacctcccagagaccaggaacttggggcgcgcggcctgagatcaccccaagctctgggtgccttcctgtccttctgcttcttccttggccgctttagggggcgcgccttgccatgcgtctccctgcgggcggcgcggtggtgctcctggatgtcacctccaggcgcttttgagactgcgaccggcaccgggcaccaggcacctgcggattggcctccccacgccgggttcagggacctccagcgctccgcggtgcaggctgcaggcgacctcaacgtggagctgctgccagcgccacaggccccaggggaggcccaggatgctgcttccccgccccaagaagggcagtttggaggaaagtcttyggcctgatggaaggcggcgcccatcgggggcggggctgagaactaggccggcgccgctgcctggtaagcggggaccaagaggcccacggcctccatcaggaaccaggtgcttctccaaatcccggacgtccaggaggaacaacggcgtcaagctggctgacaccaggaacacccagaagtccccgctcctgtctgtccttccgcactcaggagcgg

SEQ ID NO: 691692 - DNA, 659 bp, Homo sapiens
  misc_feature 558, 559, 560, 561, 562, 563, 564, 565, 566, 567, 568, 569,570, 571, 572, 573, 574, 575, 576, 577, 578, 579, 580, 581,582, 583, 584, 585, 586, 587, 588, 589, 590, 591, 592, 593,594, 595, 596, 597, 598, 599, 600, 601, 602, 603, 604: n = A,T,C or G
  misc_feature 605, 606, 607, 608, 609, 610, 611, 612, 613, 614, 615, 616,617, 618, 619, 620, 621, 622, 623, 624, 625, 626, 627, 628,629, 630, 631, 632, 633, 634, 635, 636, 637, 638, 639, 640,641, 642, 643, 644, 645, 646, 647, 648, 649, 650, 651: n = A,T,C or G
  misc_feature 652, 653, 654, 655, 656, 657: n = A,T,C or G
tcttgttacccaggctggagtgtaatggtgcaatctccacttaccgcaacctctgcctcccgggttcaagagattctcctgcctcagcctcctgagtagctgggattacaggcatacgccaccacgccaggctgattttgtgtttttagtagagacagggtttctccatgttaggctagactcgaactcccaacctcaggtgatccacctgccttggcctcccaaagtgctgagattacaggcatgagcctgtaatctgtgcctgtcagcctatgcctgaccctggccatttttttttttttttttttttttgagacagtcttgctctttcacccaggctgaattacagtggtgcaatctcagcccactgcaacctccgcctcccaggttcaagatattcttgtgcctcagcctcctgagcagctagtactggaggtgtgtgccaccatgcccggctaatttttttgtattttagtagagatggggtttcaccatattggccaggctggtcttgaactcctgatctcaggcaatccrcctgcctcagccttccaaagnnnnnnnnnnnnnnnnnnnnnnnnnnnnnnnnnnnnnnnnnnnnnnnnnnnnnnnnnnnnnnnnnnnnnnnnnnnnnnnnnnnnnnnnnnnnnnnnnnnnag

SEQ ID NO: 691693 - DNA, 622 bp, Homo sapiens
ggtggctgatccctatgatcccagcactttgagaggctggggtgggagggctgcttgagccaggagttcaagaccagcttcggcaacatactgagaccctgcctccattattaaattttttaaatttaaaaacaaaccaaaacaaatgaacaaaatggcatgcagcctttaaaaagcagtagcataagccagacgcagtagttcacgcctgtaatcccagcactttgggaggccaaggcaggtggatcacgaggtcaggagatcaagaccatcctggctaacacggtgaaaccccatctctactaaaaatacaaaaaattagccaagcgtggtggcgggcacctgtagtcccagctacttgggaggctgaggcaggagaatggtgtgaacccaggaggcggagcttgcagtgagccgagatcgcgccactgcactccagcctgggcgacagagcgagactctgtctcgaaaaaaaaaaaaaaaaaagagtagcayagtgtgcaggtacaataattttaaagctagaagaggccttgtaagccattttgtctaaccacctcattacagaaaccgaaatagaggccaagagaagacaagtgacctgttcaaattgatttagtca

SEQ ID NO: 691694 - DNA, 786 bp, Homo sapiens
ggtgggctctgcgggccggggcccgcttcctggatgcccatggggcctggctcccagagctgcccaggtgagtgtggccctggggtagctacagccagaaggggagggctgtcaggacccaatcttcagctccagagccctgttggctctgcgacagccatgctggggaggggtcttccttcccggcaccaccgcaggtgcaggtagccttgtgcccagccagctccaggtcacacggtgacygtcggcacagcctcctggcccgacccttcaagttgtgctcagtgcactgagggaggcaggggctccccaactccctccccaacttatccacaaggttttggtttgtttacaaaggcatacttagatttggcttttatttatttatttttatttttatttacttttttgagatggagtctcgctctgtcgcccaggctgtagtgcagtggtgggatctcggctcgctgcaagctccaccctcccccggtttccgccattctcctgcctcagcctcctgagtagctgggactacaggcgcccgccaccacgcccggctcatttttttgtatttttttttttttttagtagagacagggtttcaccgtgttagccaggatggtctcaaactcctgacctgtgatctgcccgcctcggcctcgcaaagtgctgggattacaggcgtgagccacctcacccggctatttttttatttttatttttcttatttgtatacatttgtggggtgtgtgtgcaactttggtcagtcaggtcagggcttttagg

SEQ ID NO: 691695 - DNA, 873 bp, Homo sapiens
agaatcgcttgaacctgggaggtggaggttgcggtgagctgaggttgtgccactgcattccagcctcagcgacagagtgagactctgtctcaaacaaacaaacaaaaaaaggaaataaaaatccaggatccaaccacgaggcactccttgtgtcttgctgccttccccggggcccctctgagccgtccccagccttggcgttcttgcccttccagggggacaggctccgcaggcccaggctgagctctggatgtgtcttcatttcctcctggctggatgcaggttggacatttttggccggagcagcactgggacacgctgtgtcggtcacctccaggtgtccatctgtccctcagcaggtgatgctgaatgtggccgcctggttgaggcccagttctccctcccttagatgtgggaacgcaatctgggtgctgcgtggccgcgccccccgacccccgtcacccagggccagcagctgcaaaatggccatttcctgcctctattccatttctgcatctactggctggcatttctctctcaccaagggcccctccactttaaaaartctatcagtacagacttgcaggtttaaaaaaattaatgtgttaacatgcattactgtcatcttttaattacttattttgagacagggtcttgctctgtcacccaggctggagtgtggtggtgcaatcatagctcactgcagcctccaactcctgggctcaagtgatcctcctgcctcagcctccttacaggcatgtgccaccacacacgactaatttttatttttatttttgtatagatagggtcttgctatattgcccaggctggtcttcaactcctgagctcaagggattctcccacttcagcctc

SEQ ID NO: 691696 - DNA, 668 bp, Homo sapiens
ggaggggccgggacccgcggccacagacaccaggagccagcggttccaccttccgcgtgcagaaagggctggtgcaggcacaggggtgacatcccagacccgaagcgggggtgtctgggtctccgccccgcagcccgcccaccgtagagctgcagccactggttccgcaggccccctttccgcatctccaagtacagcaaggcaaagtgctggtagtcggagaaggccactcggatgtcactcagggccatggctggaggagcgagagccgctgaccccaggcccagggcacctcccccccgagygtggcacccctcacgccccggccccaggtgccaatccagcagtccatgcagcctccagggcccccacgccacagccctgcctgctgccccacctcacctgggttgctgaactgccccggtacagcaccctcggtgaaggtcgtgtccattttctggcacccgccatggggcctggggagaaagagccccaatcccctgagtggccacccctgcccagcgcccaggcctagagcctaccttgctgtctctgagcccagggtcccctgttcaccctcacaatccttagaggacatgggactttaggatgaccttagaggtggggacactcctgctgggggtggggtgggtattaagtacctgttc

SEQ ID NO: 691697 - DNA, 668 bp, Homo sapiens
ggaggggccgggacccgcggccacagacaccaggagccagcggttccaccttccgcgtgcagaaagggctggtgcaggcacaggggtgacatcccagacccgaagcgggggtgtctgggtctccgccccgcagcccgcccaccgtagagctgcagccactggttccgcaggccccctttccgcatctccaagtacagcaaggcaaagtgctggtagtcggagaaggccactcggatgtcactcagggccatggctggaggagcgagagccgctgaccccaggcccagggcacctcccccccgagcgtggcacccctcacgccccggccccaggtgccaatccagcagtccrtgcagcctccagggcccccacgccacagccctgcctgctgccccacctcacctgggttgctgaactgccccggtacagcaccctcggtgaaggtcgtgtccattttctggcacccgccatggggcctggggagaaagagccccaatcccctgagtggccacccctgcccagcgcccaggcctagagcctaccttgctgtctctgagcccagggtcccctgttcaccctcacaatccttagaggacatgggactttaggatgaccttagaggtggggacactcctgctgggggtggggtgggtattaagtacctgttc

SEQ ID NO: 691698 - DNA, 1020 bp, Homo sapiens
ccgatgcagaactgagggaggggggcctcagtacatgagcaactggcccccaccagcccagcaccggcctgtctgcagctggcacccagggggtacggctggatgggtggggctgtggcaaggtcacaggtctttgtggggtgggtgggggacagtgaggcacaggcaaccaacttgtccctattttgggccctggggattgttgggggatgcaactgaaaaggtaggatggaggctgcagtcttccccagccaacccctactccagtcagacggagcgggtgaggtgggggtttcccctgcccctagccctgctgagcctggatcaaagagggtgtggacagggacccggggtgcagcaccaaagccgggaggactcattggagatgaggaggaaacagggctgggcacacctggctggcatcaaagttggcctggatggggacctgggcctggcctggggatgcccagagcagggcaaggagggaactgatcagcagagcccgaagcatcatgcagcaagatggcatctcctccggacacgggagcagggcagagctgaggtggctcctctgtaggctttacgcccctgaggtgccctggggcggctggcctgggactgcacccactgtgacaggcttctgatcaagttgcaccctgcagcgctctggcctggctccctccacccaaccccagccatccgttgcctttcctccggggtggggccggatgcctggcagctgagggtagttctgacgggcctctgggckagggggcctgcagctcacccatcctgcctcttcggccttctgcagcccctctgggatgttggaatcccccctaccttgagctcaggcacagccctaagcccccttctccgggaaggccacccagaagctcaccctcacctccgagcctcaaaatgcttggtgcctctgcagggtctgcctcgggggggcctggtgggcaggtcacagtgagtcctgcacattgtgtacctgagaatggctgcctgggtggg

SEQ ID NO: 691699 - DNA, 631 bp, Homo sapiens
tgcagctgtactagggatttttgtggtgaggaactattcagtatctaaattgtattaatattgatatccaggttgtagtactgtactatagttttgtaagatgttaccatttggggaaactcagtaaggggtacaaagtttctctttgtattatttattttaacttcatgtaagtcaaaataaaaattttaatttaaaaaatagaacacaaggcagtcttcccatgctctttctcaattgaggtgacattaagtgaatgtttcctggctaattgtacactgcaacaagaaaccataattcatagtgaatcatgtgggccagggaatctagttgtgatgtccaacaaccaaggaagataagaacaacccatctcccctagccaygtggaataaaacagtatataggagtcatgactgtgatgtcagccaggcaaacctgctatgtgtgtctttgctgttagatatattcagattgcctaacagatattcaaactggctcatccccagcactcaatccttgaaatccaaattgtttatatggcttttcccaaagtaacatagaagtgtatttcttggaattacaacaacaaaaatagtaggacacatagttaatatttaattaaggcttatca

SEQ ID NO: 691700 - DNA, 635 bp, Homo sapiens
gcaagttctttgtgcttcactttcttccttgttaaaaattggagaaagacacagtatctaacaaacctagctcagacatgaggaagcacgacataaacatataaagacttataaatgcacattattgtatgtttgatgttaaactagaaaaaacaaaacttcaacttttgacatggacaaaagctatcatagcaacaccaaaggtaatatgaatggtgtgatatgatcaaccaaatttaccttcatatggtrttttgatcagaaaggagttctcaacaggtattttttgtacacatctgaacaagtctaactcccatgaaattatgcttttcatggaaagtttgaccgtattaatcttggcagggtttgggtagtgtttttgggactctgaaaggactctttcattttaattcccatgaaaggctttatttttacatactgtattaggaaaatccgaaaagaagaagaaagctccatcgtccttctgatagtgtttcgtggaaatacaacagcccagtcggaagtgcatgttccggtgtcatcttcacaaccactgtcatctgtgcgtaaaacgagcccttcaaccttcagtcattaattaattgttcatttcacacttagtcctttcataaatt

SEQ ID NO: 691701 - DNA, 955 bp, Homo sapiens
catgattagttcaatgagaacttttagaatattgctgacctaaatctggacatctacacaatcattaattcttaccaaaatgctacaaggcaatataagcataattagcctccctgatccctgaacatagcctaatatcactcactcaatcagaatcatactggaaacgatatgaccaactatggcaggtagtagatgtccagtcacactagtattgctttcagccagatgtctctggtccttgtgagttcctttsgtccttaatggtgaaatagcaacagagggaaccaactcactcactcaaggcagatttcttatttctagacttgtcctgaaaccaacagatccagctctctcctaccaaataccatgaaatttaaacaaacgaaactcgcaaaataatacagcagcagcagcaacaacaacaatgaaatattaaaatagtaaatataagtatcaaacatcaaaaccccctctccaaccaaaatctctcttcttcgataaagttcccaggaggtaacccaatttctaggttggtgtccaatatttgggatcatttgattcaagactgaagtacttaaaatggcttttaaaaaaggaaaaaaggttagatttccagagaaaagtgtaacattttttaagttgaacattatgagggatttgatgggggcagctttgcaagtagaactggagactggtccactgttcaggctttttacgaaagactgcaaaggttgtttgtttccaaacaccaagaagtcaccaagttcaccagtccaaatgcaaatgactcacactaggaaccctaatagtgctgctgttaagtcatttgcaaatgggtggggctgagatgacacagaaccctattttcccaggtggcatcttaagtatggttgattctaccttcagccccacatttaaaagtacagtgtaaacacagctaagggaccgcctc

SEQ ID NO: 691702 - DNA, 955 bp, Homo sapiens
catgattagttcaatgagaacttttagaatattgctgacctaaatctggacatctacacaatcattaattcttaccaaaatgctacaaggcaatataagcataattagcctccctgatccctgaacatagcctaatatcactcactcaatcagaatcatactggaaacgatatgaccaactatggcaggtagtagatgtccagtcacactagtattgctttcagccagatgtctctggtccttgtgagttcctttcgtccttaatggtgaaatagcaacagagggaaccaactcactcactcaaggcagatttcttatttctagacttgtcctgaaaccaacagatccagctctctcctaccaaataccatgaaatttaaacaaacgaaactcgcaaaataatacagcagcagcagcaacaacaacaatgaaatattaaaatagtaaatataagtatcaaacatcaaaaccccctctccaaccaaaatctctcttcttcgataaasttcccaggaggtaacccaatttctaggttggtgtccaatatttgggatcatttgattcaagactgaagtacttaaaatggcttttaaaaaaggaaaaaaggttagatttccagagaaaagtgtaacattttttaagttgaacattatgagggatttgatgggggcagctttgcaagtagaactggagactggtccactgttcaggctttttacgaaagactgcaaaggttgtttgtttccaaacaccaagaagtcaccaagttcaccagtccaaatgcaaatgactcacactaggaaccctaatagtgctgctgttaagtcatttgcaaatgggtggggctgagatgacacagaaccctattttcccaggtggcatcttaagtatggttgattctaccttcagccccacatttaaaagtacagtgtaaacacagctaagggaccgcctc

SEQ ID NO: 691703 - DNA, 2297 bp, Homo sapiens
tgaggattagtttatatttcccgacaagaatagatgggaattcaaatttcttcctgacctttgttccccctggaacattgggttaggatcatattagaacataaccaaaaagaaataaagattcagacgaattcacaattaatttttaagccccacaaaagtgaaataggtagcattattttttcaagctgtgaaactttccctcattttagtaatagagaaaatgttcagattataaacttggaaactttgctcctaacatatcaattatgccagaggccaatttttaagaagaagagaaatgcatgctctatattctcagcatcatccttgcccacaatagggaaataattttgtaaaatgtttgattttagacctccaaaattatctctatatgctacctgaattaagcaaataaaaaataatatttagaattccatgcaaggcactggtacaattttgtttatcttggcttcattgtttttgaatgtaagatgtacttttaaggcaaataagtacatgttttaagctggtcgcatacagtattggcaatgctataatcacaaatcagaaagtttggaaatgcttacaagtgttaagaggtgtgattcatcatggttatctgaattggcatctgatcttcttttctttctaaatatccctgacatttctgactcctctgtcttttcctcagtaaaactgcaccacacactggaaagcgaagatacacacatttatttatataatgtcaagggagagtaggaataagaagattggccatagacccacccaatcagagtctgggaaatgagaacactttttccttcagcagaaatgctgacgtgccaatgtgaatttagcagaaaaaagatttgccataacttctaagtgagcagccttcagaatgctagcttagattcctggcattaacttgccaggtattttttcaggaaggaaataaattacaattgagcttaaaaacctgagggtagaactcattttcaagcaaatgtgaagcatcagtttgaagttaacaaagttaaagtttggagtagggttcctccagtcctttataatgtagtacaagtattttttttaaatgtataacactagccttttaaattgtattgtgctactaaaagaaattgtgcctgcattcatcttacaacctgggaaccaacgcagagggtctgtggggtagcggtatccagcttcatgccctctgtcctttattgctttctggttagcctgcgtatttcacatacattaaatattccacaataaactctgccatctgtgctgtagggtagtttgtattggtcatgtgctctgtcaagttgacagaggtgcaaagctaaatgtgtgacactcgaagaatatgcatatatttgaataatttgactatttagtccaacaatttgcaaaggcgctctgaatgatcacacattctgataacacttccaaggaacagatagcttcacttagggggtgggggagatggaagcagggttatttctagcaggaattcttgagttcactgaagtcttgtccctggtacttcactgtgtgaacgtgggtaaattatttcctggcagaggatcggattcttcttttataaaacgggtaaataatttctgtcactagtctttagaagttctaaaatagctaatgttagtgaattcattttgctaactgtaaacccttaggtaaattgaactgagtatgtaataatattatatattcagttcaacagcacattcttggtaaccacaagagggtccaggaaaggaaactgtttataaatctttccctttagcaaaattaatgttggagtctttagggaaattcttacagcaatagtcttcgcaattattaggtcaaacccctttgagattacagaaaaacgcacacacacagaaagctgcctgcagaatttgggtgtgggcttggtgggagattcctctgatacccagtgttgtacccccaagagagtgtttctcaaagtgtgacttcagattgtctgcattcgaattgcttgtggtatttattaaaattataactcctgggccctgccccacccctactaaatcacaatttcaggaggagggaccttcattttaacactcacccaggtgatttttatgctccgaggaggtccagggwctccaagttaagtacggtactgctgtcttattctttattctaaattttaaggtctgcacaaattggttgaactaatgagaagaaaattcagctttaaagcagaaacacaggtagacggttgacagagttcatca

SEQ ID NO: 691704 - DNA, 1501 bp, Homo sapiens
caatgatctgagttatttcctggcatcttagtaattaaacaagtttaactgcttactcaatgaatgcagtacacattggttactcctattaactccaagtaggataatttagtagatgtctctattttgtttttttctccaacctcatcttctaatgaaaactttcagtcatgtttaccaaactcgtttaacttcaagtaatttggatgtcatgtttaatttttactttttttactcaaccatttaaaaaatattttagtcctctgactatgaaaattggtcaagcctgaagtttatcaaagttctaagtccatggctgggctgtcatgactggcagtcaagggcttctcttagagtacttttcaagttcactggacagattaggatagagtaattcatctcattcgatctgtttttccatatacacaacacaagtcaatgtttgttatgactttcctgatccttatttataagacaatacaagaggaaaccatgtgtgtatgtttagaaatagaaatgatacattgcacagatatagttcaccacgttatgggatgggttgtcagtgttcaaatggggaggctgaagagtaagaacagatgctttttttccttaatggcccyttctctgatttaaaatccttccatttatttccctaagatttagtgataactttaaacactttaactaaattacccagcggcttggcagccatcacggaggcaaatccttttagaaatcctagcaatctgttagattgtgggtactatgatataaaatctgtgtgctccacgtacaaaaattaaatcagtgctatggatacaaatacatactgcaaatggcaccacttccaaaccgaggatatgtgacctgtctccaaatattgaatttctttttttacttttttccccagtacttgactttctaaatttgggccaatttattctcattatccctaagtaaacctactttgattttttttaacagttattttatagtcaaatagagccagccagccagccgtgattcgtggatcctgatgttgctaggatacatggtttggtatctgatgaaagtatatcacttcaaaggggtaaaactttcaagtgtccgagaaaatgacactcccatcttccaccatggaagacagatccaatcctacaacttctcagaagctcacagactgcaggattggcctcccaggctttcaaataagtatcctctctggagggctgtttaattactaaaactagtcagattagtcttaaagcaaggaacacacgtatttataataaaacacgttttcatgtttgttttacagtaaagagaaaaaaacccagaacccccagattttatgtactttgaaaatatatttaaaaacattaaaaattctatatttaaaacatatattatatgttaattagtacacttaaatagaacttgtatttacaataggcttctgatgcggttaagttttaatgccaatttttttcaataacat

SEQ ID NO: 691705 - DNA, 1958 bp, Homo sapiens
tcagatgattccaagagatgtcctgtcttacaggaggtaggaaatagagtacagagacagggaacaccaagaaagkcccagcattagggccagagattcctctttttctcttgaaatttcaggcttctcccaattgtctttattccaagtcactgggttcataggcttctcaacaggcccagatctctggactgcccattccttttcccatttcttggctgacatttctggcattcaggtcactatttagattctgaatcacagtaatattggagaatatgatgtccttgtttctgccttaacatagatctgtcaagactttgggaacatctccacagtgatctgcacactcaggcccattctgggactttgagtcatcgcattagtgccccctaatttgcagtgtataccccatcttcgatttgctgcttgtagatttcaagaataacctgcatcttagaagcgaattggcctaggttctgtcaaggcctcttcaaggatgcatctgctaccttctaggatggaggtgggggaaaaggaggctccagaagtggtttaagcctccccagaacatacggcaattggtgatcaccattgttcttcagtctctccttgcattgcaatctatgctgctgtgctggataaagttagaaaacaagtcttcccagagataaacagaagcagtttgattctaattcatataggaaaattatattaagtttctattacatagcagtcaaagtattgggagagagggaagcagtatagttaagtgagactggcttgtcccaatactgtaacacaagcaaactgcaacaaaagcaaaaatgtatgtattcagaaaggaagaaagcaagaggggtaaatatggtccagtgcttaaaagcatgaactttagatctgaaaatcctgaattttaattcctcctctactacttacaagcagtgtgactatggaaaagttgcttaacccacctaaagttagttaaccaactttcctacattttggggaagtttgggtcaactacctaaagcagtggacatagagcaactcccctcaaaggctgtccaagtaaaaagacacagagctgaatatcaattttgacagaggaccagagtagtgagctaactcatggaataattgacattttccacatagctcactggtgaattttcagtttcccgaaagcatatatgctccagtaccatacacgtaaaatctgtatgattatcaactctatgagctttatattcccctgctgtaaaattatggggtagcccaggatggtcggcaagtcctttcatctctgagattcagggatcaaatgaagatgttgaggtctcatatgcgaagtcatggacagtgcttttctaccaactgaaaagagaatcagccctggcacagtggctcatgcctgtaatcccagcagtttgagaggctgaggcaggctgatcatttgagtgccagagttcaagaccagcctgggcaacacggcgaaaccctgtctctacaaaaaatgtaaaaatgatccgggtgtagtggcatgcacctgtgttcccagctactcgggaggttgaggtgggagaattgttggagctcaggaagcagaggttgcagtgagccaagatcgagccactgaactttagcctgggtgacacagcaagaccctgtctctaaaaataaataaataaaataaaaagagaatgttttccaggattgatgaagaggaaaaagtaatttagagggaaaaccctgcatattataactatttacatttctttgctgaattgatggacaaaatgccattttgggatgaagaggaagcagagatgtgatgtgttacagaagcagaacccttgagcttggggaatgttggtaaagttcaccatatgccttgagtgcagggcttctataggattaataaatgcctgtttgaaaatgttctcaatgaaaaacga

SEQ ID NO: 691706 - DNA, 1958 bp, Homo sapiens
tcagatgattccaagagatgtcctgtcttacaggaggtaggaaatagagtacagagacagggaacaccaagaaagtcccagcattagggccagagattcctctttttctcttgaaatttcaggcttctcccaattgtctttattccaagtcactgggttcataggcttctcaacaggcccagatctctggactgcccattccttttcccatttcttggctgacatttctggcattcaggtcactatttagattctgaatcacagtaatattggagaatatgatgtccttgtttctgccttaacatagatctgtcaagactttgggaacatctccacagtgatctgcayactcaggcccattctgggactttgagtcatcgcattagtgccccctaatttgcagtgtataccccatcttcgatttgctgcttgtagatttcaagaataacctgcatcttagaagcgaattggcctaggttctgtcaaggcctcttcaaggatgcatctgctaccttctaggatggaggtgggggaaaaggaggctccagaagtggtttaagcctccccagaacatacggcaattggtgatcaccattgttcttcagtctctccttgcattgcaatctatgctgctgtgctggataaagttagaaaacaagtcttcccagagataaacagaagcagtttgattctaattcatataggaaaattatattaagtttctattacatagcagtcaaagtattgggagagagggaagcagtatagttaagtgagactggcttgtcccaatactgtaacacaagcaaactgcaacaaaagcaaaaatgtatgtattcagaaaggaagaaagcaagaggggtaaatatggtccagtgcttaaaagcatgaactttagatctgaaaatcctgaattttaattcctcctctactacttacaagcagtgtgactatggaaaagttgcttaacccacctaaagttagttaaccaactttcctacattttggggaagtttgggtcaactacctaaagcagtggacatagagcaactcccctcaaaggctgtccaagtaaaaagacacagagctgaatatcaattttgacagaggaccagagtagtgagctaactcatggaataattgacattttccacatagctcactggtgaattttcagtttcccgaaagcatatatgctccagtaccatacacgtaaaatctgtatgattatcaactctatgagctttatattcccctgctgtaaaattatggggtagcccaggatggtcggcaagtcctttcatctctgagattcagggatcaaatgaagatgttgaggtctcatatgcgaagtcatggacagtgcttttctaccaactgaaaagagaatcagccctggcacagtggctcatgcctgtaatcccagcagtttgagaggctgaggcaggctgatcatttgagtgccagagttcaagaccagcctgggcaacacggcgaaaccctgtctctacaaaaaatgtaaaaatgatccgggtgtagtggcatgcacctgtgttcccagctactcgggaggttgaggtgggagaattgttggagctcaggaagcagaggttgcagtgagccaagatcgagccactgaactttagcctgggtgacacagcaagaccctgtctctaaaaataaataaataaaataaaaagagaatgttttccaggattgatgaagaggaaaaagtaatttagagggaaaaccctgcatattataactatttacatttctttgctgaattgatggacaaaatgccattttgggatgaagaggaagcagagatgtgatgtgttacagaagcagaacccttgagcttggggaatgttggtaaagttcaccatatgccttgagtgcagggcttctataggattaataaatgcctgtttgaaaatgttctcaatgaaaaacga

SEQ ID NO: 691707 - DNA, 1188 bp, Homo sapiens
tttttttttttccgagatagggtttcactctgtcacccaggctggagcacagtggcatgatcacggctcactgcctgaacctcctgcattcaagcaatcctccctgttcagcctccagagcagctcagagtacagactaatgccatcaggtctggctcatttttgtttttgtttttggttttttgttttgagatagactctctgttgcccaggctggagtgcagtagcatgatctcggctcactgcaactccacctcccaggttcaagcgattctcctgcctcagcctcccgagtagctgggatgacaggcgcccaccaccatgcccagctaatttttgtatttttagtagagatggggtttcaccatgttggccaggctggtcttgaactcctgacctcaggtgatccagccacctcggcctcccaaaggactgggattacaggtgtgagccactgcgctcagctaatttttgtaatttttttagagatggagtctcactatgttggccaggatagactcgaactcctgggctcaagcaatccaccaccttcagcctccaaaagcattgggattacaagcataagccaccacgcccagctgtctattcacttstaataatttcctaacatcagtcgatcattagaaaaagagaagttctgcttaatttgacactggcatatcaagtgcctgctatgttatatgttaacttggaaagaatcattacctatattcatgagtgggggagccagatgtcttctagaatggatggatctcctgacaaggcacccatacctgaattatgaacgtggctgcccactctctgtggcagtcctccgtgcctaacaggctgaacacaattgaaagtcggacttttcctaatacagcagagccacggcctgcctggatataacatcttttgggaaactatattcttttcaaaagtcaacagccacttttaccaacctattctctctccaagatggctctcagagcaaattctgaaattcttaagaatactgcatacactgaaggcatttgaaattgagatggaagcagcaggccaactccaaggctatttccagtcaacccctgtaggtcttacacaataaagactttttggtggttagtataccttagaaacttgctgtgtgcacagttccattctggagaatacagagattgacaa

SEQ ID NO: 691708 - DNA, 657 bp, Homo sapiens
gggttcaaaataaataccaaagaataaacaggagtcaagagggacccctgtcccattcccgaggcgtaagacccccccactgagggaggggctagtaaagactccacccctcccccgtttctgaggtttgaaaagaaagaagtagaggtcaagagagcctcccctccccaccattcccagaaaaggaggaaggggctgatggactctctgggaaccccctcccctccctgcgcccygtcatcaagaagaaaattcgaagaaaaggtttagcagggacagagaagcgacctgtcccggaaaccccttaaagcctgcggtaaatgccccgggaaacagggagggcacgagccgaagcctccagctcttcaaagctcggattcaaagacccgggggctgggagaccccctccctccatcctgggaaagcaaaactcagaggatggagccttttgggagctaagatggtccatcttttattcctccaaatctttagggaaggaagtcagaatttggggagggaggaggagcccgaaaccccagcccccactttgggtctcctgctccccctactccagctttcaaaccctccaggggtgtgtggcccccaggagagtcctgatcccctagattctccccccacccctcccagtaggcgggg

SEQ ID NO: 691709 - DNA, 657 bp, Homo sapiens
gggttcaaaataaataccaaagaataaacaggagtcaagagggacccctgtcccattcccgaggcgtaagacccccccactgagggaggggctagtaaagactccacccctcccccgtttctgaggtttgaaaagaaagaagtagaggtcaagagagcctcccctccccaccattcccagaaaaggaggaaggggctgatggactctctgggaaccccctcccctccctgcgccccgtcatcaagaagaaaattcgaagaaaaggtttagcagggacagagaagcgacctgtcccggaaaccccttaaagcctgcggtaaatgccccgggaaacagggagggcacgagccgaagcctccagctcttcaaagctcggattcaaagacccgggggctgggagaccccctccctccatcctgggaaagcaaaactcagagratggagccttttgggagctaagatggtccatcttttattcctccaaatctttagggaaggaagtcagaatttggggagggaggaggagcccgaaaccccagcccccactttgggtctcctgctccccctactccagctttcaaaccctccaggggtgtgtggcccccaggagagtcctgatcccctagattctccccccacccctcccagtaggcgggg

SEQ ID NO: 691710 - DNA, 1485 bp, Homo sapiens
aagaaaaatgaggtagtgcaaaataaaggccagagaagtaagtaaaaatgagaatatacatgtttaagaccatgttaagacttcagtctttaagaaaaaggagaagccactggagtggcttaatttgaagctgagaagagaaatggaggtgggaagtgatatgaccaaactggcacctcagaaactgtagcataagatataaaggtcagtggtgtggtcttagggttaaagagaagagccagtaagtgggaagaaggatcattttcagggccaagtgaaattgagcaaagtacgataactattttgggtttattatgtaccctaagaaattttgtgtagcactgaaggacaggagatactcgaaatagagaaggcacatgagaaaaataacccaaccaattgtaccaggaatgttaaaaatcttcaaaaaaggtcttcttgtaatattttaggatgtgaacatatgatttccttttgttgttgttgtttgtttttagaattcctataaaagtaatatatgttcatttgtaaagtactggtgtaaagaggtacataaataataataataatcttgcataatctcactagactttataaagacattattgctgtctgactcaccactctgtaagagaaacagcccagctcagtggcccagggtacatatttgctcttgtgaagtacaaagtatctacatttggtaattgatgaccctgactaagattactagttaactcaagcatagtcattagagaagaggcaaaaacctaactcctggaaaaagcttatatgaacaccaaaggctcatatgaataacatcaaaaaaagcgcctatgaacaccaggtgtcagcgattaagaattaaggttagtggtccaatgtcaagagatgaaagctgacagtgtcagaattgccttgaacaccagctagtgtttgaagcttattattataagcagacaagtttatgtttgtgatatataggaaaatccacatggtgctaacaacctaagtttcaaactatggtctttctaagacaagcgtcagaactacctcagatatttctcaaacacacacacacatacacaaatgcacaaattcctggtgttttccccaaacctaatgaataaaaaaacctctgaagttaagttcaggattatgcattttcaagaagtacacatcattcttacatgcacccaaattcgaaaatcactggtctgggctatgattaccaagacacctggcactgaagaaagctcatgcctgcraatagtaactattcaaggaacactgacccactcaccttattcaaagaggttgtttttctcaataattagtaaaaggtaactaaggtccaaatttcctggtccctttcttcactatagtcttcccaaagccccaagtttaatggaataacttccccaatagcttaaaatacttagtatcagcaatattttacaaatgaattcaattattagctaccaagag

SEQ ID NO: 691711 - DNA, 1298 bp, Homo sapiens
gacattaaacccaggtgtgtcttaaaagaacaaaaatgtactattgctccaatataatggcacaatctcataaatacttgagaataactatcttgggtatttccctatgcctttttttcacactaaatgtctttaaagttctttcacaaatgcaacatctgcttagggaatatattctctgcaccagacactaaagaaacaaagacaaataagaaagctattgttcctcaataacttgcatctgagagtgggaaaacattctaccagagtgttttaggccctatcacaggccaggagtggtggctcactcctgtaatcccagcactttgggaggccaagtcgagcagatcgcttgaacccagtagttcaagaccagcctcggcagcatggcaagaccctgtctccactaaaaatacaaaaattaaccaggcatggtggtgcrtgcctgcagtgcagtcccagttacttgggaagctatagaccagcctcggcagcatggcaagaccccgtctccactaaaaatagagaaattaaccaggcatagtggttcacgcctgcagtgcagtcccagctacttgggaagctgaggtgggaggatcacctgagcccaggaagtcaaggccacagtgagctatgatagcaccactgtactccagcctgggtgacagagtgagaccctgtctcaaaaaaagccaccaaaacaacaacaacaaacgctgtcacaggaaaatttgtgcattgttttaagaaatcagaatctattctttctataacttcctcctaatctaccaccctaattagttatacgatcgagagaaaacaatgatgctaaatttgatacattgcctggcatatggtagctacttgtgctggataatctttgcccttccagatcaactctacaggcttatctatcctgctttgtgccctgggaagtaaactctaaaggttgcttcagccaagttttattacattccaatttgtacttgggtttcgtcaatgggagaagccaataagagaaaagaggatagaaggagacagaggctaaggtatttattctctgtgttctgcctggtggtccaaggtttggcagtggctttcccccatacctaaggcctcagctccttctgggaccctttccgcatggctgcagctctcactggattccaatatgtaattgttatcttcccttgtcctttctggcctaaggatggtaatggctttctgctattgctagcgaactcctgagtgtttcactattaccattggttccctgagccctgcccacgatttgtaaa

SEQ ID NO: 691712 - DNA, 630 bp, Homo sapiens
tgctaacctgggaagaaggcagaaacaactttagccatcaatagtatttaaaacctgtgagcaaaactaggtcataattgaatgactgcagaggatccagccagccagggagtgtgtctgaaatgcatgcttagtgawgctcttataaggtgaccatttgagccaaagtcagaattcaaaaaagaccagagttagggaatacaagagaaaaagtgagtctggccaaatactggaaacaatacatctatcaagtttatccaagccaccttattttgttgttgttttgttttactttaggcttttagcagcctgaaaccaggtttttaatttctgtctctaatgataaccagaaaagagggatgagaaaggggatttactggcccaaccagaaacagaaactaagaatccatgactatattctgtctcttggatacccctgattctagatttttatatgttgttgccgtcaatttttgggtgagcttgtcctatttaaggactccagaaagaaggggctcctattttccttctaacttgcatttcgagtttactgttagaaatatttgatgagttatagtacttgctgaggcaagcagtgagttttgaggaattgctatcccatgtcattcc

SEQ ID NO: 691713 - DNA, 996 bp, Homo sapiens
tatcagtaccaagattaaatttgtaaaatctctcctagttccctacatcttatttaagaactaaacattggtccgggcacagtggctcacacctgtaatcccagcactttgaaaggctgaggtgggtggatcacttgagcccaggagttcaagaccagcatagggaacatagtgaaaccccatctctacaaaaaattagctgggtatggtggcacatgcttgtagtcccagcgactcaggaggctgaagtgggagaatcacctgagcccaggaagtcgagatcacaccactgcactccagcctgggcatcaaagtgagaccctatctcaaaaaaaaaaaaaaatatatatatatatatatatataaaggaattatacatcatttttatttctatccagtgtcgtgtccccaggataacaatcatgggctgtraggattattacatcaagatgttttaaataattttttaaacaatgattcctcaaacttccctgaagcatggatgattatacatgttctgaagtattggtgtgtgtgcctgaataaagaagcatgggaaacagaactctggaacaaagacagttaggatatcaactctataatgccacagtcatggagtcaagaagggttactgtattaacacttgcttgtagttttatgagtttaaggatgagccgttttgttttgtggaagaccacaatatgctaccccacaatattcctctttggcataaagatcagtcagctgatggcatttaagaagcagatgccagttgggtgccatggctcatgtctgtaattccagcactttgggaggccaaggagagaggaccacttgaggccaggagtctgaaaccagcctaggcaaaatagcaagactctatctctaccaaaaaaaaaaaagaaaaaaaaattagaaattaactgactgtggtggtgcacacctgtagtcctaactacttgggagactgaggtgggagaatcacctgagaccagg

SEQ ID NO: 691714 - DNA, 996 bp, Homo sapiens
tatcagtaccaagattaaatttgtaaaatctctcctagttccctacatcttatttaagaactaaacattggtccgggcacagtggctcacacctgtaatcccagcactttgaaaggctgaggtgggtggatcacttgagcccaggagttcaagaccagcatagggaacatagtgaaaccccatctctacaaaaaattagctgggtatggtggcacatgcttgtagtcccagcgactcaggaggctgaagtgggagaatcacctgagcccaggaagtcgagatcacaccactgcactccagcctgggcatcaaagtgagaccctatctcaaaaaaaaaaaaaaatatatatatatatatatatataaaggaattatacatcatttttatttctatccagtgtcgtgtccccaggataacaatcatgggctgtgaggattattacatcaagatgttttaaataattttttaaacaatgattcctcaaactyccctgaagcatggatgattatacatgttctgaagtattggtgtgtgtgcctgaataaagaagcatgggaaacagaactctggaacaaagacagttaggatatcaactctataatgccacagtcatggagtcaagaagggttactgtattaacacttgcttgtagttttatgagtttaaggatgagccgttttgttttgtggaagaccacaatatgctaccccacaatattcctctttggcataaagatcagtcagctgatggcatttaagaagcagatgccagttgggtgccatggctcatgtctgtaattccagcactttgggaggccaaggagagaggaccacttgaggccaggagtctgaaaccagcctaggcaaaatagcaagactctatctctaccaaaaaaaaaaaagaaaaaaaaattagaaattaactgactgtggtggtgcacacctgtagtcctaactacttgggagactgaggtgggagaatcacctgagaccagg

SEQ ID NO: 691715 - DNA, 1673 bp, Homo sapiens
  misc_feature 348, 349, 350, 351, 352, 353, 354, 355, 356, 357, 358, 359,360, 361, 362, 363, 364, 365, 366, 367, 368, 369, 370, 371,372, 373, 374, 375, 376, 377, 378, 379, 380, 381, 382, 383,384, 385, 386, 387, 388, 389, 390, 391, 392, 393, 394: n = A,T,C or G
  misc_feature 395, 396, 397, 398, 399, 400, 401, 402, 403, 404, 405, 406,407, 408, 409, 410, 411, 412, 413, 414, 415, 416, 417, 418,419, 420, 421, 422, 423, 424, 425, 426, 427, 428, 429, 430,431, 432, 433, 434, 435, 436, 437, 438, 439, 440, 441: n = A,T,C or G
  misc_feature 442, 443, 444, 445, 446, 447: n = A,T,C or G
tatgttcatttggtaacctgatctattttaaaacctcacaaatttttggtagcaataaccagatctattttttacaattgtatatgtgtatataaacaaaataggcatacagactcttttttttttttttctttgagatggagtctcactctgtcacccaggctggcatgcagtggtgcgatctcagctcactgcaacctctggctcccgggttcaagcgattctctgcctcagccttccgagtagctgggattacaggtgcccgccaccatgcccggctaacttttgtatttttagtggagatggggtttcaccatcttggccaggctggccttcaactcctgaccnnnnnnnnnnnnnnnnnnnnnnnnnnnnnnnnnnnnnnnnnnnnnnnnnnnnnnnnnnnnnnnnnnnnnnnnnnnnnnnnnnnnnnnnnnnnnnnnnnnnttcaggtttatttgtcagttagacttgtattgcttataaaacataatattatactatttcttatagatagtattttaaataggtgcatacattttctgtaaaattagaataatgcaatatcagtcccctgcatttctgatgatgaatgaccatgatgatgaccaaggatgaagacctaattgacttaagtaaaaatgaagaatttggtagaaagctattggcttatgtcatgaaagtaaaggaaaagttgatttaggaaaaaaagaaatctgggagattccagagacttggcagcagccatttttggacttccttctggaatacctatctccagggatacccagatccagcaattccaaggctctgcatatctgtgttccttagttgaaatgagacagaatatgattgactgctttggttgggtctgtacctctggagcaatcacctatggctcagggaacagggtcacacagaatagatttgcatcctgatgacctgcttctatgaatcaggctcattctcaagaagggatgcatgtgatctgggcagtcacccagagttatctgttactgcaagaggcttgaaggagataagtgactgtgagaaacacacatttacccatccaaacccgaagaattaactcagagacatgaagaacagtggaagcaagacttttaatggtggtcttgcaagattgggtgtctggtaggcaggcacacctggggcagttactgcaggtaatttacctcctagcacgcaagtccctcccctagttcctcattggttgagcactatggggttacaatcctcccggacattgcctaggtctcattatcttccttataaagttatatcctggtctccttccccgcttaagtttggatttcccaataacgaaactgtcttctatttatgggctgacgtcttctctacattctgtttgcttattgtgactttctagaagcatgagctgcgtggtttgttacatctgcagggaggctgccagtacatagatttattatgccttgaaaatggaccattagaaatgttttctcacagtaactggaccagggtcatgttgctccctctgccctagatgtgtgaacttggacacgacattcagccttctccaggattatcacctcctagggtagggctygaaccctggacctgacccttctgttcacagccctcagagcatttcattacagttacagaatactgca

SEQ ID NO: 691716 - DNA, 1626 bp, Homo sapiens
atccacttaaagttaacttctagtgagtatggttcacactttcttgttttttcatgactcattttcttttgttaagaactgaatattttaggtaatatgttatctcacctctagattatgttttgtttttctgaaatttttcttttctgtttttctttttagtaccttgtattgacttacaatgcaaaatctgtctccctcccatggtatatccaatgatacttccacattttattaccctggcttcatagttttaaatttttaattgctcagtttttaaatttaaatttaaagttttattccaggctgccttagaaagtccaaatttggtctgagcacagttgctcattcctgtaatcctagtattttgggagatagaggcaggaagattgcttgagctcaggagtctgagactagcctgggaaacttagtgaaggcctgtctctacagaaaatacattaaaaaataattagttggtttcaatgatgtgtgcctgtagtcccagctactgaggtggctgagatcagagaatcacttgagcctgggaagttgaggtgacagtgagccatgattgagccactatattccagcctgggtgacagactgagaccctgtctcgaaaaacaaaacaaacaaacaaaaacacccaagaaagtacatgtttggatagcttagaggttagtcaattatggaaacataatatgttcaaacatttctagccagtaaggcttctactatctttcaattgatcttgttgtgggtttgggagcatattgaaagttatctagttctccaatctcttttagcttttaacttctgcccagattgcttgagtctttctaatgaatgcagtagttctccagtcagcaagggatctgggagagttacataatctttctatgttttctcactttcaggttctcccaattaaatctctggctgatccatgcttgcccaatccagaagtgtaacttcaggctagtaaagctgcaggtttccctagtttgttttcttccaactttgccatctttaactgacaaaaccataagtttccttcctgctctcccaagttaatgccacatcccctctgggagtaaaactgaggcttttttaggttagacccacctgataaagctatttgtttgcttttggtaactgacctgaggtgggggcggacaaatgaatgccagcagccacaggcaaaaaaggccaccaactgctattgttcttaaccaaagtttcagtagtttttcaagaaaaaacttctcaatttgtcatctggcttgatagattttaagagccctgacatgattgtatttgttcagtttgtgtgtgtgtgtatatatttttctgcatatatatttatatatatattttttgcccatataattatctatattttgtgtatacatctatatatacagaaaatatgtatatattgtatatatatctatatgtatatattgtgtatatatctctatatatgcacaatattgtgtatatctctctctatatgtatatattgtgtatatatacacaaaatattttgtgtacatatctgtatatacataaaataygtatatattgtatatatctatatgtatatattgtgtgtatatctatata

SEQ ID NO: 691717 - DNA, 603 bp, Homo sapiens
cctctgaaggatcatttcaaaagcttgatgtgttttatctgcctcagagctaccataggattgaagcaactacctaggtagtatttgttgaaagcatttaaaggcttaagtgtagtattacatattaagtgtggtattagctatgaacacctgaagcaaagtataatagctacaacaaaatatagactaagatgcttaagaatgaagagtctcggaaatgagaaacttagtgactaagagttttaaaaagcttgcattttcaaaatggcaatatttatcaaagcaatctaaagacataatgcaatccctattaaaatcccaactgtcttttttgcagaaatggaaaaggtaatcctaaaatccatatggaattgtaagggatttcaagtaactaaaacaatcttctaaaagaaaaatgaagttggaagatgtacttctaaatttcaaaacttatcacaaagatacagtaattaaaacaccatgataccagcataaggatagaaggggtgcaggaagtgctscctgaaaatatggcatattggcatgctgaatattttaagccaaaggaaattgagaaagaccacagaaacagttttgttttcg

SEQ ID NO: 691718 - DNA, 654 bp, Homo sapiens
agacggagttttgccctgtcgcccaggctggagtgcagtggtgtgatctcggctcactgcaacctctgtctcccgggttcaagcgattctcctgcctcagcgtcccgagtaggacccagccaattttttggtaatttttagtagagacagggtttcaccatattggtcaggctggtctccaactcctgacctcaggtgatctgcccgccttagccttccaaagtgctgggattacaggtgtgagccgttgcacccggccaacattttcttttagaatgtatttttttttctataatagaatatccttacgagatcattatactaaaaaatccccagagaagtcctttatgtacccttttgggaaataatattttcttgtgcatatcagtggaattttatggtagttccatgcctaccctaaacattaggaattgagatttattttgaattgaaattgataggttggtgcatgatgtggaaatagttggccgccccrgttagcctgctgttttctaatggtgaaaatacagattttactgagctctaagattctatggagaacagtatctatagaggatctataaatatgaaaacattgaactatttcatagttaattcatccactgggcattttacatggaatattttatctta

SEQ ID NO: 691719 - DNA, 654 bp, Homo sapiens
agacggagttttgccctgtcgcccaggctggagtgcagtggtgtgatctcggctcactgcaacctctgtctcccgggttcaagcgattctcctgcctcagcgtcccgagtaggacccagccaattttttggtaatttttagtagagacagggtttcaccatattggtcaggctggtctccaactcctgacctcaggtgatctgcccgccttagccttccaaagtgctgggattacaggtgtgagccgttgcacccggccaacattttcttttagaatgtatttttttttctataatagaatatccttacgagatcattatactaaaaaatccccagagaagtcctttatgtacccttttgggaaataatattttcttgtgcatatcagtggaattttatggtagttccatgcctaccctaaacattaggaattgagatttattttgaattgaaattgataggttggtgcatgatgtggaaatagttggccgccccggttagcctgctsttttctaatggtgaaaatacagattttactgagctctaagattctatggagaacagtatctatagaggatctataaatatgaaaacattgaactatttcatagttaattcatccactgggcattttacatggaatattttatctta

SEQ ID NO: 691720 - DNA, 1051 bp, Homo sapiens
tcatatatctatataatataataaattaaataatatacatttatttcatttatatttatacatttcaaaatttatttttggttttgaaacttgatgtgttacagcatataacaacaaaacaacacaatattttttataatatccctcacttttaaaaagaggctgaggaagcaattttatttgaacaggtgagatattttagtgcagattggcatcattattaatctggcttttcccaaaagtaaaaatttgaaatggagataaaggaatagacttcctatattttgaacaatcctctttgacattatctgtgtctcttgagactttacaaaaggtgggtagctgagattaaatattatgtttttggtaagaatgtggagtgtggttatgtaaggcttctaattaagggtatattcatataaattggtagtaaacagaaagaaaagagaggtaggcatattattaaacaaactcaggaggcttacgtttgtgtgcaaatgatggacgaactctgactttgcataaatttgaacccaaagagcatctctggacacagtgktcttcagaaataattaagaataattgagatcttaacagtctatattatagaattcacccatataattgtagtaattgtagtttccttttttttaacagtaatttccattgctctccaaggatgtccaaataacaccatttcctactaaacttgagcttatctgcccaaatttacctatttgttagaaaatgtttatctaaataaatctatgctttaagctgttttagagatttgcatacctaagtcagtaacttttaaataatgtttgccaaattgtttatattattattgagtcatctattgggggatccttagggagttagcctgttgtccaatgatgtcatttttggatatgacagtacaattatgtcataaacttggaaaaaatgtgtctattctcagtaaaaggatggcatacatccagctcatccaaaatgatcattgagtaatcacagtaaaaattaaacacaggaggtttccaaaatgtgtact

SEQ ID NO: 691721 - DNA, 1051 bp, Homo sapiens
tcatatatctatataatataataaattaaataatatacatttatttcatttatatttatacatttcaaaatttatttttggttttgaaacttgatgtgttacagcatataacaacaaaacaacacaatattttttataatatccctcacttttaaaaagaggctgaggaagcaattttatttgaacaggtgagatattttagtgcagattggcatcattattaatctggcttttcccaaaagtaaaaatttgaaatggagataaaggaatagacttcctatattttgaacaatcctctttgacattatctgtgtctcttgagactttacaaaaggtgggtagctgagattaaatattatgtttttggtaagaatgtggagtgtggttatgtaaggcttctaattaagggtatattcatataaattggtagtaaacagaaagaaaagagaggtaggcatattattaaacaaactcaggaggcttacgtttgtgtgcaaatgatggacgaactctgactttgcataaatttgaacccaaagagcatctctggacacagtggtcttcagaaataattaagaataattgagatcttaacagtctatattatagaattcacccatataattgtagtaattgtagtttccttttttttaacagtaatttccattgctctccaaggatgtccaaataacaccatttcctactaaacttgagcttatctgcccaaatttacctatttgttagaaaatrtttatctaaataaatctatgctttaagctgttttagagatttgcatacctaagtcagtaacttttaaataatgtttgccaaattgtttatattattattgagtcatctattgggggatccttagggagttagcctgttgtccaatgatgtcatttttggatatgacagtacaattatgtcataaacttggaaaaaatgtgtctattctcagtaaaaggatggcatacatccagctcatccaaaatgatcattgagtaatcacagtaaaaattaaacacaggaggtttccaaaatgtgtact

SEQ ID NO: 691722 - DNA, 1051 bp, Homo sapiens
tcatatatctatataatataataaattaaataatatacatttatttcatttatatttatacatttcaaaatttatttttggttttgaaacttgatgtgttacagcatataacaacaaaacaacacaatattttttataatatccctcacttttaaaaagaggctgaggaagcaattttatttgaacaggtgagatattttagtgcagattggcatcattattaatctggcttttcccaaaagtaaaaatttgaaatggagataaaggaatagacttcctatattttgaacaatcctctttgacattatctgtgtctcttgagactttacaaaaggtgggtagctgagattaaatattatgtttttggtaagaatgtggagtgtggttatgtaaggcttctaattaagggtatattcatataaattggtagtaaacagaaagaaaagagaggtaggcatattattaaacaaactcaggaggcttacgtttgtgtgcaaatgatggacgaactctgactttgcataaatttgaacccaaagagcatctctggacacagtggtcttcagaaataattaagaataattgagatcttaacagtctatattatagaattcacccatataattgtagtaattgtagtttccttttttttaacagtaatttccattgctctccaaggatgtccaaataacaccatttcctactaaacttgagcttatctgcccaaatttacctatttgttagaaaatgtttatctaaataaatctatgctttaagctgttttagagatttgcatacctaagtcagtaacttttaaataatgtttgccaaattgtttatattattattgagtcatctattgggggatccttagggagttagcctgttgtccaatgatgtcatttttggwtatgacagtacaattatgtcataaacttggaaaaaatgtgtctattctcagtaaaaggatggcatacatccagctcatccaaaatgatcattgagtaatcacagtaaaaattaaacacaggaggtttccaaaatgtgtact

SEQ ID NO: 691723 - DNA, 636 bp, Homo sapiens
tttaattattataaaactagaagaaataaaataacctttggattgaagaaaatgttttgatatgtaatattaatatatttgtgcttataccagcacagtcataaaatataaattatatgtgtgtgtatacatttatttatcttatttatttatttatgcaggaaggcctaagtgcctaaagcctaccaaaattatactacagtagttctctattcttcataaagtcttaattctatctacagctatatataaatatatatatatacacacacatgtttatatatagatatagatacatagatatgtaattcagtattggatgattctaggacctagtatatgcagaacctacagactgagtctgtagttcattacgtctgctgacttttgcttatagcggcttatttttttagatgtttcctgctgtgtgcatatatttatatccttttaaactttctctgtaaacwcattcaggtcagactgaaagtgcttcctataaagaagatttgtgtttgttctttccagatacctgggtacactgccaactcagaacaactttaaacagaaattgacttcagttgttttcttttttctaaggcacaaaaatcttgtgaattctagtcccaactcattgac

SEQ ID NO: 691724 - DNA, 932 bp, Homo sapiens
tcaaattaagattttatgacttacatgccacctttgtcaatattcctgcaagggaagggacattttaaatttttcaaacaatattgttttgacagtttttttaaatgtacaatctcttatttatctgagttcaacctgagatcacaagagagaagaatctctaagtaaaactatagaataacttcattaatggttacatctacaaggagaggggaagaagaaatggttacattttgaaaagtattaatttcatttgactttgagctattagaagtccagattttttaatctgagtaccccattttaaaaaaagaaataaaaccttgcaaaacacaccagaatacatccagtaaaggaaaatcaaggtgaaagrtcagagaaaaaaatcagtgtctattctgtgaatggttgaaagttatagaaagacagattttcaactcagtttaagtccaaactttctaataatttgatgtagcagtgtaatgggctgcattactagtgagttccttatgtgagtgtgcgagcatatgctggatgacttatctagaataatgtagaagagaattaaacattgaatgggagcttaaattagttaatttctgaggttcccttccattcttagaattctttgatttttatattgaattgagagaactagtatagtttttatttcagcaaattatagcaccattgttctcaaggcatggaaaatgtgcttttcatctttaagatactaaaccttttcactcatggcaattttttttagctagcctctaagcttggaaagcagtggaccccattaataatcctggccaactctcgtagtggaactaatatgggagaaggactgttgggagaatttaggatcttgttgaatccagtccaggtaactaaagaaaaaaactttttatattaatgttttcattttcccc

SEQ ID NO: 691725 - DNA, 932 bp, Homo sapiens
tcaaattaagattttatgacttacatgccacctttgtcaatattcctgcaagggaagggacattttaaatttttcaaacaatattgttttgacagtttttttaaatgtacaatctcttatttatctgagttcaacctgagatcacaagagagaagaatctctaagtaaaactatagaataacttcattaatggttacatctacaaggagaggggaagaagaaatggttacattttgaaaagtattaatttcatttgactttgagctattagaagtccagattttttaatctgagtaccccattttaaaaaaagaaataaaaccttgcaaaacacaccagaatacatccagtaaaggaaaatcaaggtgaaaggtcagagaaaaaaatcagtgtctattctgtgaatggttgaaagttatagaaagacagattttcaactcagtttaagtccaaactttctaataatttgatgtagcagtgtaatgggctgcattactagtgagttccttatgtgagtgtscgagcatatgctggatgacttatctagaataatgtagaagagaattaaacattgaatgggagcttaaattagttaatttctgaggttcccttccattcttagaattctttgatttttatattgaattgagagaactagtatagtttttatttcagcaaattatagcaccattgttctcaaggcatggaaaatgtgcttttcatctttaagatactaaaccttttcactcatggcaattttttttagctagcctctaagcttggaaagcagtggaccccattaataatcctggccaactctcgtagtggaactaatatgggagaaggactgttgggagaatttaggatcttgttgaatccagtccaggtaactaaagaaaaaaactttttatattaatgttttcattttcccc

SEQ ID NO: 691726 - DNA, 1670 bp, Homo sapiens
taaaacagtaaaatttgcttcctgatgtcataagaaagaattaataaccactatataaaattaacaaatcaagaaacaggtaaataaaaatactcagagatttgaaatcagctaccagaagaaacaaataaaagagataaaaagtagttatctttggagtatggaactaagggtggcaagggatgaaacacttctatatttatcttattttttaactgtgtgcattcttaattttacttaaaacaaaaggcaaaaggcataggttttagttaagcaattcatatgctattctagtggatttgaaatccctctttgacacttgctaaccgtgtaggtgcctggcccagatgtggggggtaggaaatgttaatttcctttcccaccttctgagggttcgttcctgtaatcaccagaaatgtacacttcctgggctatttcattcagcccccaaccttgtccactgaacaagacaactgagtcgctacaccaaattctaggatccactttgtcacaccaggcctccttacacatatgactccacctccagatacataatagcactcagtgaacatttggtgaaactgaataaaaatgcctgtagagaccaaatgcctcatgcagagaccaaatgcctagagatacccagtgcacactgtctgtgaacttctcttttgatgctgcatagaaacagcaccatgcttattccttcagcatgtgtctgtgcagcttctactatgtccgtggtaagcaagtgagtcatggcctcagccttcatggagacagacattcagtaagtcggtatgtaattacacactgcaataggtgctatgaaagaaaagaactggactcttaagaaaaaataactttattggaaggtcaagggggacttttcagaggaagtgacattatgagctcaggacatatgaatctcagagttcaagatttaaaaaaaggagtgtggctgggcgcggtggctcacgcctgtaatcctagcactttgggaggctgaggcgggcagatcatgaggtcaagagatggaaaccatcctggccaacatggtgaaaccccgtctctactaaaaatacaaaaaaattagctgggcgtagtggcgcatgcctgtagtcccagctactcgggaggctgaggcaggagaatcacttgaacccgggagggtggatgttgcggtgagctgagattgcaccactgcattccagcctggcgacagagcaagactctgtctcaaaaaaaaaaaaaaaaaaaaaaaaaaaaggagtgttctaggcagagagagctgcatgtgcaaaggtcccgaggtggaaaagctgaatgtgcaagagtgctgcttctcacacttcactgtgcacctgggggtcttattaaaaggcagactctgtctcagtagttctggagtggggcagaactcctgaatttccaacccactcctaggtgatgccagtagcatcatgtttgaggaactgagagatttatggacagcatagtgagcaagggtgagakcaaggagatgggactggaggaggcagagaccaaatcatgcaggagcttgggggccacctcctaaatgtcagcaggagagtcacacagtctgatgtggcaattgacaaaatgcctcttaaatttttaaagtgctctgtaacgttgctgacaatggt

SEQ ID NO: 691727 - DNA, 751 bp, Homo sapiens
aaatataggacttccattttcccatattgtagaagaaacaaaaattctggaatttgaggctgggcatgattttagtattatattgcttttgcattttaaaactttaaagattttaagtatttttgataatgaaaagaaacaagtttcaaaaaagtttgaggaaaattctgaacatcaagttttgtcatctgtaaatgtagataatagctgccttgtacttttacaaggtataatgaacacaaaggtacttttcaatctgtagaataccatatgaatgtctaatatttctgttttcatagtataatcacattgcctcatataacattttcccctatacacaaaaatacaaaactctaaaatagttctcagaaatacaattaatatatactaaaaatcttagtgcaaagagcacgagtgacctgaccagcattaatagtgaccagcacgatgcagatayttatacatatctgatttttttaaataaaaatgtgttgaatattttatctgtcagactccagtcaggagatataaaccacactagttatcttaacagagttatagtgaagaattaaaagcgtagaaagtaaacattaaggtgtcacagaggtaaagggaaaatatcattgcaaaagtagccatcattcaaagggaataggttagaattacttaaactcagatgctagagaagaagcacatgaatctgacattcggacctctgaggatgaggagctccttgactgatgctggaatc

SEQ ID NO: 691728 - DNA, 2654 bp, Homo sapiens
ctcttatgattttgttgaatgatgtttgtgtcttgatgtaggttcacaatttcttattagcagttcgaacctaaaagtttgttcatcactatatgtttttggaaagccccttttgtagcttcaattgatgtgacattacttatattttcatttattatatatattaattatttctgtatcacattattgtgaaaattaatttgtttcactgcagaaatattgctatgtttgaatatagggatcttttctagactctaatgtgggtgttatatataacatggtgcagggactgtattatcttcctacaatctaaattgtttttaatcttctatctaaaaaattttttttattatcttcctataatctaaaacccagctggctccaaaggtttttttttagggaattacaaatccctatcacttatgatatgtagcatactctggtaactaaggctaatatttgcttccccgcttactatagtggggaaatgtgttcctgagaktgagtgatcatctagccattacgctttctagctcatcttgccgcagttgtgatcctatgactaaatataaccaatagaatataaaaatggtatattcataattttatctcatttattgtcataataacttcgggaagtcactatggttagcagtattatttttgaaatcagaaatatagaggcttagaagttcttgaagctcataaatgagaaccttagaggtggaaaataattcttctgatgtcaaatcccatgctcctcctaccacaataaaatcttaaaatatatagtttctcttttttctcttctattcttgggcaggtatttgcaaatatgcttctatgttttcttttttttttcctagataagaccagacatactgcatagagtgggtacaaatcttaagcacatattttttttatggctctaggcataagtttgctgggtcggcctaaacaaatctatcagtcattttttgggagtttattagagcagttctattgacattgtgaagatatatagtaataattattacatctttgagtgtttaaccatataccaactattctctaaatgtttttcatacattaatatattttctactcaccacaatcctattaattagttgacctaattattcccattttacagataagaaaactgagacacaacacaatgcaacagttttctcaagttcacatggctacaagtggcagagacagccattggatcctgtctgcctccagagcctacattcttaaacatcgtgatatcgtgtctctcaacatgtgttaatatttacctaattgataattatttattcaactgaataaatgatatttaatttaaaacttactatcataattaagtacctagggtggaatttttaaaatattgaatgttgacttttgatccagaaaattacatttaattttgtttttaatacatctttcataacacagattcttgtttcaatgaagtttggagactcacatttaataacaagttctaacagaaggagaggtatttaaatggggtctagaggaggaatatgaggggaagggcttacgttcagaagaaaagagatactgagttaagagatactaaggaaaagagatacagtatagagaattcctgagagaccccagatgccagaagagtcagcagaaggagtggatgacatatggtgctaacaagactggagggagagggatcctgtatgcccagatcttattaaggactgggtagatgggaacagagaagccaagcaaatatagacagggacaaatattgagtgcattaactatcctgtaggagagtgccccttcaaaaccaacttgaatgttagttacttcaactgacttttatcggctttggctattatcccattccatattcccatgaagatgtccgcacagtgcgatccttaagaaaaactcacaaaatcaagatcactattatagtaatacatttctcctctggagatttcagagtccttttaaatattcaatcatcatgcaattttgaaggtaccttgttcatcttttaaaaattgactgtcatttatttagtgctttgtctcttttaatgcactaatatgtgaggcattgtaatatattaattaaaggacaagctctgggagctagacagatatggaatataatctttgctcatccacttcctagctttgtgaccttgaacaagttacataacctctctaaatcttaattacatcatttgtaacctggggaataataaaaatacctacttcataaaactgtagtgatagtttaatgaaatagtttgtaaatcactcaatgcagtgcctggcccataattagtgttcaataaatatagactgttattaaactgatggtacattttgtgaagttgatttacctttccaaagtgagcaatgtcactctctcttcttcctagcaggaataaacttaacaatatttctaacagtgccgctgttgctttggcctaagtgtggaacagcctttgaaagattacaacagcaaaataagtctaacatggctgactgtatcttgcctttagcctcacaggctggctgtccttgctcattcctaggcataggccaagctatccatgggagaaatttagtgtatagtttaactttgaagcaaca

SEQ ID NO: 691729 - DNA, 2654 bp, Homo sapiens
ctcttatgattttgttgaatgatgtttgtgtcttgatgtaggttcacaatttcttattagcagttcgaacctaaaagtttgttcatcactatatgtttttggaaagccccttttgtagcttcaattgatgtgacattacttatattttcatttattatatatattaattatttctgtatcacattattgtgaaaattaatttgtttcactgcagaaatattgctatgtttgaatatagggatcttttctagactctaatgtgggtgttatatataacatggtgcagggactgtattatcttcctacaatctaaattgtttttaatcttctatctaaaaaattttttttattatcttcctataatctaaaacccagctggctccaaaggtttttttttagggaattacaaatccctatcacttatgatatgtagcatactctggtaactaaggctaatatttgcttccccgcttactatagtggggaaatgtgttcctgagattgagtgatcatctagccattacgctttctagctcatcttgccgcagttgtgatcctatgactaaatataaccaatagaatataaaaatggtatattcataattttatctcatttattgtcataataacttcgggaagtcactatggttagcagtattatttttgaaatcagaaatatagaggcttagaagttcttgaagctcataaatgagaaccttagaggtggaaaataattcttctgatgtcaaatcccatgctcctcctaccacaataaaatcttaaaatatatagtttctcttttttctcttctattcttgggcaggtatttgcaaatatgcttctatgttttcttttttttttcctagataagaccagacatactgcatagagtgggtacaaatcttaagcacatattttttttatggctctaggcataagtttgctgggtcggcctaaacaaatctatcagtcattttttgggagtttattagagcagttctattgacattgtgaagatatatagtaataattattacatctttgagtgtttaaccatataccaactattctctaaatgtttttcatacattaatatattttctactcaccacaatcctattaattagttgacctaattattcccattttacagataagaaaactgagacacaacacaatgcaacagttttctcaagttcacatggctacaagtggcagagacagccattggatcctgtctgcctccagagcctacattcttaaacatcgtgatatcgtgtctctcaacatgtgttaatatttacctaattgataattatttattcaactgaataaatgatatttaatttaaaacttactatcataattaagtacctagggtggaatttttaaaatattgaatgttgacttttgatccagaaaattacatttaattttgtttttaatacatctttcataacacagattcttgtttcaatgaagtttggagactcacatttaataacaagttctaacagaaggagaggtatttaaatggggtctagaggaggaatatgaggggaagggcttacgttcagaagaaaagagatactgagttaagagatactaaggaaaagagatacagtatagagaattcctgagagaccccagatgccagaagagtcagcagaaggagtggatgacatatggtgctaacaagactggagggagagggatcctgtatgcccagatcttattaaggactgggtagatgggaacagagaagccaagcaaatatagacagggacaaatattgagtgcattaactatcctgtaggagagtgccccttcaaaaccaacttgaatgttagttacttcaactgacttttatcggctttggctattatcccattccatattcccatgaagatgtccgcacagtgcgatccttaagaaaaactcacaaaatcaagatcactattatagtaatacatttctcctctggagatttcagagtccttttaaayattcaatcatcatgcaattttgaaggtaccttgttcatcttttaaaaattgactgtcatttatttagtgctttgtctcttttaatgcactaatatgtgaggcattgtaatatattaattaaaggacaagctctgggagctagacagatatggaatataatctttgctcatccacttcctagctttgtgaccttgaacaagttacataacctctctaaatcttaattacatcatttgtaacctggggaataataaaaatacctacttcataaaactgtagtgatagtttaatgaaatagtttgtaaatcactcaatgcagtgcctggcccataattagtgttcaataaatatagactgttattaaactgatggtacattttgtgaagttgatttacctttccaaagtgagcaatgtcactctctcttcttcctagcaggaataaacttaacaatatttctaacagtgccgctgttgctttggcctaagtgtggaacagcctttgaaagattacaacagcaaaataagtctaacatggctgactgtatcttgcctttagcctcacaggctggctgtccttgctcattcctaggcataggccaagctatccatgggagaaatttagtgtatagtttaactttgaagcaaca

SEQ ID NO: 691730 - DNA, 597 bp, Homo sapiens
taggagtgaagcattaactctttcactattaaatgtgatagcagctgtmgatttgttagagatactccttatcatgttgaggaagatactttctattcctgatctgctcagagttttaatcatgaatggatgttgagttttgtcaactgctttttctgaaataattgagataatcatgtagtttttcttctttaatgtagtaatatagtggattacattgattggtttttgtatattcaaccagccttgcattcctcagataaacttttcttggtcattgtctgttatcctttttatatattgctagattttattttgaaatattttcgcaaagagttttgcgtctatgttcatgtgggataatgggctacagttttgtggagtctagagaacatatatttttatttatgtaaatattgtacttactgagtaaatttttctaaaaacatggaatccttggctagaagaaaggcttgggaaattaatatttagctatacagatagtgtgagagcaccagaggaatttacctaactctggagctatgtgctgacatttcaaagaaaaaggaggcctggagacttatagacatctctatg

SEQ ID NO: 691731 - DNA, 597 bp, Homo sapiens
taggagtgaagcattaactctttcactattaaatgtgatagcagctgtcgatttgttagagatactccttatcatgttgaggaagatactttctattcctgatctgctcagagttttaatcatgaatggatgttgagttttgtcaactgctttttctgaaataattgagataatcatgtagtttttcttctttaatgtagtaatatagtggattacattgattggtttttgtatattcaaccagccttgcattcctcagataaacttttcttggtcattgtctgttatcctttttatatattgctagattttattttgaaatattttcgcaaagagttttgcgtctatgttcatgtgggataatgggctacagttttgtggagtctagagaacatatatttttatttatgtaaatattgtacttactgagtaaatttttctaaaaacatggaatccttggctagaagaaaggcttgggaaattaatatttagctrtacagatagtgtgagagcaccagaggaatttacctaactctggagctatgtgctgacatttcaaagaaaaaggaggcctggagacttatagacatctctatg

SEQ ID NO: 691732 - DNA, 647 bp, Homo sapiens
tttttttttkattcccctgcctcaacctcccaagtagctgggatgacaggcacgcaacaccacacctgggtaatttttgtatttttagtagagacggggttttgccatgttggccaggctgctcttgaactcctgacctcaggtaatctgccctgccttggcttcccaaagtgctgggattacagtgtgagccactgcgcctggccctaatcctaactttcattctcccttggccatcttccattcacactgaactaactttaacatgtaagtttgcctagagagaggaaatcagaatgctcttaactcagtaaaacaaaataaaaagaggcctgggcaacatcgtgagacccccatctctacagaacatttttaaaattagccgggcacggtggtgctttcctgtagtcccagctactcaggaggctgagatgggaggatcgcctgagcccagaaggccaaggctgcagtgaactaggttcacaccactgcactccagcctaggcgacagagctaaataaagcaaaataaaaagacactcattcatcgtgtgttctcaaaaaaacaggctgcaacagcgatgcagcttccaagcacttttcaaccctgttgaaaacttactcatcgggtatatttactttactccc

SEQ ID NO: 691733 - DNA, 647 bp, Homo sapiens
tttttttttgattcccctgcctcaacctcccaagtagctgggatgacaggcacgcaacaccacacctgggtaatttttgtatttttagtagagacggggttttgccatgttggccaggctgstcttgaactcctgacctcaggtaatctgccctgccttggcttcccaaagtgctgggattacagtgtgagccactgcgcctggccctaatcctaactttcattctcccttggccatcttccattcacactgaactaactttaacatgtaagtttgcctagagagaggaaatcagaatgctcttaactcagtaaaacaaaataaaaagaggcctgggcaacatcgtgagacccccatctctacagaacatttttaaaattagccgggcacggtggtgctttcctgtagtcccagctactcaggaggctgagatgggaggatcgcctgagcccagaaggccaaggctgcagtgaactaggttcacaccactgcactccagcctaggcgacagagctaaataaagcaaaataaaaagacactcattcatcgtgtgttctcaaaaaaacaggctgcaacagcgatgcagcttccaagcacttttcaaccctgttgaaaacttactcatcgggtatatttactttactccc

SEQ ID NO: 691734 - DNA, 686 bp, Homo sapiens
cagagtttcactcttgttgcccaggagtgcagtggaacagtctcggctcactgtaacctccgcctcccaggttcaagcgattctcctgcctcagcctcccaagtagctaggattacaggcacccgccaccacgcctagctaatttttgtatttttagtagagacagggtttcaccacgttggccaggctggtctcaaactcctgacctctgcgatccacctgcctcagcctcccagagtgctgggattacaggcatgagccactccgccmggggtttaaaatagagtaattctaagagcatcttttcagggtactagtgaatctaaaaggtgacttcaaaaaaatctctttcctctcttcccctgacgtgcccccatccccaaaataaaactgccaaacgaagaaagcccaacagccccggcgcacccagcgcaccttcctccggggcacgctctgcgccacctaccggatgatgctgaggaactgggtcatggtcagctcctgcgggaccaggaacttggttttgtccagcgggggcaggaacgtctccctggggtagcgctccactaccacctgtcaagagtgtcagtccttaagaatgtgactcagcgtgagtgttaggaacttggaacagacagagggaagctgttggctgctcttggtttttcagagaacaggatcggaac

SEQ ID NO: 691735 - DNA, 668 bp, Homo sapiens
tgttgttaaaaaaaaaaaaaaaagttagctgggcatggtggtgggcgcctataatcccagctacttgagaagctgaggcaggagaatcgcttgaacctgggaagcagaggttgcagtgagccgaaaacctgccattgcactccagcctgcgtgtcacagcgagactctgagtcaaaaaacaaaaataaaaggtaaattgtgtttgatgtgtgctttacttcacgatcattttgtgttgcaaaagcgctttcacagtggtatgggaggcaggactctgtgtatctgattctcagggcagccatgtgccggtgtgacctcaccaatccctctgtgatctaggctcccattactattattagggagggaaacttttcctctgctttcttaggtccggtgtctgggggcctacaaataaaattaacaaaaaaaacagctcaacaggaraaaaatcacatcatttttattaatgtttataagtactgcatgaaagttcaccaaaaagaaatgaaacttgaaaaagcagttaggctctgggaatttacatgccattttatcaaaataaaggagatctgggtgcagtggctcatgcctgtaatgccagcactttgggaggctgaggtgagagaactgcttgagcccaggaggttgagatcagcctggacaacaca

SEQ ID NO: 691736 - DNA, 1516 bp, Homo sapiens
agtgtttagtatttaggaagaatggaagaaaatataaaatttcatatatatgtttatatacatatacatatgtgtttatatatgtttatatatttctctctcttcttatacattattcttttagagtacttaacccattattttgtgtgttttctctgtttatgtgtctgtgtctgcactagaatgtaactcagtggcaagcatctttttcactcacctctgtatccacattgttatttggttggatgccaagtaacagatggacgaatgagtgactcagtgaatgaaagacaggaagatgccatataaaatactggaaggtatgatccaggaacatatacaaacattttatcttttgacataggagttcttatcctcttatcccagtaatacagttatcattcaacattagaataacttccagggcatattataatcatattatagatgaagtgataaaagcaatatgactatcttggtagaagaaaaaacatttgaaaaaatgtkcttgtttaaagaaccattgatagcaatctaggaatacaagtgtgataaaatgtaactactcaaaatacaaagaaaatgttatatgtaatggcaaaattttagaagcatttgtatttaaattaggagcaagagagatgttcctggtatcataattgtcattcagtaatctaatccaatgcaataaaacaagaaaaaaaaactactagaagagacagtagaataataatttacaggtaatttttttacatagaaaacccaagatgatgaacaaactgttagaactcaaaaagatagtttagtaagtatattggattataatcatatctaaaacccaatagtgctttaattcacaattcataactaattagaatgtataataaagtaaaagtatgtcttacaatatcaattaatattcatgaaaaataaatgtaagaaaaatgtgtgttgactttatgaaaaaactacaaaatgctattgaaaaagacaaaagatctgaataaacagtgatataccaagagtcaagaaaatgtcaattcttttccaaattcgctgtaaacccaatggcattccaataatcatcacaagagttttcatggaattaaaaaaaaatatgtaacagaatctaaaattcatagatgaaactgaaggtacagattagcaaaaaaagctcaggaattaaaaaaagcaaggccataaattattcaataaaatattcctcaagaatttttaataaaactaaagtaaaataaatagtattgtgttgatgaagtgatagacaaatagattagcaaaacgaaacaggttttggaaactaaccaaaagcaaaggtgagaacttggtgtgttttggagatccagagaaaggatatattattcaataaatgacttttgggaaattgactttccttttggctaaaaagatgaaaattagactcccaaatttatatgcatacatcttccacacatatatattccaaatggattaaatatgtaaacatgaagacaaaatg

SEQ ID NO: 691737 - DNA, 1516 bp, Homo sapiens
agtgtttagtatttaggaagaatggaagaaaatataaaatttcatatatatgtttatatacatatacatatgtgtttatatatgtttatatatttctctctcttcttatacattattcttttagagtacttaacccattattttgtgtgttttctctgtttatgtgtctgtgtctgcactagaatgtaactcagtggcaagcatctttttcactcacctctgtatccacattgttatttggttggatgccaagtaacagatggacgaatgagtgactcagtgaatgaaagacaggaagatgccatataaaatactggaaggtatgatccaggaacatatacaaacattttatcttttgacataggagttcttatcctcttatcccagtaatacagttatcattcaacattagaataacttccagggcatattataatcatattatagatgaagtgataaaagcaatatgactatcttggtagaagaaaaaacatttgaaaaaatgttcttgtttaaagaaccattgatagcaatctaggaatacaagtgtgataaaatgtaactactcaaaatacaaagaaaatgttatatgtaatggcaaaattttagaagcatttgtatttaaattaggagcaagagagatgttcctggtatcataattgtcattcagtaatctaatccaatgcaataaaacaagaaaaaaaaactactagaagagacagtagaataataatttacaggtaatttttttacatagaaaacccaagatgatgaacaaactgttagaactcaaaaagatagtttagtaagtatattggattataatcatatctaaaacccaatagtgctttaattcacaattcataactaattagaatgtataataaagtaaaagtatgtcttacaatatcaattaatattcatgaaaaataaatgtaagaaaaatgtgtgttgactttatgaaaaaactacaaaatgctattgaaaaagacaaaagatctgaataaacagtgatataccaagagtcaagaaaatgtcaattcttttccaaattcrctgtaaacccaatggcattccaataatcatcacaagagttttcatggaattaaaaaaaaatatgtaacagaatctaaaattcatagatgaaactgaaggtacagattagcaaaaaaagctcaggaattaaaaaaagcaaggccataaattattcaataaaatattcctcaagaatttttaataaaactaaagtaaaataaatagtattgtgttgatgaagtgatagacaaatagattagcaaaacgaaacaggttttggaaactaaccaaaagcaaaggtgagaacttggtgtgttttggagatccagagaaaggatatattattcaataaatgacttttgggaaattgactttccttttggctaaaaagatgaaaattagactcccaaatttatatgcatacatcttccacacatatatattccaaatggattaaatatgtaaacatgaagacaaaatg

SEQ ID NO: 691738 - DNA, 1540 bp, Homo sapiens
gtcacccaggctggagtgcagtggcatgatctcagctcactgcaaactctgcctcccaggttcaagcgattctcctgcctcagcctccccagtagctgggactacagatgcccgccaccacacatagctaatttttgtatttttgatagaaacaggatttcaccatgttggccakgttggtcttgaactcccaacctcaggtaatccttccgcctaggcctcctaaagtgctgggattacaggcatgagccaccgcacctgtccaacaatatttaactttaaggcattgccatgaagtaggtggcaatgtcttaactgtatgcatgttgtcaggccaagcgtcccttccagcattgtcaaggggagtgctaaccttctctcctttcatatgacacagaaatcagattttcacaactcattaatcataatacctagaatagtcccccccagctaaactgatgaagaaattaaatataagatgcaaattttagtaatatctgcaatgaaagagaggacatcatgaaaaatactacagaaattaaaaaggataataggaaaatattacgagcaattctattccaatacatttttaaaattatataaagtggaaaaatttcttaaagaacactaatttaaaaaactaacctaggaagaaatagaaaaaaaatagacttctgtcaattaaaaaaatcatattcataattaaaaaccttctgaaaaagaaaactcctggcccagatggcatcactggtgaattctatccaacatttaagaaagaaataattgctatgctacaaaaattatttcagaaaatagaggagtaagaaacacgtctcaactaattttatgaagacagaattaccctctatcaaaactagaccaaggctttacaaaaactaagaagtatagacaaatatgcttcaaggacacataccacatattacatactttaaagcttataagctaattcagcatgtgcatgtgtctgtatatatgtaggtatataaaatgccatatcatggctaaggaaatgcaaagatttagcaagtaaatgagaagttgatttagcagtcaaaaatcaatcagtgcaatttaccatgtcaacagaattaagagaaaatgcatatgggcatctcaatagatgcaaaaaagtatttgacacaatccaataccaatagaaagcaataaacgaatcaatggaaaaatcaccacataagatggatgctgcaataataaaagaagatggaatgaaaaacaaaaaagaatgaaaatgtaaggtgaaaccaggacagtgagagggtgagaggctacgaaagggatccagagaaggtgagggagatccgggagttgctcaagaagcaaagaaaaaagtaaagagaaaaaatgtgagagtttaggagagacagtgaggcagggagaagggagaaagatgaagactaagggaattaaagaggcatctaaaggatttgaagcctctgatctgaatatctaaaaggatttttgtttttatttcatattatagtatctagtgacaactgca

SEQ ID NO: 691739 - DNA, 1540 bp, Homo sapiens
gtcacccaggctggagtgcagtggcatgatctcagctcactgcaaactctgcctcccaggttcaagcgattctcctgcctcagcctccccagtagctgggactacagatgcccgccaccacacatagctaatttttgtatttttgatagaaacaggatttcaccatgttggccatgttggtcttgaactcccaacctcaggtaatccttccgcctaggcctcctaaagtgctgggattacaggcatgagccaccgcacctgtccaacaatatttaactttaaggcattgccatgaagtaggtggcaatgtcttaactgtatgcatgttgtcaggccaagcgtcccttycagcattgtcaaggggagtgctaaccttctctcctttcatatgacacagaaatcagattttcacaactcattaatcataatacctagaatagtcccccccagctaaactgatgaagaaattaaatataagatgcaaattttagtaatatctgcaatgaaagagaggacatcatgaaaaatactacagaaattaaaaaggataataggaaaatattacgagcaattctattccaatacatttttaaaattatataaagtggaaaaatttcttaaagaacactaatttaaaaaactaacctaggaagaaatagaaaaaaaatagacttctgtcaattaaaaaaatcatattcataattaaaaaccttctgaaaaagaaaactcctggcccagatggcatcactggtgaattctatccaacatttaagaaagaaataattgctatgctacaaaaattatttcagaaaatagaggagtaagaaacacgtctcaactaattttatgaagacagaattaccctctatcaaaactagaccaaggctttacaaaaactaagaagtatagacaaatatgcttcaaggacacataccacatattacatactttaaagcttataagctaattcagcatgtgcatgtgtctgtatatatgtaggtatataaaatgccatatcatggctaaggaaatgcaaagatttagcaagtaaatgagaagttgatttagcagtcaaaaatcaatcagtgcaatttaccatgtcaacagaattaagagaaaatgcatatgggcatctcaatagatgcaaaaaagtatttgacacaatccaataccaatagaaagcaataaacgaatcaatggaaaaatcaccacataagatggatgctgcaataataaaagaagatggaatgaaaaacaaaaaagaatgaaaatgtaaggtgaaaccaggacagtgagagggtgagaggctacgaaagggatccagagaaggtgagggagatccgggagttgctcaagaagcaaagaaaaaagtaaagagaaaaaatgtgagagtttaggagagacagtgaggcagggagaagggagaaagatgaagactaagggaattaaagaggcatctaaaggatttgaagcctctgatctgaatatctaaaaggatttttgtttttatttcatattatagtatctagtgacaactgca

SEQ ID NO: 691740 - DNA, 1540 bp, Homo sapiens
gtcacccaggctggagtgcagtggcatgatctcagctcactgcaaactctgcctcccaggttcaagcgattctcctgcctcagcctccccagtagctgggactacagatgcccgccaccacacatagctaatttttgtatttttgatagaaacaggatttcaccatgttggccatgttggtcttgaactcccaacctcaggtaatccttccgcctaggcctcctaaagtgctgggattacaggcatgagccaccgcacctgtccaacaatatttaactttaaggcattgccatgaagtaggtggcaatgtcttaactgtatgcatgttgtcaggccaagcgtcccttccagcattgtcaaggggagtgctaaccttctctcctttcatatgacacagaaatcagattttcacaactcattaatcataatacctagaatagtcccccccagctaaactgatgaagaaattaaatataagatgcaaattttagtaatatctgcaatgaaagagaggacatcatgaaaaatactacagaaattaaaaaggataataggaaaatattacgagcaattctattccaatacatttttaaaattatataaagtggaaaaatttcttaaagaacactaatttaaaaaactaacctaggaagaaatagaaaaaaaatagacttctgtcaattaaaaaaatcatattcataattaaaaaccttctgaaaaagaaaactcctggcccagatggcatcactggtgaattctatccaacatttaagaaagaaataattgctatgctacaaaaattatttcagaaaatagaggagtaagaaacacgtctcaactaattttatgaagacagaattaccctctatcaaaactagaccaaggctttacaaaaactaagaagtatagacaaatatgcttcaaggacacataccacatattacatactttaaagcttataagctaattcagcatgtgcatgtgtctgtatatatgtaggtatataaaatgccatatcatggctaaggaaatgcaaagatttagcaagtaaatgagaagttgatttagcagtcaaaaatcaatcagtgcaatttaccatgtcaacagaattaagagaaaatgyatatgggcatctcaatagatgcaaaaaagtatttgacacaatccaataccaatagaaagcaataaacgaatcaatggaaaaatcaccacataagatggatgctgcaataataaaagaagatggaatgaaaaacaaaaaagaatgaaaatgtaaggtgaaaccaggacagtgagagggtgagaggctacgaaagggatccagagaaggtgagggagatccgggagttgctcaagaagcaaagaaaaaagtaaagagaaaaaatgtgagagtttaggagagacagtgaggcagggagaagggagaaagatgaagactaagggaattaaagaggcatctaaaggatttgaagcctctgatctgaatatctaaaaggatttttgtttttatttcatattatagtatctagtgacaactgca

SEQ ID NO: 691741 - DNA, 1116 bp, Homo sapiens
tgtatacttgaaatttgctagaagagtaaatctgaaaatttcttaccacacaagaaaaattgctaactatgccaggtgatagatatgttaaataacttgatagtggtaattgtttcacaatgtatgtttatcaaaacatcatgttgcataccttaaatgcatttaattgatttatcaattataccttgataaaactggaaaaaatgaaataarcattggcatcaatttgaaaatattcactaaatacaggcaatattaatgatgccttaatgtcaagaatccttccagaatattgacaaaatgcccttgtgcttatacacatgctcaagagaagcgctgcacattagtcaaacttcataatatggtatcaaattaaaatctaaagtaaactacagaaaaagacccaatggtagttcattattacaacattttagagactcttaagaattggctaagtttaaaaataggtagcccatcgttgtcagatcatttattaaatcaaatccctaagtattaatggagcgtcaaccatacacaaggatctcagggattagagcagaccatacaagaaaagacataaatatctcgggcctcacacaactttcatgctggtgaggtaagaaagataataaataataaatacatatgatgactgaaaaaggtatatagactatgatagaagataagagccacagtgggaaataaaataaagcaggaaagaaggaaggatcaagaaagacaaattagcgacagaatagccaagcatgacctcacaaagaaggtgacattttcaataaacactggaagaaggagcatcgcacatcaggcaaatctcatgatgtgatactgaattaacatcataattactgatgttaattatgaacctcctaggcagaggcaatagcaatcataaaggcaagacaagagtatgcctgtggaatggagaaagagaggagaaagcaagaggagatgaagtcaaaaaagtttcagagagccaagaaatgttacactatgcaggttgctttaaagactttttgttgttgttcttgcatgagaccatgtccactggagaatgcatgctttattcttctataagaattttatttgaaaggtagc

SEQ ID NO: 691742 - DNA, 1189 bp, Homo sapiens
gagcagaaacttggtgtattagctctcactgccctaccaaaataccacagcatgggtggcttaaacaacagaattttttttctcacagttctagaggctagcagttcaagatgaaggtgccgggagggttggtttattgtgagctctttcttcctggtttgcagatggctgccttctctctgtgtcctcacatggcttttcttccgtgcattttacttctgatgttcatataaggactttagtcctttgggattaggaccccactcatgmttttttttaaccttaattacctcctcaaaagccctatcttcaaatacagtgacattggaggttagtgtttcaacatacgaatttttggggtgtgggacaaaattaatttcacaacatttagcgactttggtgctgtctcttggttataatactatcttgcttggaagatctttccctcattatgcctcttgttttttctttacttttttttttttccatgtgtaaaatgaagttgaagtacatgatctctgtatatctgccaaaagaaacctggctttttctccaagaaaacaaatttaatgaccactatttcaagtaataaataagacaaaaatgactccttgcagaacttgagtactagaatggtttataattattaactgatatttagcgtttattttattctattaaattgtctcctaaattgtgttaatccacagaggaatacaaactaaaaggttgtattaaaagacactctatgagcctgtaattgacttctctcaatctcaaaaaccaacatcttaaataatgcatcataaagtaaagctagcaatgcattcaaagatccagcgtatttaaacatttcagacgcaatatttgttgacatgatggttcatcgtaaaacattaatatggtaaatgcctagggaatttataaatgcatacacatcaaaatgttaattaattaaaatgaattaaatttagtaaaactattattatccatgcctggcaatttacgcaaagaaagaattaggtcctgttcgcactgctgcttgatgagtagaacactggattaattatcaagaatcacagacagattgttgttgtttacatatactacttagaaagtcagatttctggacacaatagatatgcacttcagctataatgttaaggtggcaggtcattaagcatgatta

SEQ ID NO: 691743 - DNA, 1189 bp, Homo sapiens
gagcagaaacttggtgtattagctctcactgccctaccaaaataccacagcatgggtggcttaaacaacagaattttttttctcacagttctagaggctagcagttcaagatgaaggtgccgggagggttggtttattgtgagctctttcttcctggtttgcagatggctgccttctctctgtgtcctcacatggcttttcttccgtgcattttacttctgatgttcatataaggactttagtcctttgggattaggaccccactcatgattttktttaaccttaattacctcctcaaaagccctatcttcaaatacagtgacattggaggttagtgtttcaacatacgaatttttggggtgtgggacaaaattaatttcacaacatttagcgactttggtgctgtctcttggttataatactatcttgcttggaagatctttccctcattatgcctcttgttttttctttacttttttttttttccatgtgtaaaatgaagttgaagtacatgatctctgtatatctgccaaaagaaacctggctttttctccaagaaaacaaatttaatgaccactatttcaagtaataaataagacaaaaatgactccttgcagaacttgagtactagaatggtttataattattaactgatatttagcgtttattttattctattaaattgtctcctaaattgtgttaatccacagaggaatacaaactaaaaggttgtattaaaagacactctatgagcctgtaattgacttctctcaatctcaaaaaccaacatcttaaataatgcatcataaagtaaagctagcaatgcattcaaagatccagcgtatttaaacatttcagacgcaatatttgttgacatgatggttcatcgtaaaacattaatatggtaaatgcctagggaatttataaatgcatacacatcaaaatgttaattaattaaaatgaattaaatttagtaaaactattattatccatgcctggcaatttacgcaaagaaagaattaggtcctgttcgcactgctgcttgatgagtagaacactggattaattatcaagaatcacagacagattgttgttgtttacatatactacttagaaagtcagatttctggacacaatagatatgcacttcagctataatgttaaggtggcaggtcattaagcatgatta

SEQ ID NO: 691744 - DNA, 1189 bp, Homo sapiens
gagcagaaacttggtgtattagctctcactgccctaccaaaataccacagcatgggtggcttaaacaacagaattttttttctcacagttctagaggctagcagttcaagatgaaggtgccgggagggttggtttattgtgagctctttcttcctggtttgcagatggctgccttctctctgtgtcctcacatggcttttcttccgtgcattttacttctgatgttcatataaggactttagtcctttgggattaggaccccactcatgattttttttaaccttaattacctcctcaaaagccctatcttcaaatacagtgacattggaggttagtgtttcaacatacgaatttttggggtgtgggacaaaattaatttcacaacrtttagcgactttggtgctgtctcttggttataatactatcttgcttggaagatctttccctcattatgcctcttgttttttctttacttttttttttttccatgtgtaaaatgaagttgaagtacatgatctctgtatatctgccaaaagaaacctggctttttctccaagaaaacaaatttaatgaccactatttcaagtaataaataagacaaaaatgactccttgcagaacttgagtactagaatggtttataattattaactgatatttagcgtttattttattctattaaattgtctcctaaattgtgttaatccacagaggaatacaaactaaaaggttgtattaaaagacactctatgagcctgtaattgacttctctcaatctcaaaaaccaacatcttaaataatgcatcataaagtaaagctagcaatgcattcaaagatccagcgtatttaaacatttcagacgcaatatttgttgacatgatggttcatcgtaaaacattaatatggtaaatgcctagggaatttataaatgcatacacatcaaaatgttaattaattaaaatgaattaaatttagtaaaactattattatccatgcctggcaatttacgcaaagaaagaattaggtcctgttcgcactgctgcttgatgagtagaacactggattaattatcaagaatcacagacagattgttgttgtttacatatactacttagaaagtcagatttctggacacaatagatatgcacttcagctataatgttaaggtggcaggtcattaagcatgatta

SEQ ID NO: 691745 - DNA, 1113 bp, Homo sapiens
ttacacacaggcaggacaatcttctaacaggtctctgggtccagtgaaactggcatggataaggatcaggatctaccaactttttagccaacaggtattggcataaagcaacacgatttttcaaaggaaacaagatggaaaagataaagaaaagaggcaaaacatacgaaggaagaagagaaaacatgggaggccacatacaaatcagaggtctgtcattytgcctcagcagccctcagatcacaggctggtgcatctgacccacgcgatctatggacttcgcagtgtgtgtacaggccaatgtatttacaatagcataactgctcatagatcaagagtttctgggcactgatgcacattttcttatgcatggagatgaggcaatttggaaaaatctagccaatttagttttttggttttttttttttttttttttttttttgagacagggccttgctttgtcacacaggctggagtgcagtggcacgatcttggctcactgtagcctctgctgcgtgggttcaagcgattctcctgcctcagcctcccaagtagctgggattacaggtgcatgccaccacacctggctaatttttgtgtttttagtagagacagggtttcagcatcttgaccaggctggtcttgaactcctaacctcgtaatccgcccatttcggctttccaaagtgctgggattacaggcatgagccaccatgcctggcctaccaatttagttcttactgatgcctattatggtaagattttctgaccccaaactcaggatacgttgtctgatcaatgtcttgtccgataggggggacactgaattccaggactgctccagaagatttaaaatacatgttttaaaatcccttttattgaaattccagaccatgaaaaaaaaccacaaaaggtactctaaaattgatcctaaacccaactccccagttcaaaactcaagatgctttatagaacttataaccaactctgttgaaaacattgattctctacatacacagcactccttacactagatgtgcaaggacttttccaaaactattcaattctctagggaacacccactggttgtcctataatttaattcaattttaac

SEQ ID NO: 691746 - DNA, 1113 bp, Homo sapiens
ttacacacaggcaggacaatcttctaacaggtctctgggtccagtgaaactggcatggataaggatcaggatctaccaactttttagccaacaggtattggcataaagcaacacgatttttcaaaggaaacaagatggaaaagataaagaaaagaggcaaaacatacgaaggaagaagagaaaacatgggaggccacatacaaatcagaggtctgtcattctgcctcagcagccctcagatcacaggctggtgcatctgacccacgcgatctatggacttcgcagtgtgtgtacaggccaatgtatttacaatagcataactgctcatagatcaagagtttytgggcactgatgcacattttcttatgcatggagatgaggcaatttggaaaaatctagccaatttagttttttggttttttttttttttttttttttttttgagacagggccttgctttgtcacacaggctggagtgcagtggcacgatcttggctcactgtagcctctgctgcgtgggttcaagcgattctcctgcctcagcctcccaagtagctgggattacaggtgcatgccaccacacctggctaatttttgtgtttttagtagagacagggtttcagcatcttgaccaggctggtcttgaactcctaacctcgtaatccgcccatttcggctttccaaagtgctgggattacaggcatgagccaccatgcctggcctaccaatttagttcttactgatgcctattatggtaagattttctgaccccaaactcaggatacgttgtctgatcaatgtcttgtccgataggggggacactgaattccaggactgctccagaagatttaaaatacatgttttaaaatcccttttattgaaattccagaccatgaaaaaaaaccacaaaaggtactctaaaattgatcctaaacccaactccccagttcaaaactcaagatgctttatagaacttataaccaactctgttgaaaacattgattctctacatacacagcactccttacactagatgtgcaaggacttttccaaaactattcaattctctagggaacacccactggttgtcctataatttaattcaattttaac

SEQ ID NO: 691747 - DNA, 1113 bp, Homo sapiens
ttacacacaggcaggacaatcttctaacaggtctctgggtccagtgaaactggcatggataaggatcaggatctaccaactttttagccaacaggtattggcataaagcaacacgatttttcaaaggaaacaagatggaaaagataaagaaaagaggcaaaacatacgaaggaagaagagaaaacatgggaggccacatacaaatcagaggtctgtcattctgcctcagcagccctcagatcacaggctggtgcatctgacccacgcgatctatggacttcgcagtgtgtgtacaggccaatgtatttacaatagcataactgctcatagatcaagagtttctgggcactgatgcacattttyttatgcatggagatgaggcaatttggaaaaatctagccaatttagttttttggttttttttttttttttttttttttttgagacagggccttgctttgtcacacaggctggagtgcagtggcacgatcttggctcactgtagcctctgctgcgtgggttcaagcgattctcctgcctcagcctcccaagtagctgggattacaggtgcatgccaccacacctggctaatttttgtgtttttagtagagacagggtttcagcatcttgaccaggctggtcttgaactcctaacctcgtaatccgcccatttcggctttccaaagtgctgggattacaggcatgagccaccatgcctggcctaccaatttagttcttactgatgcctattatggtaagattttctgaccccaaactcaggatacgttgtctgatcaatgtcttgtccgataggggggacactgaattccaggactgctccagaagatttaaaatacatgttttaaaatcccttttattgaaattccagaccatgaaaaaaaaccacaaaaggtactctaaaattgatcctaaacccaactccccagttcaaaactcaagatgctttatagaacttataaccaactctgttgaaaacattgattctctacatacacagcactccttacactagatgtgcaaggacttttccaaaactattcaattctctagggaacacccactggttgtcctataatttaattcaattttaac

SEQ ID NO: 691748 - DNA, 1438 bp, Homo sapiens
gacaggcgtgggccctcagggcatctgcaaggaggtggagagcaggaagccaatggccttgcccacacatcctcctctgtcctcccccgggggtggggagcctcctgacttggagggtgtgcttcttatccagggccactcccctgccagcctggcctgggctccctggtgcaacctacctcagaatgtgcagggggactggctctgccctcctgagatgagcttgcctgggaagggtctgggttttcaaaacttagagggtcccaaacctgcttctcctttcttcaagaatatggcttttttcctttccccaaatcccgaccctcctgcaaagaagaaccgaagctggcaaagaaaccaggtctccacttgtcagaacattggactgatcttgtctgcttgaaagcagggccgcaaagcctcagccctggccccggggctgtgctaagagacaactaaggagggtgaagagctgtggggctgtggaccagagatagggagacagagcagggagacagggagacgaggagagagatgctcacagaaaccaacagagataagccaagagacctgcagagaagtggaagagacagagacagaaagaaagaaagaagaatggaaggaagaatggaaggaaagatgtgggagctggggaggaagggagggagtgagggagagagggtggtctgggcaaccttgaagagcatgagcaggtggcatatgggtgcatgcggcgcaccactagatggcagagaggccactcctcccctttcctccatcccgcccccaacacctgggctcggcagccttgggaacacaagagccctacaagcttctctatggctgcaccttcatgatattttcaaaacagctacagagccacyctttctctctcttcttctaccaggagagtaaggatctcatggcagagggtctggaaacaaatacggccaagtagaaggtttcccaaatttagaccatgcagtccaccttcacagtttctgccatatcatcacatgatggtcaggaacacggagtctgagccaggcagcctgggtcccaatccccactctgccacttactggctgtgtggcttttggcaagtgatttaacctctctgtccctttgtttccttaactaggaaacaggaatcataatctacatcatgacgttatctgagaattaaatgagttaatacttgtaaagcaattaggaaaatgcctaacagagagtaaccactctgtgagtgttaactgctatttactcaatatcttattcgatcagctcacttttttacttaaattaactttaaggaaaacttcatgactgtgatatgtatgtataatgtaataccattaaaaaaccattcaaagaaatatactcaaatatataaatggaattctttttaaaaatgttcaagtaacccatagaaagatag

SEQ ID NO: 691749 - DNA, 1438 bp, Homo sapiens
gacaggcgtgggccctcagggcatctgcaaggaggtggagagcaggaagccaatggccttgcccacacatcctcctctgtcctcccccgggggtggggagcctcctgacttggagggtgtgcttcttatccagggccactcccctgccagcctggcctgggctccctggtgcaacctacctcagaatgtgcagggggactggctctgccctcctgagatgagcttgcctgggaagggtctgggttttcaaaacttagagggtcccaaacctgcttctcctttcttcaagaatatggcttttttcctttccccaaatcccgaccctcctgcaaagaagaaccgaagctggcaaagaaaccaggtctccacttgtcagaacattggactgatcttgtctgcttgaaagcagggccgcaaagcctcagccctggccccggggctgtgctaagagacaactaaggagggtgaagagctgtggggctgtggaccagagatagggagacagagcagggagacagggagacgaggagagagatgctcacagaaaccaacagagataagccaagagacctgcagagaagtggaagagacagagacagaaagaaagaaagaagaatggaaggaagaatggaaggaaagatgtgggagctggggaggaagggagggagtgagggagagagggtggtctgggcaaccttgaagagcatgagcaggtggcatatgggtgcatgcggcgcaccactagatggcagagaggccactcctcccctttcctccatcccgcccccaacacctgggctcggcagccttgggaacacaagagccctacaagcttctctatggctgcaccttcatgatattttcaaaacagctacagagccaccctttctctctcttcttctaccaggagagtaaggatctcatggcagagggtctggaaacaaatacggccaagtagaaggtttcccaaatttagaccatgcagtccaccttcacagtttctgccatatcatcacatgatggtcaggaacacggagtctgagccaggcagcctgggtcccaatccccactctgccacttactggctgtgtggcttttggcaagtgatttaacctctctgtccctttgtttccttaactaggaaacaggaatcataatctacatcatgasgttatctgagaattaaatgagttaatacttgtaaagcaattaggaaaatgcctaacagagagtaaccactctgtgagtgttaactgctatttactcaatatcttattcgatcagctcacttttttacttaaattaactttaaggaaaacttcatgactgtgatatgtatgtataatgtaataccattaaaaaaccattcaaagaaatatactcaaatatataaatggaattctttttaaaaatgttcaagtaacccatagaaagatag

SEQ ID NO: 691750 - DNA, 585 bp, Homo sapiens
ctcagcaagcctgagcttagaggacacagaaccaccacttccatcaggctgggctcaggcttaaggtgaagtcagcctgcgtgcccggcagagccccccacagcaccgtccctaaatgacgccacctcaggaccccaggacgactgactgaggctcagaaagtctggcatcagagaaaactcagggcaggactctgcaggggatgctgcggaaaagggggctcggtgggtatttcattcctccacaagtgagttacagtactaaaggtagcagtaataccagcagcaacagcagtcactattgcagaagcaacagtctcagccatgatcatagtggtaaccagaggagtaatcactagactagcagcagtaatcatagagtcaaggcagtaacgtggcagtgatagaagcagtgcagggagtaataggaggagcaggagaaatatcagtcatagaggcggtagtcacagaggyggcaggaacaatggctacagtcgtagtaccagcgtcggtcacagaggcggtagtcacagaggcggtaggaacaatggctacagtcgtagtaccagcgtcggtcacagaggcg

SEQ ID NO: 691751 - DNA, 585 bp, Homo sapiens
ctcagcaagcctgagcttagaggacacagaaccaccacttccatcaggctgggctcaggcttaaggtgaagtcagcctgcgtgcccggcagagccccccacagcaccgtccctaaatgacgccacctcaggaccccaggacgactgactgaggctcagaaagtctggcatcagagaaaactcagggcaggactctgcaggggatgctgcggaaaagggggctcggtgggtatttcattcctccacaagtgagttacagtactaaaggtagcagtaataccagcagcaacagcagtcactattgcagaagcaacagtctcagccatgatcatagtggtaaccagaggagtaatcactagactagcagcagtaatcatagagtcaaggcagtaacgtggcagtgatagaagcagtgcagggagtaataggaggagcaggagaaatatcagtcatagaggcggtagtcacagaggcggyaggaacaatggctacagtcgtagtaccagcgtcggtcacagaggcggtagtcacagaggcggtaggaacaatggctacagtcgtagtaccagcgtcggtcacagaggcg

SEQ ID NO: 691752 - DNA, 585 bp, Homo sapiens
ctcagcaagcctgagcttagaggacacagaaccaccacttccatcaggctgggctcaggcttaaggtgaagtcagcctgcgtgcccggcagagccccccacagcaccgtccctaaatgacgccacctcaggaccccaggacgactgactgaggctcagaaagtctggcatcagagaaaactcagggcaggactctgcaggggatgctgcggaaaagggggctcggtgggtatttcattcctccacaagtgagttacagtactaaaggtagcagtaataccagcagcaacagcagtcactattgcagaagcaacagtctcagccatgatcatagtggtaaccagaggagtaatcactagactagcagcagtaatcatagagtcaaggcagtaacgtggcagtgatagaagcagtgcagggagtaataggaggagcaggagaaatatcagtcatagaggcggtagtcacagaggcggcaggaacaatggctacagtcgtagtaccagcgtcrgtcacagaggcggtagtcacagaggcggtaggaacaatggctacagtcgtagtaccagcgtcggtcacagaggcg

SEQ ID NO: 691753 - DNA, 585 bp, Homo sapiens
ctcagcaagcctgagcttagaggacacagaaccaccacttccatcaggctgggctcaggcttaaggtgaagtcagcctgcgtgcccggcagagccccccacagcaccgtccctaaatgacgccacctcaggaccccaggacgactgactgaggctcagaaagtctggcatcagagaaaactcagggcaggactctgcaggggatgctgcggaaaagggggctcggtgggtatttcattcctccacaagtgagttacagtactaaaggtagcagtaataccagcagcaacagcagtcactattgcagaagcaacagtctcagccatgatcatagtggtaaccagaggagtaatcactagactagcagcagtaatcatagagtcaaggcagtaacgtggcagtgatagaagcagtgcagggagtaataggaggagcaggagaaatatcagtcatagaggcggtagtcacagaggcggcaggaacaatggctacagtcgtagtaccagcgtcggtcayagaggcggtagtcacagaggcggtaggaacaatggctacagtcgtagtaccagcgtcggtcacagaggcg

SEQ ID NO: 691754 - DNA, 622 bp, Homo sapiens
gatccctgagcaccccttgatggaaatcctgaagatggggctgcagcgtgacgccctctgacctgttcctctgcccatcggccccaacccaagggtgctgggaggaaaattaaggctctgagagaccctgcctgctcttggctctgctgaagaccgggaggtggagtggatatgagttttccacaaaatgccctcaggacccagatgtttccaaagtggatccaaaattctgccctattgtcctcccacaggaccgcttgagctcagtgacttgagaagtgagggggcattggtgkggcacaggagatgtgggacaggatggaattcaagagccaagagagtattttgcccttcacccctggggctccttgcaagaagtgaccggcactcaacttctgtctcacatttgaaagagaggctggccagttccattttctgacctgggctgacttgtatggccagagcgcactgggttatggagatccctgctgaaacttacagaagacccagatggttggaccactcagcatggcaaccaggaacatcaggcggccttggtgaacacacccaccagccaccttatccagccacaaacatttgctgacctcccagctcacggagc

SEQ ID NO: 691755 - DNA, 622 bp, Homo sapiens
gatccctgagcaccccttgatggaaatcctgaagatggggctgcagcgtgacgccctctgacctgttcctctgcccatcggccccaacccaagggtgctgggaggaaaattaaggctctgagagaccctgcctgctcttggctctgctgaagaccgggaggtggagtggatatgagttttccacaaaatgccctcaggacccagatgtttccaaagtggatccaaaattctgccctattgtcctcccacaggaccgcttgagctcagtgacttgagaagtgagggggcattggtgtggcmcaggagatgtgggacaggatggaattcaagagccaagagagtattttgcccttcacccctggggctccttgcaagaagtgaccggcactcaacttctgtctcacatttgaaagagaggctggccagttccattttctgacctgggctgacttgtatggccagagcgcactgggttatggagatccctgctgaaacttacagaagacccagatggttggaccactcagcatggcaaccaggaacatcaggcggccttggtgaacacacccaccagccaccttatccagccacaaacatttgctgacctcccagctcacggagc

SEQ ID NO: 691756 - DNA, 1019 bp, Homo sapiens
cttgaatcttctgtgcttcttgtcataaattaatatatactgagcatccattttgcttagagagctagctgcttggtctttcatctctttgtgcatatagaagataattgcaaaaagcaagcccatctgctaaacctcaccactccatgcctacagcagaaacaaacaaataaaccctggccacatcggagctgctggcatagtgccgcaccccctgccacactctagcaggagccctttgcttgctgccagcctgtgaattctctgtaggtacaggcgtggtgtcctaccttctaattcagtgtggcctgtgggttcgggctgtgtcacgatctctctgatctttccaaatctacccttcatctgaggttgtgtttttttttagtgattgcatctgtattctagagctgcaggccattccacaattcatcctttgaaggaccgcacttgtccyggtggcagatttttgccgctcatttttctcatcaggtccctcttccttttatcttctcagtgcagtcagtaccctgagacttctttggagcgattgtaccaaaacttttgtgtgtgtgtgacagagtcttgctttgtgggctaggctagagtgcagcctagcgatctcagctcactgcaacctccgcatcctgggttcaagcaattctcatgcatcagcttccccagctgggattacaggtgtgcaccaccacacccggctaatttatttttaaagtatttagtagagatggggttttgccatgttggccagactggtctcgaactcctggcctcaagtgatctgcccgcttcagcctcccagagtgctgggattacaggtgtgagccatcgcacccagccataccaaaacatttttgtcgatcaggaatttcgtgttccaggtatagatgctatactttattttcctttattccttcaacagatatttattgagcactgaccaaatgaggtttgctacgtgggtgtaaagggtacccatacaaagatgaaaaaagacacactcc

SEQ ID NO: 691757 - DNA, 1019 bp, Homo sapiens
cttgaatcttctgtgcttcttgtcataaattaatatatactgagcatccattttgcttagagagctagctgcttggtctttcatctctttgtgcatatagaagataattgcaaaaagcaagcccatctgctaaacctcaccactccatgcctacagcagaaacaaacaaataaaccctggccacatcggagctgctggcatagtgccgcaccccctgccacactctagcaggagccctttgcttgctgccagcctgtgaattctctgtaggtacaggcgtggtgtcctaccttctaattcagtgtggcctgtgggttcgggctgtgtcacgatctctctgatctttccaaatctacccttcatctgaggttgtgtttttttttagtgattgcatctgtattctagagctgcaggccattccacaattcatcctttgaaggaccgcacttgtcccggtggcagatttttgccgctcatttttctcatcaggtccctcttccttttatcttctcagtgcagtcagtaccctgagacttctttggagcgattgtaccaaaacttttgtgtgtgtgtgacagagtcttgctttgtgggctaggctagagtgcagcctagcgatctcagctcactgcaacctccgcatcctgggttcaagcaattctcatgcatcagcytccccagctgggattacaggtgtgcaccaccacacccggctaatttatttttaaagtatttagtagagatggggttttgccatgttggccagactggtctcgaactcctggcctcaagtgatctgcccgcttcagcctcccagagtgctgggattacaggtgtgagccatcgcacccagccataccaaaacatttttgtcgatcaggaatttcgtgttccaggtatagatgctatactttattttcctttattccttcaacagatatttattgagcactgaccaaatgaggtttgctacgtgggtgtaaagggtacccatacaaagatgaaaaaagacacactcc

SEQ ID NO: 691758 - DNA, 1019 bp, Homo sapiens
cttgaatcttctgtgcttcttgtcataaattaatatatactgagcatccattttgcttagagagctagctgcttggtctttcatctctttgtgcatatagaagataattgcaaaaagcaagcccatctgctaaacctcaccactccatgcctacagcagaaacaaacaaataaaccctggccacatcggagctgctggcatagtgccgcaccccctgccacactctagcaggagccctttgcttgctgccagcctgtgaattctctgtaggtacaggcgtggtgtcctaccttctaattcagtgtggcctgtgggttcgggctgtgtcacgatctctctgatctttccaaatctacccttcatctgaggttgtgtttttttttagtgattgcatctgtattctagagctgcaggccattccacaattcatcctttgaaggaccgcacttgtcccggtggcagatttttgccgctcatttttctcatcaggtccctcttccttttatcttctcagtgcagtcagtaccctgagacttctttggagcgattgtaccaaaacttttgtgtgtgtgtgacagagtcttgctttgtgggctaggctagagtgcagcctagcgatctcagctcactgcaacctccgcatcctgggttcaagcaattctcatgcatcagcttccccagctgggattacaggtgtgcaccaccacacccggctaatttatttttaaagtatttagtagagatggggttttgccatgttggccagactggtctcgaactcctggcctcaagtgatctgcccgcttcagcctcccaragtgctgggattacaggtgtgagccatcgcacccagccataccaaaacatttttgtcgatcaggaatttcgtgttccaggtatagatgctatactttattttcctttattccttcaacagatatttattgagcactgaccaaatgaggtttgctacgtgggtgtaaagggtacccatacaaagatgaaaaaagacacactcc

SEQ ID NO: 691759 - DNA, 2361 bp, Homo sapiens
ttattatgccacagcttcttaaaagtttattaaaatattaccaacagtacaaattagaaaaatcatgacttcataataaacaagttgcctgtatttaagattagcagcatacctatgtctgagctttcttttttcacatttgtaagtcttcggttttctgaagttttagtaataagttcttctctatctggatgtactattggattaaaatgaaaagttctcagtattgtgtttcatatgactaaagtgcattaatttatgtaataattttactgctaagattatacaaattataatgcatgtaaaatatacaaaagtgtttaaatattccaggtttaaggaaaattacttccaatttctttcttttggaagagataaatgaattagaagaaaacataattcttagcgtaccctttgagatggtaacagtagattccttaatgccccctgctggccatctcattgtgaactttttgaattttggaaatatgttttgctacaaccaaaagaaaaatgggcatttctagggttattcttagatgaacattgaggtatttcacttgtgatttttaggctgaagatcagcgtgacctcctctaataggatatattttactaccatgaaacttctatgcttatttaagtatgcttgactccacccctctgacctaaaataggtttaactgtgactgtcctataccagaaagcagtggcttgcgggaatacatagataataaggcataccagctcatataaatggcagctgatattggagcggaattaagtcaattttgtttctcctactcagaagagacaggtaggtgataagattgtcaaacacaaattttctcttttggcagagtcctttctcctttgataacttcttgattccttttatcctctctcgcttatgcttcagaccagggagaaaaataaaatatgttttagatccaaagatctagtttattcaattttcatgggccacttctttttacttaacataataggaatagcctgagcagtctatgattcttctccgtgattgatttccttcatattccattagtcattaatttttaagtgataatctatcggcattagcaaatttttcttccctgaatggaatcaaattgaaacttctgtgtgaatcagtcctctgctggtctgagcatgataacctagctacggtttccagtgctggctatgcttgagaaccgtctaaaaatacgggtgcctgaactgactccaacctgctagatcaaaaycttcagaagttccaaattgggaaccactctagatactcagaatccaaggggtctacagctgtagctggattttcatttgaagtaaagaaaagcttatggcttatagcatacatttaagataggaaagagaatacttttgggggactggttttttggccagatatcaaagttaacaatatggagctattattaataatagcaactccaatttcaaaaattcatcagtgaaatacaaaaaataaaaatgaagtgacctctgtttttacatgtaaatacccatcactttgttgttgttttaaagaaagactatttcatgtgaatttttttccctgaagataaataattcatattggtatacctcaatactacgttctattacattcttcctaagagcggagtggcaatttgtgaatcagtaggtatatattgcaggtgtacctaaaatccttgcctgtttaagtttttttcttacgtatttagctgctgagatccttgtgggtttatatctttgctttgaattttcatgtgacagtttaaaataatataatctctaggatgactatgcatttgtcctgtttcacattttctaaatatattccaaatatttcatatttggcatgcaaacatgccaaacaaaaaaaaaaacttgtacttttgacttaatctttttcttctacatgtaaaaaattatcttgaggttgtacttaagtaagttttccagaggactaacaagctaaaatcttctgaatactaaagctcttaactttttagatggaaatcttttttccttattaaacaatgcagtaatctgattttcttattttttaaaattttattttttatttttagagatgggttcttgctgtgttgcccaggctggattcaaactcctgggcttaagtcatgcttcaatcttagcatcccaagaagctgggattataggcatgtgccaactgcacctggcataatttgatttttaactcttaatgacaaaggccatagctgtgatgcctatggaaacctaagaatctgtcctgtctgataaaccagagaaataagtttgccaggagtataggaaatttgattaactagtttgt

SEQ ID NO: 691760 - DNA, 2615 bp, Homo sapiens
ttggttattattggttacatcattaatcatgatgatgcaccatccacagtgctatccatggatactggctcccactgactaaaaatttgttagtccactttattgtctatgccctcaaatgtaagtgaatgttaattcatttctggtcacattaaatctattttataaagtttatagcataacttagaataatataattatatccatattttctcttgaatatttttggctatgatcactacattctttttaaaaaattatttgtgtatttatttatttaatttttattttactttaagtttcaggagacctgtagaatgtgcaggtttgttacaaagtcatatgtgtgctgtggtggtttgctgcacctatcaacccatgatctaggtggggttttttttgtttgttttatttgttagtttgtttgttttattcattttttgaaatggagtttcaccttgttgcccaggctggagtgcagtggtgtgatctcggctcactgtaacctccatctcccaggttcaagcaattctcgtgcctcagcctcctgagtagctgggattacagttacgaaccaccacacccagctaatttttgtatttttaatagagatggttgagtagagtagagagagtagagccatgttggtcaggctggtcacaaactcctaacctccggtgatccacccacctcagcctaccaaagtgctgggattacaggtgtgagccacagaagccggcccagtcatctaggttttaagccctgcatgcattagctatttgtcctgatgctgtcgctccccttgcccctccatgctctgagaggtcccagtgtgtgttgttcccctccctgtgtccatgtgttctcattgttcaactcccacttatgggtgatcactattcttagaatgcgatctggttcaatgttgattgtacccctgcctcctgtatcccaccttgtctttatttgtgttgctataacaaaacacctaagactgggaaatttataaacaacatatatttattttctcacagttgtagaggctgggaagtccaaggtcatggtgccaacagacttggtgtctggagagggctgctctctgcttccaacatggtgtcttctcgcagtgtcatgtcctcctgacggaaggaatgctgtgtctcacatggtgacaggaattgaaggacaaaaatggctgaacactttgtgaagcctcatttataaatgtcttaatctcattcgtgaggactctaccctcatgaaaacttaatcacytcctaaaggacttgcctcttaatactatcacattatcaattaagtttcaacacatgacttgagggacattcagaccatagtacttccctagttaggagactaaacaaagacaggagcaagaagaggagtctcatttgcagaagaaatgtctgtttctcacttggcattgcataagacttatctgagagtgcccaatgtcacacatctatggtaagaagagaagatactgatcagaagggcctggaggctttatgaagcaacagtctgaaaagtccttgcaggaaataggcaaggctatcctggaaggactcctagatacatggcctggatacagcaagaggtgaatgtcctgggtgcctacagcagaggcacacttggtagtgtaggcctgctatcaaccctacacccttgaatcctacagaccattggcatgacagcagacagatcactggcaggcaagatttgatggaagaaccatgtatccgccgcaaacgcaagactcatccgaggagcactagtagcctagagccctgaattcatcctgtgcctgatgtgaaagtcacccaaaatcaacatttctgtaccattctggtggcccaatctcatataatcacttgaaaggaatagcacactgactaatcaaagccatcagctcatcagccactgttccggaatcgaggtccacccatggactcccagaagaaccccttaagtattagtactggaactcctctatgcacttgatccacataaagtacgtgtgtgtgggcagggagggcttgtagaggatcagaaagtgccttacaggagagaaacagagaccaagactagggaaccctttctgctggaggggcatctagacattttgaagaaacacacgaaagaatagagcccctgaggtcacatccagatttcagtttctcttcgggagtctaagagactgttgtgagcccagattttcacattttcttcctctggctgaaatggttggatttagacagtgtggaggcaaacttactgtatggattaataacttttgtgcaagtaacagatatttgtctagccttccttaagtcaaataagaatgtatcataagagtgtagagatatctaataaaaatccaagggcagaaatatgggtggagcacagaaaagaactggaacgaatgatttaaaactgttcagatatagctttaggtatttctcatctctactcctcttttgcatttgttttcctttgtccctctgcagactctttctctgctcctttgtccacatggaaaaacatggatcaagcacagttttccagtttatatattggaggtccagacttttgtagca

SEQ ID NO: 691761 - DNA, 2615 bp, Homo sapiens
ttggttattattggttacatcattaatcatgatgatgcaccatccacagtgctatccatggatactggctcccactgactaaaaatttgttagtccactttattgtctatgccctcaaatgtaagtgaatgttaattcatttctggtcacattaaatctattttataaagtttatagcataacttagaataatataattatatccatattttctcttgaatatttttggctatgatcactacattctttttaaaaaattatttgtgtatttatttatttaatttttattttactttaagtttcaggagacctgtagaatgtgcaggtttgttacaaagtcatatgtgtgctgtggtggtttgctgcacctatcaacccatgatctaggtggggttttttttgtttgttttatttgttagtttgtttgttttattcattttttgaaatggagtttcaccttgttgcccaggctggagtgcagtggtgtgatctcggctcactgtaacctccatctcccaggttcaagcaattctcgtgcctcagcctcctgagtagctgggattacagttacgaaccaccacacccagctaatttttgtatttttaatagagatggttgagtagagtagagagagtagagccatgttggtcaggctggtcacaaactcctaacctccggtgatccacccacctcagcctaccaaagtgctgggattacaggtgtgagccacagaagccggcccagtcatctaggttttaagccctgcatgcattagctatttgtcctgatgctgtcgctccccttgcccctccatgctctgagaggtcccagtgtgtgttgttcccctccctgtgtccatgtgttctcattgttcaactcccacttatgggtgatcactattcttagaatgcgatctggttcaatgttgattgtacccctgcctcctgtatcccaccttgtctttatttgtgttgctataacaaaacacctaagactgggaaatttataaacaacatatatttattttctcacagttgtagaggctgggaagtccaaggtcatggtgccaacagacttggtgtctggagagggctgctctctgcttccaacatggtgtcttctcgcagtgtcatgtcctcctgacggaaggaatgctgtgtctcacatggtgacaggaattgaaggacaaaaatggctgaacactttgtgaagcctcatttataaatgtcttaatctcattcgtgaggactctaccctcatgaaaacttaatcacttcctaaaggacttgcctcttaatactatcacattatcaattaagtttcaacacatgacttgagggacattcagaccatagtacttccctagttargagactaaacaaagacaggagcaagaagaggagtctcatttgcagaagaaatgtctgtttctcacttggcattgcataagacttatctgagagtgcccaatgtcacacatctatggtaagaagagaagatactgatcagaagggcctggaggctttatgaagcaacagtctgaaaagtccttgcaggaaataggcaaggctatcctggaaggactcctagatacatggcctggatacagcaagaggtgaatgtcctgggtgcctacagcagaggcacacttggtagtgtaggcctgctatcaaccctacacccttgaatcctacagaccattggcatgacagcagacagatcactggcaggcaagatttgatggaagaaccatgtatccgccgcaaacgcaagactcatccgaggagcactagtagcctagagccctgaattcatcctgtgcctgatgtgaaagtcacccaaaatcaacatttctgtaccattctggtggcccaatctcatataatcacttgaaaggaatagcacactgactaatcaaagccatcagctcatcagccactgttccggaatcgaggtccacccatggactcccagaagaaccccttaagtattagtactggaactcctctatgcacttgatccacataaagtacgtgtgtgtgggcagggagggcttgtagaggatcagaaagtgccttacaggagagaaacagagaccaagactagggaaccctttctgctggaggggcatctagacattttgaagaaacacacgaaagaatagagcccctgaggtcacatccagatttcagtttctcttcgggagtctaagagactgttgtgagcccagattttcacattttcttcctctggctgaaatggttggatttagacagtgtggaggcaaacttactgtatggattaataacttttgtgcaagtaacagatatttgtctagccttccttaagtcaaataagaatgtatcataagagtgtagagatatctaataaaaatccaagggcagaaatatgggtggagcacagaaaagaactggaacgaatgatttaaaactgttcagatatagctttaggtatttctcatctctactcctcttttgcatttgttttcctttgtccctctgcagactctttctctgctcctttgtccacatggaaaaacatggatcaagcacagttttccagtttatatattggaggtccagacttttgtagca

SEQ ID NO: 691762 - DNA, 662 bp, Homo sapiens
ttcacgtgtacccccaaacctaaaataaaagttaaaaaaaaagaaataccatggaagcactataatgaaagtgataatttatcaataacttatttaaagaaatgaagttgtctttaaaatatgtacctatgtacacacacatacatcttagaaaagaaggcaaatttgtcttttaattttaatctgcaactatcatctagagaaaacttacttctaagatttgtaaatacaatactatttttctagttttcaaagaaaagcatggttatacgtcgtaaaaattctgaagtttagtctgtcagtatccgtaaatcaatagctgttcaagtctcccttactggagtaaattcagctatttctctttatccttttgtgcatctgattactcttgacttggaatgacctaacaaaaaaaattggtaaactttgagttgaagttgtacagttgctattgtttgcttttttaaaaaaaaacacttttaaagaggtctttttttgtacttataaaaatgctgtctctaagataagctattttctttgcaagcatcatccagaggcaaatatgatcatttccgttttccaaaaatgtacccagagacataaaaatactatttgtacygtaagatggaaaaggagcattgccttgttacagtcagattcca

SEQ ID NO: 691763 - DNA, 589 bp, Homo sapiens
tgcttcattttatcagctgcaatttaaaattttaattattaattatcaaaaataaaccagttatattagtaataaaactatgaggtacttatamgaagtttgacaaaagatacagaaaactttaatggacaaaattagtaaactttactgataggcctacataaagacttcaataaaaggagagaagtaccattcttgtggatatcaagactcactatgataacactgtcccattgaacaatatcaatctatattttcccatttctctcaatatagaagaaggatggagtagaatggaatcagggagaagttcacaggaattatcaactgcatttgcaatattttcttcattaaaagtcagtatgatcacatatggcatatatttagaactaagtgaggtggtagcactcacgtgtttatttcattataatattctctatatgttatatgctggaaatattacattaaatttttttataaaaatatataatctaggaaagtatgtggagaaaattcagatataaaagaccatcagtcatttccaagttgtaacagtgatttgcataggttcattgaatcttttgagaaa

SEQ ID NO: 691764 - DNA, 629 bp, Homo sapiens
cctcaagaagattaaaattcactggaagaggcaaagcaaggatgaaaataactatgatagaagacaaaataaggtaccataaaaataagatatcctaaaatacactacaaaaaacagcataagctctcaaagaaggaaaagatcatatgtaattgggagataaagaacttacataaaaataatattccaatcagaacttgaaggakaggtagtattttgaaagctagaaattatgaagctatagaaagagtaccaggcaagattagcaaaaatgaacaaaaaaggcatgatagtgataacatacaaagaaaataaagaaaattaagaaagcagaaggggcatttggatcatttggatattaatagagtttatgtaagaaaataagactaaaatctaaaactatagtttgactttgtattgtagagggatgtgaaaaccagggaaagaaacttttaccaaaattggtaggtaatgggaagctaggaggcagtaatgtgagagagagagagagagagagagagtgtgtgtgtgtgtgtgtgtgtgtgtgtgtgttaagcaaatgagtgatgtaatgagagttgtgttttaggaacttgaatctagtagcagcatgacctatgtttaatggg

SEQ ID NO: 691765 - DNA, 629 bp, Homo sapiens
cctcaagaagattaaaattcactggaagaggcaaagcaaggatgaaaataactatgatagaagacaaaataaggtaccataaaaataagatatcctaaaatacactacaaaaaacagcataagctctcaaagaaggaaaagatcatatgtaattgggagataaagaacttacataaaaataatattccaatcagaacttgaaggagaggtagtattttgaaagctagaaattatgaagctatagaaagagtaccaggcaagattagcaaaaatgaacaaaaaaggcatgatagtgataacatacaaagaaaataaagaaaattaagaaagcagaaggggcatttggatcatttggatattaatagagtttatgtaagaaaataagactaaaatctaaaactatagtttgactttgtattgtagagggatgtgaaaaccagggaaagaaacttttaccaaaattggtaggtaatgggaagctaggaggcagtaatgtgagagagagagagagagagagwgagtgtgtgtgtgtgtgtgtgtgtgtgtgtgtgttaagcaaatgagtgatgtaatgagagttgtgttttaggaacttgaatctagtagcagcatgacctatgtttaatggg

SEQ ID NO: 691766 - DNA, 629 bp, Homo sapiens
cctcaagaagattaaaattcactggaagaggcaaagcaaggatgaaaataactatgatagaagacaaaataaggtaccataaaaataagatatcctaaaatacactacaaaaaacagcataagctctcaaagaaggaaaagatcatatgtaattgggagataaagaacttacataaaaataatattccaatcagaacttgaaggagaggtagtattttgaaagctagaaattatgaagctatagaaagagtaccaggcaagattagcaaaaatgaacaaaaaaggcatgatagtgataacatacaaagaaaataaagaaaattaagaaagcagaaggggcatttggatcatttggatattaatagagtttatgtaagaaaataagactaaaatctaaaactatagtttgactttgtattgtagagggatgtgaaaaccagggaaagaaacttttaccaaaattggtaggtaatgggaagctaggaggcagtaatgtgagagagagagagagagagagagwgtgtgtgtgtgtgtgtgtgtgtgtgtgtgtgttaagcaaatgagtgatgtaatgagagttgtgttttaggaacttgaatctagtagcagcatgacctatgtttaatggg

SEQ ID NO: 691767 - DNA, 666 bp, Homo sapiens
tatttccccagaggaattgattcatgtgtggcaagtagtgttagaaattgcacaaatgccacctttgtttagctaagaagyaacctagagcaatcctattatctaataccatttaaacaagataatctagcaaagtttttcgagccacaatggcattagttgtggagttggttatagatcgaattgtaaagtagaaatttctcaccattgtttctaagtgagtcctttgatccaagagaaaaaaaaaaaaacaaagcaggatctaacatctgaagcctattctgctgaatttgtgtcacctggtagagtatctctttaaatatgatggtgcaagttaagaggtgtgaatcggtgtcgcgatgttgttagtttaacttgaatccagaaacagaataaaacatattggtgttttatttttcatttgttgagacatggtgttggccataaataaggttgactgttaaatctctcacagattgaaatgtatcctgatgagaaacaacaggtaattacatgtggagtacctgctgcatttacagtcattcataggaaggtgccagtaatatttatccaaggttctattattgaactatggcattgttgaaagccgtctttaatgagaaaactagggttataaatgttttaaaatctgtgaaatttatctta

SEQ ID NO: 691768 - DNA, 666 bp, Homo sapiens
tatttccccagaggaattgattcatgtgtggcaagtagtgttagaaattgcacaaatgccacctttgtttagctaagaagtaacctagagcaatcctattatctaataccatttaaacaagataatctagcaaagtttttcgagccacaatggcattagttgtggagttggttatagatcgaattgtaaagtagaaatttctcaccattgtttctaagtgagtcctttgatccaagagaaaaaaaaaaaaacaaagcaggatctaacatctgaagcctattctgctgaatttgtgtcacctggtagagtatctctttaaatatgatggtgcaagttaagaggtgtgaatcggtgtcrcgatgttgttagtttaacttgaatccagaaacagaataaaacatattggtgttttatttttcatttgttgagacatggtgttggccataaataaggttgactgttaaatctctcacagattgaaatgtatcctgatgagaaacaacaggtaattacatgtggagtacctgctgcatttacagtcattcataggaaggtgccagtaatatttatccaaggttctattattgaactatggcattgttgaaagccgtctttaatgagaaaactagggttataaatgttttaaaatctgtgaaatttatctta

SEQ ID NO: 691769 - DNA, 666 bp, Homo sapiens
tatttccccagaggaattgattcatgtgtggcaagtagtgttagaaattgcacaaatgccacctttgtttagctaagaagtaacctagagcaatcctattatctaataccatttaaacaagataatctagcaaagtttttcgagccacaatggcattagttgtggagttggttatagatcgaattgtaaagtagaaatttctcaccattgtttctaagtgagtcctttgatccaagagaaaaaaaaaaaaacaaagcaggatctaacatctgaagcctattctgctgaatttgtgtcacctggtagagtatctctttaaatatgatggtgcaagttaagaggtgtgaatcggtgtcgcgatgttgttagtttaacttgaatccagaaacagaataaaacatattggtgttttatttttcatttgttgagacatggtgttggccataaataaggttgactgttaaatctctcacagattgaaatgtatcctgatgagaaacaacaggtaattacatgtggagtacctgctgcatttacagtcattcayaggaaggtgccagtaatatttatccaaggttctattattgaactatggcattgttgaaagccgtctttaatgagaaaactagggttataaatgttttaaaatctgtgaaatttatctta

SEQ ID NO: 691770 - DNA, 663 bp, Homo sapiens
cattctccttcctcactctcttcccctacactcccccaaracagaccacaggaggttcattttaaggtctgatgaatggttcagaaggtctgtagtagattaggatgagagttttctcatttaaattctatatttgaactccaggctcacccaatttgtcatggtttctttttccttaaaggaaaaaagaagtcagttatttggaacataaaacagcaaagcaaaactctctccagacagtaaacaatagctttaaaagacaaaaccaaaaacctaacagaattttaagaccccctcttcagggatggtgtgctgtgggctatttcaagcaaaatctcggaaatctatgttccaggacaactcagtttgatcaaggccagcactttcaccctaacctttcctctgttttaagactcatggagatcctctcactacctcttcgacatttttaaatggagtttatcaaaggctgttataatttaaatgatctacttctgacttctcagggggtcacccgagtattgtgaaaccagaattggctgtcagtgcacaacatcataatcccagctgtcaccttctagaagccccttcacgccctttcattaacttgaagttaacactgcagtggccaccaggaaaacagtcctaagatgaaaggtacgg

SEQ ID NO: 691771 - DNA, 787 bp, Homo sapiens
ttgcctaatattttctctcagtctgaagcttacctttttaatttcataatgagtgttttttgatgaacagaaatttctaattatgatgatgtccatttctttccttcatggttattgcctctgatatgttttgcctgccttagggttcaggaacatatttcctatattttctcttagatactttatggttttagcttttacatttaaatgtatgacccatctcagatttatttctgtatggtgtatatggtgtgaggtagggactaggggattcaagtttcttctgtcttttcttacagatagctagttgctgcaacattacttactggaaaaaaacaacaataatcctttctttcacactgaattttttcaatgcctttgttgaaaatgtttattttatacaaaaatttattttcaacaaaggcatatgcacttagtattatcaagtgcctttcccctccaaagcctgataagccaagagaaaggggaaacaggcagtacayttcaggtatcattccaaggaagtctagattcacagaaaggcatgtggaagcatatgttatatggttgttacatttgtctttccttgcccttaagaacaatattcctattttgtacagatgcaccttgacttatgatgggttatgtcctgataaacccatcataagtcaaaaatatcataaatcaaatatgcatttaatgccctcaataagcccattgtaaagtcaaaaaattgtaagttaaaccactgtaagtccacatgttcctgaacttaaaatgaggttat

SEQ ID NO: 691772 - DNA, 3002 bp, Homo sapiens
tatgtttccatacagaattctgaaaatgtttgattgaacaaagcagttactgtgatcaccaaacacatttgtgaccaatagaaaaaaatcataaatatcaaagcaagataatgttgatctactcttctgcttttacttccttacaaataccaacttgagtttgcttgttctattaaaacctgcgggctttgaggggaaagatgagtaaagcattccagatttgctaatacagcacattttgacaggttgctgtgcataacttgattgatcatcagaatgaaaatagaaataatagcagaaatgaagtcacgccaacctgagggaaatgaatgttctgttaaacttttaattattttttgaataaattgagctgacttttgctttctagagtttcttttaggactatgatatgttttagctattcagtaaaataaagttgaaaagtatttagtatactattatcaaggttacatgatattgaatatgaagtgagcacattattatttgagatatgtaagtaattcaattacatttcttcctttgttgcaagaaaagagatctttatttccttgtcctcacgtttatttcttgactttacttataaagaggaacctttagacaagtaatttaacatctgagtctcactttctttctcttatgtaaaaagtggaataatattgtcaacctcacataattattataaaactctacttaaataacatataaaaaagcacatacacaatagttgacttaatctcagtttagagaaattattcttagtaaaaatgttaaattttcaaactaataaacattattttaaaatgtagctgtcttgagtaagtgtttgaataagtctgaaattagttttataagtgaattttaaaagaaactgatacatttagagaactgattatatcttccaccatgtatatgttgctgcagggaattcataagaaatacactttaaagatttacatgggtaagatgccttccataaacaaataactattatgcatatgaagcaaatgttaaaaatggaaatgatacatataaagtaaaacaacaaataatatagagtatagaaacagaagccatttaaattattggaacaaactttcaagttgcttatgtaactcagaatataatccattttgctctttataaaaacaactatcatcatatttacttcctgttggtttaaaaagttcagagaaattacaatattgacttaaagatactatgatcaatgaaaaaataaaagaatactaccaaaacagacatccatgttaacctaataataaatattaaaaaacactaaattacaatagaaatataaatgctttaagtaagagaggacaaacgagttcatcgatttttttctttattcattcaacgaatattcttccaacattttcctcacgtgttccaccctttacgcagataccttccacagtttctctgcatacagctgacaggttaccatttttttcttgccagtgtatctataattcaaatagttgttatcaggtgaaaagtgatagtcattaaggaaaaaaaactttttttgccaaaaagaaaagcattttatctgtcagtaattttcctttgttgcttttttaagcaacaaagaaaaattaacttacaattaacttacttaaaattcagtgagggcacaatttcttttgcacatcacttttacagtatttctctcaacaagaaaatacatttcttatcttctttctcagtaatgggtcacaggaattctaatccaaatttcatacrgattttattatatataaaaaaatccaatttagaaaaatctaaacaaacatttttaaaatttttaatatcttaaattgttcttagagaaaacaaaatttgtctttggaaatattaggtgtattaggtaatattagaaacattagagcatattgtgaggtaatataaatgaaagtaaaagtaaaattgttcttatttcttgagttgatttccagttttcactctattaactcaatacagaggtgatatctttagggctgccctctttttgcttctttccctgatttctcattataacctatggtaatcatctatagaataaaatcataatattgtcatcaatgccattttgaatgatagcttatcctaattaatagcatgtatctactacttcctcaataccagttagacttttagtttcaattgcgtatttaaaccagtgtttgcattatttgtatcaattctcgttattcaagaaatagttttcttcaattcaattctttctacatagttttcacatctgttgggaagcacatttctgagagtagggatttgctttatttaattttataattcaccttggaaattagcattgtatctgacaactggaaagtaaccaataattatttttttcaaaaaataaatagataatgttcacactctttctgagttcatttgtcctctcttgcctaaagcattcatatttctatcgcaatttagttttttttaacatttattattaggttaatatggatgtctgttttggtggtattcgtttatttttcattgatcatagtatctttaaatcaatattgtaatttctctgaactttttaagccaacaggaactaaaaatgatgatagttgtttttataaagagcaaaatgggttatattctgagttataaaaataacttgaaactttgttccaataatgtaaatgtctttcttctgtttctatactctatattatttgctattttactttatgtgtgtcatttccatttttaacatttgcttcatatgcataatagcactttacttatggaagtcttcttaccaatttaagtctttaaagtacatttcttatgaattccctgcagcaacatatacatgatggaagatataatcagttctctaaatgtatcactttcttttaaaattcacttataaaactaatttcagacttactcaagtacttactgaagacaattacattttaaaa

SEQ ID NO: 691773 - DNA, 2520 bp, Homo sapiens
  misc_feature 1550, 1551: n = A,T,C or G
ctctctaacggccggcctaccattttgcctatgaatccttaagtgcacattcaaaagttaaacgtaggtgtcctttgctattacttatttctgctcttccaagtagtcttgctctgctgcttcttcccaccaaatgactgctcatgaggattctcctcaaatccatgcttcccacctatgtgagtctgttgttgcaagtaatcctctttgaattgggccagatgtcttattcctataattgtatagtttcccccatgctgtaatgtttccaaactcattccatccaaataacaggttattatggatggaaatgtttgtgttccacttgcaaattcatagttgaagtcctaatcctcagtgtaatagtattaggacatgggacctttgggaaataattagctcatgagtggagagccctcatgaatgggattagtgcccttataaaagagaccccagagagctctctcctctttttctgccatgtgaggaaaacagctgtcggaaaccaggaaatgggccctcaccaaaactgctggtgcattgatcttggttttctgagtgtccagactgtgagtaataaatttttgttgtttatcagctacccagcctataatacttagttacagcagctcaaactgactaagatgatgatcaatttttttaaacattgtaatatatataatctactaattgtaacccctttctcccacactgcccataaaataaaattttcaataatttttatattaaatgaaaatgtccttagtcaaagaaatgaaagggaagcaaaatcagaaattttagaatatgaagagtattttgttccacatcattatttcaaagcatgccatggaattcaatttgtgtcataaagcatgaccatcccagaatacatcaaaacaataccaaaaaatactatcataagtttttgtttctctaccaacatgtaaaattatggataggaaattgaaaaaaaaaatcttatcttttgtctttcatgactgtatagagaagtaagaaaatcaatcgagaaattgtatgatcatgtttaggggaataattctacaaacatttaaaaatgtgtaggctgaaaataaatgactgcagatggaatcgtgtatgtcactgtataaatacatctctgaataacattgccttaaacgtactctattgtatatcacgtaaagtaagtagatgcaaatcccacctacaaatcagtttaagaatactggaggcagggagcggtggctcacacctgtgatcccagcactttttgggaggccgagatgggcggatcacgaggtcaggagatcgagaccatcctggctaacacggtgaaaccccgtctctattaaaaaaaaaatmcaaaaaaaaaaaaaattagccgggcgtagtggcggttgcctgtagtcccagctactctggaagctgaggcaggagaatggcatgaacccgggaggcggaacttgtagtgagccgagatggcgccattgcactgtagcctgggcgactgagtgagactccgtctcaaaaaaaaaaaaaaaaaaaannaatactggaaatattattaaatagcctacaagtattttgaagatttcttcccttatcttcaagataatcataagcacatcccctttcagtaagatgcaaattaacttatttctgacacactagaagtaggaagggaaaggagttggattgcaaaatgatttcagcagccacctgtctttcaacccaaaataacacagaaatagatttcatctaatgatgaataatgatgcttttactatttgttggtcatttactatttgcatagtattttatatacactagttaaattttaacagtcatataaagtacatttttaaaagcacttcaaaatgaagatgcatctatatgatgcagccaccgtaatatcgtctagtgtctagaccactgagctatgcttttagggagctttcttacttcccaatatctatttctatccagttagggaggtggttagttttttcagatggaatcttcatccgaaagttactacttctactataaggaccctcatacatttattctacaaaatttgtattgagtttcccatatcagtaggtggtacacaagagacagaaactcaaagtcatgaaacatggaaagaagctattcttgaattaatacgttaaaaagccacagacttcacattaagtatatggggaaatgcctttttaacaaagttacatcctgcaaattataatatggagggttgattagatgaaagtggttgcctatggtagataaacccagaaaagcagcaggattaattgaatttagaaagtgaaagaagagcaaattcaaagattattctcctaggcatacgtgtgcaaggaattcttttccttttctactacattcttagcatacagcaataaattatatatgggacaatatttacagaacaattatataatatataagaagaaactttatatgagctgtaaaattgcatcagaatctattgaatctcag

SEQ ID NO: 691774 - DNA, 1482 bp, Homo sapiens
catgctcactgttcaatgtgtaagtgcagtccagcatttatagtcatcgctgagggaagcatctgagtcttttccagtaaaagaagtcctgtttgtatgtgctttagagaaaaagaaagaaattttattttttatttttttgtattttctacatagtccgaaacaaaaaatggctataaaatcattcctgggtaaatgtactgatgccacattccagtaaaaaacaaaataaatatttttgagtgtttcttttgtttataaaccactactctaatcttctttttagaaacagaatagcttgcaaataatggcacatagctgcttaaatgttgagtgttactttcttttccacttttgcattgaattggtgacagtgctttatgtttagcagtagtaagttcaaatacttttttaaaaaataaactacatggtaaagtattgggaaattgtattttgaaaatctctatatgtgatcatayataacaattcaaatattttactggtggaaatggaagagtgtaaaaaacatttaggaggtaaaaatagctgacaattgttggatctttaataataaatccaagagtcttgtcatattgtaagctcgttacatttctaagcaaattgaaaaaagaatgagataaatccacgaataaggcaaataactagtaacagttgcatcattattgtaaattactaaattctttgtttctgcagcttctagaacagagcactttggggttagaagagccaattctaatcagtgcaaattattttatactctttggggaaaacaaatatcattcatatttccttcttaaaggaaaaattaacaatataagaaatgcacattcctgaagctcaatgtattgctctccaaatataatcgttattgtacaaagtttgattttccacccagaaattctcaaatataaataatatgatgtgaagatagctttgttttattatgttttgctttgctcttcaaataaattaattatacatagtaatgttagacaataaacattttatagaacacttttttttgattgaaggaaatccacttgaacaaacttaggccaaaatggggagtatatttgttgatgaaaacaaaccaccaaaagtcataggagctactgactccagggacagccataaataaaaaaaggaacatgtctaggttctccctccattctatattgtcaagtttagacccgccttctgcagataaactttttctgcactgtggacatcactgactaccagatgcttctgtattcatattccttccctcactatctgagaagaactacttttctttcttaaatttcaatctcaaaattcctgaagaaggtatttgaatatgcaactctttataattaatcagggagagagggtgagacttataagatgtcagccttattcaaaccacaaggttgaagcagtggatggggatggtaggcaggagaggagcagttgcccaaa

SEQ ID NO: 691775 - DNA, 549 bp, Homo sapiens
tcctcttctgcaycaaaaattttatacacaatcattagtgaattacttgttctccaaacacattactgttttctactccttggcttttctctgtcttgcatatttgtctctttctagtcaacatggggacatatttcttgtaagatgaattatccaaaactttaaaataaggcaaaaagaatgactgcagctcctttcagtatcatactgaagaattgtttattagagccactgaatgattttttcttttccaggacactatgccattgtttgactgctattatctaattaatggcttagactttcgaaagttacatgttaacctgcatatttgcccctagtaaatatgcaaataatttttatatggtgaaaagacaacctaagaggttatactgtcttgccatgaagaacattaattgtatctattgatattctctatctaatgatagagatatctctatctaatgaaatttctatttaattactttacttttttaaaattttatttttatttcaatagttttgtgggggtacaggtggttttggatt

SEQ ID NO: 691776 - DNA, 549 bp, Homo sapiens
tcctcttctgcatcaaaaattttatacacaatcattagtgaattacttgttctccaaacacattactgttttctactccttggcttttctctgtcttgcatatttgtctctttctagtcaacatggggacatatttcttgtaagatgaattatccaaaactttaaaataaggcaaaaagaatgactgcagctcctttcagtatcatactgaagaattgtttattagagccactgaatgattttttcttttcyaggacactatgccattgtttgactgctattatctaattaatggcttagactttcgaaagttacatgttaacctgcatatttgcccctagtaaatatgcaaataatttttatatggtgaaaagacaacctaagaggttatactgtcttgccatgaagaacattaattgtatctattgatattctctatctaatgatagagatatctctatctaatgaaatttctatttaattactttacttttttaaaattttatttttatttcaatagttttgtgggggtacaggtggttttggatt

SEQ ID NO: 691777 - DNA, 542 bp, Homo sapiens
ttaataacctgaaattttccccagaacaccaggctctaccctgacagtattagatcagggtcctcagcagataataaagctgtgtccttgaggtaaagttgttctggttaggtgtactatagcaatagcttctctttggaaggatagccatggagaaatatagatgatgaacaaaaggagagtgaatcagagttgctagaatggctagatctcctcttagtaaaaatgccaggtgctcttcaatgggaggcatctgtctaggaataattcaaactacctagctgaggaatgctctgtatggatctgcccttccacagttagcactggtgaaaaatcacagcttaattggaatccagtcctagactcagcataacccacagcaattactgtagctggcctactggaccaagatgcaagatggttatccaaatgtcataacctttaaggataatgsccagtgttcactctttaccaataaccctgccaattaactaagttgccaatcaccttcctctgtttgcttacattttgaatcagagaat

SEQ ID NO: 691778 - DNA, 1225 bp, Homo sapiens
tgaatagaacaaaatttagttgatacmtaaaatggaatatagtcagccttaaaaaggaagaacattctgacacatgctgcaacatagatgaacttttaagacactatgctaagcgagataagtcagttagcaaaggacaaatactgtgattccacttatttaaggtacttagggtcatgaaataaatcatagaaactgaaagtagaatggtggctgtcagggtttagggggagagaggaatgaggagttcctgtttcatagatacagagtttcagtttggtaaaaatgaaaaaagttctgaaaatgaatggtggtaatggttgtacaataatgtgaatgtacttaaaatagattaaagtccctattattcaaaatgagaacacagatactaattaactttggactttgataggtctatcaagtatattataatttatagaaaactatttaaaaatagaaagagtctaaatcttctagaacgtaaagcaaaccaccgcccccccccccacacacacacacaaaacaaaacataactaatttttaaaatacaagaatgggtggggcacagtggtgcacacctatagtgtgctacttcgaaggctgacttgaggccaggagttcaaggctgtagtgcactataatcatgcctgtaaatagccactgcactccagcctgggcaacatagcaagacctatctctaaaaaaaaaaaaaatacaagaaaggaaaaaaagtcaagcagaccaaataaaaagcataaagaaaaatagtagtataaaatataaacagactatgccttatagttaaaaataaatgtagactgaatgtaaaaagagaagtatccagatacatactatttactggcaacacatataaaatgaaaatgtccaaaggagcattgtttatgagagaaaaaaaactggatacaatccaaactccatcaataaaaagtaggtagatctatttttaatattaatacaataaatacataagtaaaactggatgatctctagctctatgcatcaacatgaatgaatctcacaaaaatgttaggcaaaaaaaatgcatgccatgtaatacatattgttcagtaacctgaatcatttttctaaagttcacaattatataaaacttaaaattcagaaaagtggttaattctaaggcgaatgcatgggaatgggacagaatgggcaaagtggggaacacagaaggcttcggtgatgctga

SEQ ID NO: 691779 - DNA, 1225 bp, Homo sapiens
tgaatagaacaaaatttagttgatacataaaatggaatatagtcagccttaaaaaggaagaacattctgacacatgctgcaacatagatgaacttttaagacactatgctaagcgagataagtcagttagcaaaggacaaatactgtgattccacttatttaaggtacttagggtcatgaaataaatcatagaaactgaaagtagaatggtggctgtcagggtttagggggagagaggaatgaggagttcctgtttcatagatacagagtttcagtttggtaaaaatgaaaaaagttctgaaaatgaatggtggtaatggttgtacaataatgtgaatgtacttaaaatagattaaagtccctattattcaaaatgagaacacagatactaattaactttggactttrataggtctatcaagtatattataatttatagaaaactatttaaaaatagaaagagtctaaatcttctagaacgtaaagcaaaccaccgcccccccccccacacacacacacaaaacaaaacataactaatttttaaaatacaagaatgggtggggcacagtggtgcacacctatagtgtgctacttcgaaggctgacttgaggccaggagttcaaggctgtagtgcactataatcatgcctgtaaatagccactgcactccagcctgggcaacatagcaagacctatctctaaaaaaaaaaaaaatacaagaaaggaaaaaaagtcaagcagaccaaataaaaagcataaagaaaaatagtagtataaaatataaacagactatgccttatagttaaaaataaatgtagactgaatgtaaaaagagaagtatccagatacatactatttactggcaacacatataaaatgaaaatgtccaaaggagcattgtttatgagagaaaaaaaactggatacaatccaaactccatcaataaaaagtaggtagatctatttttaatattaatacaataaatacataagtaaaactggatgatctctagctctatgcatcaacatgaatgaatctcacaaaaatgttaggcaaaaaaaatgcatgccatgtaatacatattgttcagtaacctgaatcatttttctaaagttcacaattatataaaacttaaaattcagaaaagtggttaattctaaggcgaatgcatgggaatgggacagaatgggcaaagtggggaacacagaaggcttcggtgatgctga

SEQ ID NO: 691780 - DNA, 1628 bp, Homo sapiens
aaattaggaaaaagtttaaatgtttacataaattacatatagataataatgaaatattattttgaaaagagtgataaccatataatgcaaatgttcaagagttaaccgtgcaaatgagtatcattattagtaattttattcaaaactgactaatgtttctagcataaaggagttgaacttaggatatatgcactatttgtatcagtgtttttcaaattgctagtcagaagaaaatttatgacataaaacatagaagagaaattttaagttaacaggggaaaatgatctcaaaatagagtatcttctttagtgtttatgtggattattgtcattaccaaattaccaaaggaaagcttaaaaagaaaatcaactgacatgaatataggaaactatgacagagctggaatacattaataaaaatgaaacctcctccacttccatttaaaagctttgggctccctctgttggaagtctatattagagtcttgcaatttaaaatagcaatttgatccctttcactcaaggctaattaccaatccctgctgagtggctrgctacaataaaacctttattacttttgtaaaacataattttatgaaatatttttcttcttttttttatttttaggtacagggtctcactctgtcacccatgctggagtgcagtggcttgatcatcgctcattgtaacctctaactcctgggctcaagcaaccttccagcttcagctttcttagtagataggactacaggcacacagtactgcacctgactaattctttttttaaaagttttttgtagagacagggtcttgctatgcttcccaggctgatcttgaactcctgacctcaagccatcctcctatcttggcctcccaaagcactgagattacaggtatgagtcaccacacccaagcctattttctaatacaattcggtatatattatttggaaattaaattagacttctttacattagcagttataaagtatttctaaaaatcccaatgggaagtaaaatttaaaaatactaaaacattctgctcagtctgacctaaaagggagttcttaataaatatttataatggaagggcaaaaaaagaatcagaacttcaattaggaaagtaatctacagacttgttcaggaattgatagctcatctaaagcagtacaaatgagaacagtagctggctgacttatctccatatttggggttaaagaggtcttgccagggataagccaaaacacaggaattaaacactaacatattttgcaaaataaactaaaagtcttctatatcaaagatactataaagaaagtgtagtatagcaaacttgaaaaacaatttacaatacatattacaaagagtcaatacctttaatgagagtttttaaaatgaataagagatgagcaccctaataaggacaaatactaacagaaactcatataagaaattttttaaaacatattcactaaaaatgattaagtttggataattgtccctgaccaaatctcatagtgaactatatccccatgctagaggtgaggcctggtgagaggtgtttaggtcatgggagcagatccttcagggcttggtgccgtcttcatgataagtgagtgagttcttgct

SEQ ID NO: 691781 - DNA, 1210 bp, Homo sapiens
tgtacatttcttctaagcatggccatcctcctatttcagatctctaatttcagtccagaagaatgaagagaatccagtggaccaaggacatggtgaagccaataaaaaggaaaagccaggatctctgaataatcacatggagcagattttgcctccctcctcaccatcacctctgcacacatagacccttcactggactatgatgagaatgaaatatacgccttcgttctgtattctgaaaagagttctataayctgtaagtagcccatgtattatttgttgactgaacaaatgatatagtttgagtacatacacattactaccaaaggacttaatatatataatgcatatagcatatgtgagctattgttatcactaccattttctaaatgtatatatttgtgattgtgattaacaaagtaaaattttatctgaatgtaattgtttgcaatatatttctcaactacaggctgctacaatataactactatcatatgcatcggaggctcaacattttgatattaagaagggatccatacttaaatatctagagactactgctcaacattccaaactatttgcaattccttgaatggacagtgacattgattttgtatatgtgacaaattctttggcttggcttgcccaacctctactccacattacttcatgggtgccttcctgggctgcagaaggtagaaagctatctttcccaacttttgcgcaagggttccagatgcacaaaatagatgcattcttctaagacacagaaattgaaaatggggttgaggccatctacctgcctttttctagttgtttttttttctactggtaagcaattttgcacagactgttttctataacagagtttctgtgtccattttctagcctgagtgttaagaggcagttgcagtggcagcatctaggatggcttcctgattcttcattggtggatggcaagatattcttgggctgaataattccaggacagtactatggtcttctgggaatcattcctggtgggccagtctatagcccattcttttggccctttcatgatttttttcctaattacttatggcttttagcctattctttctgtcttaagatgactacattggtttctgttttctgcactgaaccttgactgatacgggccttggaaaatattgctgggacatggaatgcatatccccttctcccccggtcc

SEQ ID NO: 691782 - DNA, 599 bp, Homo sapiens
ggttaagtaacttgctcaagattgctcagctggttaaagagtttaatctacaatttattccttctaatttccagctttgacttctttccaccaacctgttgacttatgtgtattgaactgtctcatataatcttctgaagttgcattgytgaaaaacaatcagaaagaccagtcctgaggttcatcatctccaaaagtcatgcaacatatgatgttcacatgagatgtgaaatatgtaaagagtcatatatttttatatataatatgcaaaatataaatcatgtatatattgaatcaaaggtctgttttgaaggctaagggtcaatagccaatcttccatgacttattttacctaacagcacagtttgcatgtccacacaggtgatggcagtccactgaccagttaaaagttgtttggctatttcagcaaaatgtttatctttgtgtgttgttatattgatttttttgaatctacctacgaatgaggcactaacaacctcaatgcattagagtcctgataaacttatcttgcactattttggcctatgtgatagctaacccattgacaaaagaaatccaaggtgataaaagcctttctt

SEQ ID NO: 691783 - DNA, 558 bp, Homo sapiens
atccattgttcacttctttctggattggatccctctgagcctctatgcctgcctgaattgacctaaagttgcctaccttgcacccawaattgatccatgacttgtctgtcacttaggggcagccattcctttctgccttataatgtttttctttacctatggtgtatattcccaggtctatttcccttgtctttaattttatcatgttttttttgtaaaaccaagattgacacaggttccataggcctatcttcacaggcaaacaaaaaactcttcgagagccatacattggccatatttcgcagtaattaggacacctccaaatcttctacattaaagcatttcagaatagtttattcttttgttgaatcctttatactgggccaaaaaatgagcttgaactttctttatgtgtgggatattatttatctttaaattaaaatgctagttttatctaccatacaaaaagggtgtcatccatagtttgcttattaatgagggtatgcagcataatttggaagatcttaatatatgcagaaacaggtcatgtacacattt

SEQ ID NO: 691784 - DNA, 644 bp, Homo sapiens
ttgtccttttttttaaacgttagcctgccaccatttcccctccattttaaaaaccattgtgccttataataaaacacacaaatctttctctagagggtgaaaggagggattggggaagggcagagaagggcccaagttcatgctatttgaatgactggacaataytaatcatttattacagaagcaattttcaataaacttgtaactcatcaaaatgtatcagagaaacggatcacttgacatggcactgtttatgactagattatatgccagtcctcagatttaagatctgtaaactgcctaagaaattatgacagtaatatgacattaacatgacattaacattttatccacattaaagatattttaatttgcacacattcataggatgcactgtgtgttaaaaggaaagagaaagatttatggaattggtcttgtagaaagaagaaaaacttcatgctgtttcatctcatgatcacagtttgaggaaagtgtctgttttaatacgcagtttcaccctaaacctcaaatgtatattgtcttaggtgagaaaaatatattaaaatgttgggagaaaggtatctattatgctgacatccttaaagggtgacatgagctaataaatatttttaatcagtgtttaa

SEQ ID NO: 691785 - DNA, 1517 bp, Homo sapiens
atactgtttctctcgaagcacctgtaaatgaataaaggttatcctcatgaagtcagctgcaagaaagacatctttagcttatgccatgcaggactgattcttaaccagctctgaaagaatcttacccacagggaggatttcatgtgaaaatgtcacaccacagctggataacaccatttatataggtgatagtaatcactratttgggggctatcttaagatgccctcattatttgggaatgaagtcagaaaaaaaggtcaaaatttcaaactaaaacaagaaaaaaagaaattaaactgggaaaaataatgggtcacgcagtcaaggatggagtttataattgttactgagattagggtttttttccaatcaaataagtcaaagaatttcttcttcctttcctctctccaaacccaataaactattcagctgtgtgatgatacatgaattaactgctgtttgatgcaacagaagttttctgcatggattctagaaaaaggaaaggtcgtaacaacttagtgttacatctatactgtccaaagaaaggtacagaattatttagaatcaatggtttagacagagtacttatatggtggagagctgaatcagccatccttgtttgataaaaaatattccttttggataccaaacaagatttccttttatactgttctcactatgaaatcatctggtatataattcaactttttaatggagcaatactatgatgtatttctcccataattgaaattcaagtttataaatcactttattatgagtttgtttcatatatttaagcaccgccccccagagtttaatcatctgtagatgaattagaaaaagtgcttctaaaatagcaaagctgaggataagaccttggagtgaggtcctaatttgctctcttgatgtaacttttaagctacagcaggtagaagttatctttctatagtcttattgacttcttttatttaacaaaagagacctccctctgaaacagtaactctcaaaatattttgaagttaactaagtaaaaagtgcgttttacattatggcatatataagtgtatattatgtgtataactgaaaaagaagtttggccaaacaatgcttatcccaactatatgcaaagcattctgacatttcttattctatttcattatttaaaatgttgattacagttcactaaacttgattgcatagtatactcatgagttgggaaccaacctttgaaagacattgctctcaaatccaggctacttatatcggaaataattccactgacattccttagctgagatcccgttttcccaatgcaagtcactgtcccttattagctaatgcattttctctagaagaacattcctgaaatgtgcccagttttctacagcaggtatactactccaggtgcctcactatttccgtatttaaacaaaacataatcttcatttcaaagagcagaaatcttattctgagaaaaataataacaattgaataaacagctaaagaatatattgaa

SEQ ID NO: 691786 - DNA, 993 bp, Homo sapiens
ttttcttttcctccctggccttacttcccagatagcccataagccgtatctattatgtcagtgcaagttgttatattctgtatctatctatgtatctgtctatctgcctattaagacacacacataattatataattctgcatctttattttgttcaatattatgtttttaagatttatctcaaccctacacagttgatatggtttagctgtgtccccacccaaatcttatcttgaattgtagctcccataattcccacatgttgtaagagggacccagtgggaggtaactgaatcgcgggagtagtttcccccatactattctcttggtagtgaataagtctcatgagatctgatggttttataaggggtttccctttttgcttggctcttattgtttcttgcctgccrccatgagaaacatgactttactcctcctttgccttctgccatgattgtgaggccttcacagccatgtggaactgtgagcccattaaacctctttcctttataaattattcagtctcgagtatgtctttattagcagcatgtgaataaacagtattccattatattaatacaccagtactgtttatgctagcaatacccacaatttgaaaaatgttcatgctatacataatgttccaatgaacatatttgtgcatatcctttgaacatatttccaacagttctgttaggctatagaagtacaattgttattaatagttcaaggagtacaggtagaataatcattcccccaaagatgtccttggaacctatgaatattaccttaaatggcaagatgatctttacagatataattaaggatagggatcttcaaaaggtgagattaccttggattatctaggaggatgcaatctatgcacatgagtccttgaaattgaaagaagaagcagattagagagtcagagagataggatctcttgctggttttgaagatggaggaaaggagccaggagccaaggaatggccc

SEQ ID NO: 691787 - DNA, 2381 bp, Homo sapiens
cggcaatgaaatgaaagtacctctgattggtcccttcccacaaccaatcagtttggttgcaggcctactcttcattctggttggttccctcctgcaataaattagcctggctgtgggccaatgggaaacctctaggtttaggtttcctaggtggatattcgaagcccgaaaaatgctgtaaccagtgttgtttggccacttgctcaagcctgctcccaccctgtggagtgtactttcacttaaaacaagattctgcttttgctgccttgctttgtttgtgtgtttcatccagttctttgttcaaaccaccaagaacctgcccttgctttcttttgcattttgtccaattctttgttcaaaatgccaagagtctggacaactaccctcaactggtagttgggcaactggacaactaccgtcaacagtaacactagggctgtgatgacaatctaatattagagtaaatagatgattataataattgttaatattaaacaagggttttcagtatgccaggcatgtggtaagccatgaacagacacatagacacactcacacacatcctcatttaactctcacaacaatactactttccatgtagaaagttttttgtttgtttgtttggtttgtttgtttgttttttgagacggagtctcgctctgtcgcccaggctggagtgcagtggcacgatctcggctcactgcaagctccgtctcctgggttcacgccattctcctgcctcagccccccaagtaggtgggactacaggtgcctgccaccacgccctgctaattttccatgtagaaagttttgaacaaagttattggtgtgttttatctttcctactccattgaaaactatttgagaataaagactctactttttacataacagaggcttagcaaatgtctgaatgaataaatatccttatatttccacataagaacctacattgcatagaaaaatgtaaatgaagaattttttttttttttttgaggcagagtctcgctctgtcgcccaggctggagtgcagtggcgccatcgtgctcactgcaagctccgcctccctggttcactccattctcctgcctcagcctcccgagtagctgggactacaggcgcccgccaccacacctggctaattttttgtatttctagtagagacggggtttcaccatgttagccaggatggtctccatctcctgacctcgtgatccacccgcctcggcctcccaatgtgctaggattacaggcgtgagccaccgcgcccggccaagaattttatgatttattcataataattaatttttcttctcattctgtctgctacatggttcagtagtgttgtgtgtattcatattgttgggcacggagcgccagaatttttttctatcttggaaaatgggaactctctactcataaaataacaattcctatttcaacctttcctccaccctgggcaaccacaattctgctttctgtttctatgaatttgaatcatttagacacttcattatcattatttttgattgctcaatatttattaaatgcttcagatagtggcagtggaaaaagtatgttaaaagatgtatgctttatgttggacacatgcaaatctcactttcactgcccccatcccccttccaaaacatacacgcgtgagagaaacagaggtaaaaatttattgtagaaatcagcaacctaatttaaagctgaaagcaatcttaccttgggtaacagaaaaaaaaaaaaaaaaggtaaccttctctttgaaacataaatcactcctgaaaggaccatgtgggaattcctagaattcctctctttctatttttgactcttgtagaagaggttgaaaacagaagcatgattggaatattaggagccttttcctcttggtaatcattaaaaaaggaaagtctgaaagaaacttctaatttcccctatagctgtgtaaactccagttaaatataaattgttytgttctctctcgattgttacatttatatttcttgaggtcaaagtgactttccatagtcataaacagattctactttgtaaccccactttaactatcaaagtacccgaaaaagcatcaaactgtgcattaagacaatatccaggtgacagagagaaaccataaaaggatttaggctaggagtaaaaatattatcctttgggagccctacatgagacctagaaataatatcctgtttgtttgggccaaacttttcaaagagttttaatccttctaaaaatccacatgtattaccttaggatgcagcttcagccatgtatgtaaaaacataggtgtgaagtgtctgtagggccttacacctctgggcctatagttgaaaacaaccttctctagtttttccttt

SEQ ID NO: 691788 - DNA, 899 bp, Homo sapiens
aaaaaaaaagtgaatgaaaacctgaaagtctaacagctggaatatggaaaatactgtcatacactcaagcatgacactgcatcatgacartgcaggtggcagagaccgagttggcagaccccagcctgtggggccacatgtggcatgaactacctgtttttgtgaggcccctgagtaaagaatggtttctacattcttacatgtttgggaaaaaagaatatttcatgacacatgaaaattgtatgacggactgggcgtggtggcccacacctgtaatcccagcactttgggaggccaaggcaggtggatcacctgaggtcaggagttcgagaccagcctggccaacatggcaaaaccccatctctattaaaaatacaaaaattagctgggtatggtggcatgtgcctgtagtcccagttactcaggaggctgaggcaggagaatcgcttgaacctggaaggcggaggttccagtgagccaagattacaccactgcattccagcctgggtgagaaagtgagactctgtctcaaaaaaaaaaaaagaaagaaaattgtataacattcaaattttagtgtccacaaatacaattttcatggaatacaagcttattcacttacatagcatctacggcagcttttgtgcaacagcaaagtggagtagttgcaacagacactggcccataaaacctcaagtgtttactctctggccctttacagagagaatttgctgatcctcagctagacggtcaacgtggattaatcttaaggacataatatggaacaacaaaaaactagttgcagaagaaataggatactatttatattgactttagcatgtgaagcaattttgtatttcttatgggttcatgcaaacatagtaaacgtatgaaaacgtgca

SEQ ID NO: 691789 - DNA, 899 bp, Homo sapiens
aaaaaaaaagtgaatgaaaacctgaaagtctaacagctggaatatggaaaatactgtcatacactcaagcatgacactgcatcatgacaatgcaggtggcagagaccgagttggcagaccccagcctgtggggccacatgtggcatgaactacctgtttttgtgaggcccctgagtaaagaatggtttctacattcttacatgtttgggaaaaaagaatatttcatgacacatgaaaattgtatgacggactgggcgtggtggcccacacctgtaatcccagcactttgggaggccaaggcaggtggatcacctgaggtcaggagttcgagaccagcctggccaacatggcaaaaccccatctctattaaaaatacaaaaattagctgggtatggtggcatgtgcctgtagtcccagttactcaggaggctgaggcaggagaatcgcttgaacctggaaggcggaggttccagtgagccaagattacaccactgcattccagcctgggtgagaaagtgagactctgtctcaaaaaaaaaaaaagaaagaaaattgtataacattcaaattttagtgtccacaaatacaattttcatggaatacaagcttattcacttayatagcatctacggcagcttttgtgcaacagcaaagtggagtagttgcaacagacactggcccataaaacctcaagtgtttactctctggccctttacagagagaatttgctgatcctcagctagacggtcaacgtggattaatcttaaggacataatatggaacaacaaaaaactagttgcagaagaaataggatactatttatattgactttagcatgtgaagcaattttgtatttcttatgggttcatgcaaacatagtaaacgtatgaaaacgtgca

SEQ ID NO: 691790 - DNA, 899 bp, Homo sapiens
aaaaaaaaagtgaatgaaaacctgaaagtctaacagctggaatatggaaaatactgtcatacactcaagcatgacactgcatcatgacaatgcaggtggcagagaccgagttggcagaccccagcctgtggggccacatgtggcatgaactacctgtttttgtgaggcccctgagtaaagaatggtttctacattcttacatgtttgggaaaaaagaatatttcatgacacatgaaaattgtatgacggactgggcgtggtggcccacacctgtaatcccagcactttgggaggccaaggcaggtggatcacctgaggtcaggagttcgagaccagcctggccaacatggcaaaaccccatctctattaaaaatacaaaaattagctgggtatggtggcatgtgcctgtagtcccagttactcaggaggctgaggcaggagaatcgcttgaacctggaaggcggaggttccagtgagccaagattacaccactgcattccagcctgggtgagaaagtgagactctgtctcaaaaaaaaaaaaagaaagaaaattgtataacattcaaattttagtgtccacaaatacaattttcatggaatacaagcttattcacttacatagcatctacggcagcttttgtgcaacagcaaagtggagtagttgcaacagacactggcccataaaacctcaagtgtttactctctggccctttacagagagaatttgctgatcctcagctagacggtcaacgtggattaatcttaaggacataatatggaacaacaaaaaactagttgcagaagaaataggatactatttatattgactttagcatgtgaagcaattttgtatttcttatgggttcatgcaaacatagtaaacgtatgaaaacrtgca

SEQ ID NO: 691791 - DNA, 638 bp, Homo sapiens
ctcctcatacaataaaagacactacaacataatgatactgtttaacaaatgtgccagaatatatgcattctgctagctccttcaaagtagtttcaccagaaagttatgcctattccaaaatgctgccaacattattatttttttttcctgagatggagtctcgctctgtcacccggggtggagtgcagttgcctgatctcggctcactgcaacctccacctactgggttcaagtgattctcccacctcagcctccccagtagctgggactacasgcacgcgctaccacacctggctaatttttctatttttagtggagatgggtttcgccatgttagccaggctgctctcgaactcctgacctcaggtgatccgcccaccttggcctcccaaagtgctgggattatgggcatgagccaccacgcctggccaacattaaacattttatactccatctgtacaactgcctttagagtctgaaaaaaatttagtcatatattacctatagtcaacaagtcaagaccccaaatagtatttaatcatttactccatttaccaaacttgcctccaaagacttctagctgattcctaaaacaaaatgtcatgaaataacacctatttggcatccttaagtatgtt

SEQ ID NO: 691792 - DNA, 2164 bp, Homo sapiens
cacaagtgtacagtatagcatcactattgtgttgattaaagcaatttattaaaaagaattaaggcctaatttgtgagtaggaaccagagtaaactccataagtagagtagcttttaattggaaaatagacaattcaatatataagtataacatagaattatgaaaaatatggttggggaaagttccagaataacagtttggttcttaggcaaatatcctaatactaaaagggtaccaagaatttgcaacatattagcatatgggggtcaataatatttttggtctcttttttctttttttttttttgagacagagtctcgctctttcgccaggctggagggcagtgacacaatctcggctcactgcaagctctgcctcccaggttcacgccattctcctgcctcagcctcccgagtagctgggactacaggtgcccgccaccacacccagctaatttttttgtatttgtagtagagacaggatttcaccatgttggccaggatggtctcgatctcctgacctcgtgatctgcccgtgtcggcctcccaaagtgctgggattacaggcgtgagccaacatgcccagcctggtctcttttttcttttaagggcatgaaataatacctgttgtcaagaaaacaagaaagttgtgatacagtaactaagctaactatttaaggaatgtcaacaatataaatcttaagagggcacaggtaagaacaatttgaaatgccctggcacgtatctgagattcatgagtattcaggggaaaacagtgttttctccaggaatcaaacacacatcctgagagtgacatttcgtgtatacgcattgttattttaaaatcagagtttcctttgattaaaaaaaaaacaaaaaaacaaaaaactggacttagtggcagtgtggtgtgatggaaatagcccagactgaaaacttcaatattycagttctacttcaggctcttccattaactatttgagtcttggcaagtcgctttccttctccgggagtcacttttaaaaaaaaaaatgtataaaatgaggggataaactaattgagactgataagcatgtgactgaccaagtaattgaacttgtgatttattacactgatgtttcaaaatgagaaaccggactacggaataaacctaagctctttagcttctttgagcctcagtttcctcatttataaaatgggtgtagtgatacctgattggggtatggtgatagttaagtaatactaggcatgtaaaacaactagcataatacctttcacttgttacatatttagaaattggtagctatgattattactatgcactagatgttttgaatactatctcagtagctcatgaatttgagcatgtatcaaagtcacctggaggtggggctacataatttgcatttctaacaaattcccaggtgatgctgataatagttatgaatacctgagactgtgtgatcctaagagtagaaagtgtcagtctatttgattatcatctcagtcgacttggcaataccaaatatgtttgacttttaacataaatgtggatccgtatgactacttaatgtcttcataaggatcacagtatgatggggctttgaaaggaaaagttacggtgtatgcagaagaaagcctaccataccttaggcgatggaattaaaggcagtagaaatggccagcttctttagagtagatcgtagtattttcagctgggagaatagatgtgactgatcctgaattgtgatggcccatgactcaggcactaaacatctctgtcaaaaacttacagactgctttgaagagaaactatttaatatatggtatgagtaattcagtagaggaaagaactatgagtttaaccaatgcagaaatgcagacagaactttgatattctttcaagtgcctcgaaattaaatggttaatctcaaaggtgttaatgggggtggggttgaaatcaaggcctgggttagaaaagcagcatatctgtgctgagctatacaagctgcccagggtcaaggcactcagatgagactttctactaggagagccaatgaagactccactcttgactgaaagaatgtataattgcacagataagtggcaatattggttaacaatatttggtgaatatttcatatatatttttccccaaagaagcc

SEQ ID NO: 691793 - DNA, 610 bp, Homo sapiens
  misc_feature 422: n = A,T,C or G
caaataaacctccatgaagatggttctattcttagcacttaacctgttgtattttaggagatcaaatactgttcaactaattcaaatagagatcatcttagtggyattttaaaggtgatatgaaaacaagctataaaaagaaaaaaattagatgtatctttattctttatatccagaaagaaccatcttaatgttttggcatgtactgagacagagagagagagagagagagagagagagagagagagagagagagagacaggcagaaagacagatacagctagaaacattttataaaacagagatcatagattctatatatatataaaattaatctttctttcagatatgagaattttcccttgtcattatcttttgaaaaattttaaaaatgacttgatattttattatacgagcaacantttagtgattgccctatttggggtcatttacatttctccaacctgtttttttcctttgctattataaacacttcagtgaatatctttgaaatgtatcctcatccacatcttgaatcatccacatcttgagtcaatagaattgtagacatgtaattatggctttaaaaatggctcttaatgtatattat

SEQ ID NO: 691794 - DNA, 497 bp, Homo sapiens
gcctcagcctcccaaggagctgggactacaggcgcccgccactgcgcccggctaagttttttgtatttttagtagagacggggtttcaccgtggtctcgatctcgctgacctcgtgatccgcccgcctcggcctcccaaagtgctgggattacaggcgtgagccaccgcgcccggccgtcgtgggagctttttaaagggttttcagtcttatgaatagtctcagcaatattgaaagactaatatattaatagtaattattgcttcatgttaatcagcattccaaagataaggggtcaaaacaggttattaattataaatatctgtggctcctctggcctggaagtttctctgaatctgagtgaattagagtgtaatgagtgtcccctttgccttccctgcacttagtacatgtacctaccaagtattgagyactgaccattaaaattgtaattctcttcttttcttctcatttttattttttgtgatgctataacaa

SEQ ID NO: 691795 - DNA, 981 bp, Homo sapiens
caatactacatgcagaatgctaggcagagatttgctgcagaggaattaaaaaaaaaamaaaccacaccaccaacaaaacaacatttaccctgaggaaggaacactgagtatatctggaatgtttaggaacggcaaagaaataagtatggttgaagcccgctgagaagagacagcagtagtgacacattgtatgagttattgtacggactctaaatggaatggaaaaccatctcatgcaacatatgatggtaatggtataattccaagattgccagacatttaaacaagcataatgcccatttactgcacttaaatttggtagttataaaatatcaactggcagtataacatttgcaaattattaaatagcattgtgtgttcagttgctgtagctaagatctaagtatcagtagttaaaacaaagaaatgtttattttttctcttgcataaaagtctagacataagcaaactagggctgcaagacagttccatagtatcagggatccaagtcccttctgacttcttctctacaatctccagtatattgccctgtcaacatggtccagaatgaattatgaccagatcactactctagtgagtggaaaagataaaagggaaatggagggttatgcctttcctataagagtgcaaccaggcagttgtgcacctcatttttcctatccccattgaagattacttcagctaatgctactgaaagcaaagcaggaacatgtagtttctattctggttggccacgtgccaagttaaaattaggggttttattattaggctggtgcaaaaggaactaaggtttttgccattaaaagtaattaatgccattaaaagtaatggcaaaaaccgcaattctttttgcaccaatctgttactagagaaaaagcaggtaatggatgtttgacaattagtattgtctagtttaagcagattcaaataaccattttaatttaaaatgtattaagcatc

SEQ ID NO: 691796 - DNA, 981 bp, Homo sapiens
caatactacatgcagaatgctaggcagagatttgctgcagaggaattaaaaaaaaaacaaaccacaccaccaacaaaacaacatttacsctgaggaaggaacactgagtatatctggaatgtttaggaacggcaaagaaataagtatggttgaagcccgctgagaagagacagcagtagtgacacattgtatgagttattgtacggactctaaatggaatggaaaaccatctcatgcaacatatgatggtaatggtataattccaagattgccagacatttaaacaagcataatgcccatttactgcacttaaatttggtagttataaaatatcaactggcagtataacatttgcaaattattaaatagcattgtgtgttcagttgctgtagctaagatctaagtatcagtagttaaaacaaagaaatgtttattttttctcttgcataaaagtctagacataagcaaactagggctgcaagacagttccatagtatcagggatccaagtcccttctgacttcttctctacaatctccagtatattgccctgtcaacatggtccagaatgaattatgaccagatcactactctagtgagtggaaaagataaaagggaaatggagggttatgcctttcctataagagtgcaaccaggcagttgtgcacctcatttttcctatccccattgaagattacttcagctaatgctactgaaagcaaagcaggaacatgtagtttctattctggttggccacgtgccaagttaaaattaggggttttattattaggctggtgcaaaaggaactaaggtttttgccattaaaagtaattaatgccattaaaagtaatggcaaaaaccgcaattctttttgcaccaatctgttactagagaaaaagcaggtaatggatgtttgacaattagtattgtctagtttaagcagattcaaataaccattttaatttaaaatgtattaagcatc

SEQ ID NO: 691797 - DNA, 981 bp, Homo sapiens
caatactacatgcagaatgctaggcagagatttgctgcagaggaattaaaaaaaaaacaaaccacaccaccaacaaaacaacatttaccctgaggaaggaacactgagtatatctggaatgtttaggaacggcaaagaaataagtatggttgaagcccgctgagaagagacagcagtagtgacacattgtatgagttattgtacggactctaaatggaatggaaaaccatctcatgcaacatatgatggtaatggtataattccaagattgccagacatttaaacaagcataatgcccatttactgcacttaaatttggtagttataaaatatcaactggcagtataacatttgcaaattattaaatagcattgtgtgttcagttgctgtagctaagatctaagtatcagtagttaaaacaaagaaatgtttattttttctcttgcataaaagtctagacataagcaaactagggctgcaagacagttccatagtatcagggatccaagtcccttctgacttcttctctacaatctccagtatattgccctgtcaacatggtccagaatgaattatgaccagatcactactctagtgagtggaaaagataaaagggaaatggagggttatgcctttcctataagagtgcaaccaggcagttgtgcacctcatttttcctatccccattgaagattacttcagctaatgytactgaaagcaaagcaggaacatgtagtttctattctggttggccacgtgccaagttaaaattaggggttttattattaggctggtgcaaaaggaactaaggtttttgccattaaaagtaattaatgccattaaaagtaatggcaaaaaccgcaattctttttgcaccaatctgttactagagaaaaagcaggtaatggatgtttgacaattagtattgtctagtttaagcagattcaaataaccattttaatttaaaatgtattaagcatc

SEQ ID NO: 691798 - DNA, 981 bp, Homo sapiens
caatactacatgcagaatgctaggcagagatttgctgcagaggaattaaaaaaaaaacaaaccacaccaccaacaaaacaacatttaccctgaggaaggaacactgagtatatctggaatgtttaggaacggcaaagaaataagtatggttgaagcccgctgagaagagacagcagtagtgacacattgtatgagttattgtacggactctaaatggaatggaaaaccatctcatgcaacatatgatggtaatggtataattccaagattgccagacatttaaacaagcataatgcccatttactgcacttaaatttggtagttataaaatatcaactggcagtataacatttgcaaattattaaatagcattgtgtgttcagttgctgtagctaagatctaagtatcagtagttaaaacaaagaaatgtttattttttctcttgcataaaagtctagacataagcaaactagggctgcaagacagttccatagtatcagggatccaagtcccttctgacttcttctctacaatctccagtatattgccctgtcaacatggtccagaatgaattatgaccagatcactactctagtgagtggaaaagataaaagggaaatggagggttatgcctttcctataagagtgcaaccaggcagttgtgcacctcatttttcctatccccattgaagattacttcagctaatgctactgaaagcaaagcaggaacatgtagtttctattctggttggccacrtgccaagttaaaattaggggttttattattaggctggtgcaaaaggaactaaggtttttgccattaaaagtaattaatgccattaaaagtaatggcaaaaaccgcaattctttttgcaccaatctgttactagagaaaaagcaggtaatggatgtttgacaattagtattgtctagtttaagcagattcaaataaccattttaatttaaaatgtattaagcatc

SEQ ID NO: 691799 - DNA, 981 bp, Homo sapiens
caatactacatgcagaatgctaggcagagatttgctgcagaggaattaaaaaaaaaacaaaccacaccaccaacaaaacaacatttaccctgaggaaggaacactgagtatatctggaatgtttaggaacggcaaagaaataagtatggttgaagcccgctgagaagagacagcagtagtgacacattgtatgagttattgtacggactctaaatggaatggaaaaccatctcatgcaacatatgatggtaatggtataattccaagattgccagacatttaaacaagcataatgcccatttactgcacttaaatttggtagttataaaatatcaactggcagtataacatttgcaaattattaaatagcattgtgtgttcagttgctgtagctaagatctaagtatcagtagttaaaacaaagaaatgtttattttttctcttgcataaaagtctagacataagcaaactagggctgcaagacagttccatagtatcagggatccaagtcccttctgacttcttctctacaatctccagtatattgccctgtcaacatggtccagaatgaattatgaccagatcactactctagtgagtggaaaagataaaagggaaatggagggttatgcctttcctataagagtgcaaccaggcagttgtgcacctcatttttcctatccccattgaagattacttcagctaatgctactgaaagcaaagcaggaacatgtagtttctattctggttggccacgtgccaagttaaaattaggggttttattattaggctggtgcaaaaggaactaaggtttttgccattaaaagtaattaatgccattaaaagtaatggcaaaaaccgcaattctttttgcaccaatctgttactagagaaaaagcaggtaatggaygtttgacaattagtattgtctagtttaagcagattcaaataaccattttaatttaaaatgtattaagcatc

SEQ ID NO: 691800 - DNA, 2283 bp, Homo sapiens
ctagccttgtcactcttctttcccttccttgttccaggcttctggctccttgtctctcacccttacctgtgggagtgtaacgcccctgctaagagcagcacgcacatctctgagctcatggacccagcagtatcaatgcctttgctctctgaatctgctcttagtcctacccatcacacatgcacattccagttttgattcctactacagctttgtatgctgcttagcactgagggaagcaaggcagaccagccccatcagctacaacagtagaatcatccgtggcatccacaarttgatataggtgtagtcggttctctggcacatcacacacctgaacaaacactcacagaatgttctgaatattatgtttctgaccaagtgaagataaaggaaggaccaaaagcgacagaaaaagctacaaggtcaaaaaaaaaaagagatacaaaggcaaatggaaaaatacaatgatcattactttaagtattaaaagtaggagaaagcatttgtttgttttttattttgttttcaagaactcaaggattagagagttacagcatgaaaaagagctgagggatagtactaggtgacaagctgccttggggaaacactggagaagagacattctggtgtgaagagactataaagctcctaacaataggaggagctccatctaacttgcttttattttcttctttcttcaggtctccacttctacattcatgtaatggcaaaataactcaatccttggttttctgattaaagtgagaccattgagaacatttttgtcttgtctaaatctcttctactctctcctgttcttctacctattctctcaacttacatcccgtttcagagtaatatcttccttaattatttttagaatattcctttaagccttcttaaactttcattctttttatttttcatcagtttcctgtccttgtaattaacatcctttctcttcagaagcaagatctagtatgtgtccagtggagtaaagaatgtttcagtctaatacataaacaaccctattgtaaatatttgggaaactatattacgatcttgcataatatatactaagaaaaatttaatatatgtagaataaaagagatggaataaaaagagtaaatgctaagtacaagggaacattgtcacatttctcatgctctctctgccatgacgataacttcatgaatgtatttataatgaaggatggactgaataatgacccaaataaaattttaattttctttcattttaagtctattgagtagtttttatgctcagcccttaaaaaggataaaacagtgctttccattattcacaaaagaattacatttgtgtgaatgctattttgcaattattctatagacctctgctgtgacactcaaggagtttcaaatagtcaatacaaaatgggattttgaatgttgaggaagtcatataacaataagcagggttggttcagaaagaatattcattactgggagacattgaaaatgtgtttatggaagaattgatcacagagtcaaaactggtatttttcagtggaattggtacatttttcccattaaacttttaatgactcggatccgaagcatatttaattcatggatcactgctgcagtattgtgtcaacatgtacttagggagtcttcaatgtatggatcactgcagtgatagactgtaatggcccctcgtctatcaagttaacacatattatcatagaacactaatacaggggttattgataagatatttcatagcttataccttataagaaagtgttgtcagccccctaagattatcagtagtaaaagtaacaaaaaaacagaattactaagactttttagaaaaatagtatttacaaaacataagctttctccaatttcactctatgcttagatgatcatttcattttaacattgattatttactaaattctattttagtttattcatttacttatttatttattcgagacagggtctccctctgtcacccacgctggagtgaagtgatgcaatctcagctcatatttatttatttatttgagacagggtctccctctgtcacccaggctggagtacagtgatgccatctcagctcacagcaacctccgcatccggcactcaagtgatcctcccacctcagctgcctgagtagctgggactacagacatgccccaccatgcctggctaatttttgtattttttgtagagatgggattttgccatgttgtccaagttggtcttgaactcttggacttaggcaatccac

SEQ ID NO: 691801 - DNA, 637 bp, Homo sapiens
ggcagagttaagaagggaacaggccaggcacggtggctcaaacctgtattcccagcattttgggaggcccaggcaggcggaccacttgaggtcaggagttccagaccagcctggccaacatggtgaaaccctgtctctactaaaaattcaaaaattagccgggtgtggtggccagcgcctaaaatcccagctactcaggaggctgaggcaggagaatcgcttgaacctgggaggcagaggttgcagtgagccgagatcgcgccactgcactccagcctaggtgacagagtaagactccgtctcaagaaaaaaaagaggtggggacaggagtggaaacttgtcccagagaggtgaggctgcctcatcatgctttcattatctcattagtcttagcttacaaaacagaaattcaaagatacatttacgaatttytacacagtgaccacagagcattaaacccaagagcagggctcttctgaacacggggagctgtcgtctacattggtcagatgcccatgaagcgggattcagtaagggacccagtttgcagaggggctgggggatgaactgatccaagaatccagatgtcacatacctgaaggtagaggccaagggacacctacagtcccagaggacc

SEQ ID NO: 691802 - DNA, 637 bp, Homo sapiens
ggcagagttaagaagggaacaggccaggcacggtggctcaaacctgtattcccagcattttgggaggcccaggcaggcggaccacttgaggtcaggagttccagaccagcctggccaacatggtgaaaccctgtctctactaaaaattcaaaaattagccgggtgtggtggccagcgcctaaaatcccagctactcaggaggctgaggcaggagaatcgcttgaacctgggaggcagaggttgcagtgagccgagatcgcgccactgcactccagcctaggtgacagagtaagactccgtctcaagaaaaaaaagaggtggggacaggagtggaaacttgtcccagagaggtgaggctgcctcatcatgctttcattatctcattagtcttagcttacaaaacagaaattcaaagatacatttacgaatttctacacagtgaccacagagcattaaacccaagagcagggctcttytgaacacggggagctgtcgtctacattggtcagatgcccatgaagcgggattcagtaagggacccagtttgcagaggggctgggggatgaactgatccaagaatccagatgtcacatacctgaaggtagaggccaagggacacctacagtcccagaggacc

SEQ ID NO: 691803 - DNA, 1715 bp, Homo sapiens
aataatttggaacataagtaaaagattcttaaaataagatttttatatatgtaggaaagaagaggagttcaattaattcactttatttcaccataaatctgtaagatattcaaaaaggccttcagtgttgcaatgactgctggagtgtatttcttaaatacatttttctgggtggaaaaagtctttgtctcttagtcaaacaaataaatttgtcaagcagcatataatcgattaatattaatgacaatgttttgttgagtaaaatttttatattattggggtaacctctccctttaaacaaatggaatatattgaaaagctctattaactctttgaaaacatcagggtatcagtttttctattttccattttggccaaagttacttatttaatacatattgattaaatagctttcattttttaacatgttattatataggcacatgctattcaaacttgagaaattaattgcactgtgaaatagaagaaaaccatggactactatctaaagaaaartataaccaaataataaaaattacttggaatttcaacgctattaacttaggaaaacaaaaaatggtacaaacaatactacaacaaatctttaactgttttgttttgttttgttttgtttttgagacagagtctccctctgtcacccagtggcatgatctcagctcactgcaacctctgcctacctgttcaagcgactctcatgcctcagcctccctagtagctggaattacaggcatgcgccaccatgcccagctcatttttttgtatttttaatagatacagggtttcctcatgttggccaggctggtctgaaacttctggcctcaagtgatccacccaccttggcctcccaaagtgctgggattacaggcatgagctgccatacccagccccagtctttaacccttaaataaactcagaaccattagttctttaaaataggcattttttctaaatctttctatttctaattttattgattttttttttcaagaagaatggtaatgactttgctataactacctgcacatattgatgctgcatgtttttactggaaaatgagcttaatgtggacattgattaattttcatgttttgttctttgtaagtgaaatcataaacatacacccgtgcaggtgacagtacaagtgatcatattctattgccaacaaaaataaaatttaacaaattagaattccacaatttattttcccccaaaggtggttctaagaatgattcccagctttccagtaagagtacttttgcaccataggtttgggaatgtgctgagcaattttgtcttgggcaaatgtggaacatactttaaaatgagtacctagttttcagagaccaagtaagcatccaagaccatttgcatttgatgattactaactaaaaccactctaagtaagtgaaagctataataggcagaatttgaatagatctctttaatcaaaataatcctgaactcaatagcttaatttttaatttaaaaatttttcatctgccccatgcttcaagttcttcatttcagcctctccaatcctgttttctttaaatcatcaatttgagctaacctaatattctatgtcttctaagatttaatccctttatggtattttatttgtatacattttaggtgacgatagatgatgtcaaaaggaaaatattttctaattttatttttttgatttatttttt

SEQ ID NO: 691804 - DNA, 875 bp, Homo sapiens
cacaaaccctttctgttagtatcgtgttcacaaaggcaggagccatagcttatttatcagtgtttacaatctctggcattaggtcctcagccttcattctcatgttgtagaatttaaccatttgcattcaaaaatatctatgaaaatgtctatttatttagtcattcacaataggcaacatgaattcaatgtcaaagatgctgacttaatatcttcttaactttaattaatgcattctgtagggactctagcagagcagtaaagtataggggagcctgtatttgtcactctcctctaacaaatcttaatattaccctatatataatatgtttaaattgcagcatgatagcttatggagaaagctattctaggataaattaagaggtagcagatttaaccctggctatactaacaaatgtctgtatgacactaggaaagccatttaatatttccagctggcaatttgtctgtctctcttaatatgaatttagaacaggttatctctgaaagcccatccatatttatgtctcaatctataaaacacatatggttaaagtarctttggtaactaggattttgtctgttaaatgtctgatccagatagattacgaactgcccttgaaaaatggtactgtccaaaagaaaacatgtattctatgttaaatgtctttttactctcttatcattttaacacagtgaccaggcctggaagactgtgaaggtgaccaacattgtagcaaatattttgattaaaaaataagtaattttatgtttgcatttttgttttaggttggatgaacagtcagaatggcttttttttaatacttgacttctggtatttataaaatttatcgtggattttaattggcagtaaa

SEQ ID NO: 691805 - DNA, 640 bp, Homo sapiens
gactccatctcaggaaaaaaaaaaaaaaaaagtttgccaaaagtagcagctgagggtttgtactgtttataatagtgacatgaagaaggcttttattttattttatttattttattttatttatttattttttgagacggagtttcgctcttgttgcccaggctggagtgcaatggcgtgatctcagctcaccacaacctccacctcccaggttaaagtgattctcctgcctcagcctctctagtagctgggattacaggcatgtgccaccatacccggctaattttgtatttttagtagagacggggtttctccatgttggtcaggctggtcttgaactcctgacctcaggtgatccgcctgcctcagcctcccaaagtgctgggattacagscatgagccaccgcgcctggcctagaaggcttttattaatcagtggaagtagccatctccacctttgtccacactccagaaccttccttaggcagtcagttgtcctccttaacttgtttcccttcacagttatggcttgccctgaaagacagtgggtaggaagttaattttatgtttattattctttagaggcagaatcctgttacgttgcccggccgtagtgaaggctactcacaatcgcagtcac

SEQ ID NO: 691806 - DNA, 601 bp, Homo sapiens
gtatctcatgctgactgctgatgacaattcatgrcaaactaaagacccatagataatgttaaattcaatgacagcagtttctatttttttccttagagacagggttcttgctctgtcacccaggatggagtgcagtagcatgatcttagctcactgcagccttgacttctggggttcaagtggtcctcctgcctcagcctccccagtagctgggactagaggagcacaccaccatccccagctaaatgtttacattttaagtagtgatgggccagtctcattatattgcccaggctggtctcgaactcctggcctcaaatgatcctcctgcttcgacctcccaaagtgttgtgattacagctgtgaaccaccacacctggccagcagtgtttctctgtgccaagcttattagtaaatcttggtgctgtttcttcctctttcatgtaaaagctgcacctacattgttcctatttttatagccttttttagactgttacttcgattcagacttttccctgcttggcacatttagtttcttctgctttgaggccatcttcatgtgaccactcagaacctagggcaggccaagaggaagagagta

SEQ ID NO: 691807 - DNA, 465 bp, Homo sapiens
  misc_feature 405: n = A,T,C or G
aaaaaaaaaaaaaaagagtacagatatcacaggatacaaggacattaaataagatagaaaggagggagggaaagagggaaagaagagaccacatgtagacccgactgtgtttccaataatgtggaagcttaaatgttaggttagaatattatagatcatatgcattaaagcttcatactgcagacacttgtaaacagtaaattcctgaaagacctatgaagttggttgcagcagcaatatcagcacttgtcatttggcaagcttctttgaagctagccaatagataatagaggtcactatatacatacatatatatatgtatgtatacatayatatatatatatatgtatacatacatatatatatatatgtagagagagagaacagaataagagtaacaagagnaattttttttttttttttttttttgagagggagtcccactctgtcacccaggctggagta

SEQ ID NO: 691808 - DNA, 465 bp, Homo sapiens
  misc_feature 405: n = A,T,C or G
aaaaaaaaaaaaaaagagtacagatatcacaggatacaaggacattaaataagatagaaaggagggagggaaagagggaaagaagagaccacatgtagacccgactgtgtttccaataatgtggaagcttaaatgttaggttagaatattatagatcatatgcattaaagcttcatactgcagacacttgtaaacagtaaattcctgaaagacctatgaagttggttgcagcagcaatatcagcacttgtcatttggcaagcttctttgaagctagccaatagataatagaggtcactatatacatacatatatatatgtatgtatacatacatatatatatatatgtatrcatacatatatatatatatgtagagagagagaacagaataagagtaacaagagnaattttttttttttttttttttttgagagggagtcccactctgtcacccaggctggagta

SEQ ID NO: 691809 - DNA, 465 bp, Homo sapiens
  misc_feature 405: n = A,T,C or G
aaaaaaaaaaaaaaagagtacagatatcacaggatacaaggacattaaataagatagaaaggagggagggaaagagggaaagaagagaccacatgtagacccgactgtgtttccaataatgtggaagcttaaatgttaggttagaatattatagatcatatgcattaaagcttcatactgcagacacttgtaaacagtaaattcctgaaagacctatgaagttggttgcagcagcaatatcagcacttgtcatttggcaagcttctttgaagctagccaatagataatagaggtcactatatacatacatatatatatgtatgtatacatacatatatatatatatgtatayatacatatatatatatatgtagagagagagaacagaataagagtaacaagagnaattttttttttttttttttttttgagagggagtcccactctgtcacccaggctggagta

SEQ ID NO: 691810 - DNA, 664 bp, Homo sapiens
tgtgtgcattttagaaagaccgctcaggaaagcagattagaaagaaacctgtgtggaatgagagaattcacttggcaacccagtgcagtgcatctcagactatctgtcaagaaggactatttccccccaattcatcacatgccttacctgttaccttacctttatcacatacctgttatattttacttttgtaaaatagagcaaaattcactgggatgttgcagcaatgtcaaatcactacgaaagtttccaaacactcccaattacttagtcattgtggaccagtaacagtttgctgactgtcaccagttcgtcagtgacagcttgagtagcacaaccatagcatattcatggccccaagggagactcgagcatccaaaaataaagctaccttattttctgggacctagttgaatttctgacacctagcctgtgttcatcctgaaggagataaatctgctggttactactcagttacatctggtrtaattattctccttcaccttcttcatccccctctttctccctgctccactccagggaactcatgcacaccccagcccaatgttctgtgtggggaagggcttctcctttcactctttatctgcctctgccttgccctgccctgccctggatgcagcatgtcccttctggtcttctgcaa

SEQ ID NO: 691811 - DNA, 3336 bp, Homo sapiens
gggcaggagggatgcagaactggaagtggggagaggcactggagggagatgggatggagtgagagagggcaggaaggtgagaaggatgcctgcaggagggaagcaggggcagcatggggccctcggcagcccacagcttctttccttctcctcccaggaactccatcaaggtcccataaaactggggccggcacattggcctctcagatttggttactattcacttgcagaaaccacgtaacctataagaatgcattttattcctccacggcaaaggtattgtctgctggtaaaagctgcagagtagtagttattggaggtgcaaccggtttctgcaagttctgatatctggagacagatcagaaactaggagtcactgggagctgagtaacttgattattccacttcatgtggtttcaattatacatttatttatctcacagcattatttgtgcttctcatccttcaaacgtgatgtgtggagcagctgagaattttccgagaggagatctgagtgtgcttcttcctgcctgtcttccttcctttttaatgaatacaataattagtggctaaataaaattcgcccacaggataggtgcatacaactgcttcatgaattggcagatgacagtaacgggcagcaagcctggaaaacctatcacacaggctcagagcacctcttttgtcaacttatgacgaagaacatctataggctcaggaaagaaaattcagcagccagggagtgtggatgaatttcttaggtctggcagacaagatgtttatgtcacacacaggactgaaattctaagccgcaaagatatcaagcctgggcttggaggaagatctggagttttcttcatttacaaagtctgtgaatcctggattatcccacacttatccaagacacagggaagcaaaagacacaaggcttttcttatgaaaagcagaacaaggaagacttgggagtccaacaagtgaggttccaagacccagcctgcaggagtacggctagggctggaagttgttgcccatcccaccaagacttgtaggccaacccagtgtatccacactcagtctctcaatggcaaccactgatctttttttctgtccccatagttttgcctttcccagaatgtcatagagttgaaatcatccagccatgctctgggataattcttctgttataatcttcagattgtcaatttcattttcagctatattcagtcaatttatcagcacatctattgagattgtttttcctaatttggcaatcaagcatttaatacctttttttaaaaaacaatagagacagtggttcgctatgttgccatctcttctgatactcttcctcagcccccttgggcccctggtcctccagggaccacttatgctgcagcatctctgcaggtcaccctctctctcagcaaacgctgacctttccttttgcattccaggctctgacatgcatagcatgtggattttaatttcaggaatccatagctaagtttttttttggaggggacactggccagacacagatgcaaacaggcacaaaattgtgccagccccatggtggtttgtgggggatttggggactttgggggacccagtcttctagctctatttgcaatgcaaacacaaggtttctacctaaagggtattgtttagtggggctgacagaggttacaggagggatggtaaaagtcccccagccgccaagtggggtggtccctgttctgatgcaggattctgatagtgaccttgaatacagaggaggtgaccctctccttgctcctcaccttggtcagccacaccaacaactgctcaaagtgcatagggtatacagaggtctttcctcaacaatctgcgccatttggccaagtaggcaactagaatgaccactgaaaactcagaggaagagtgccaatttatagctctcattatagtgtaatgttatttccttaaaagtttgtgcacacatttaatgaactcataaaacttaaactatcagagtcttgtggtgaggaggcagggtacwgttcttgtaacttcacattctagcagctctgggttgaagccacccctgcagggctgggagctgggggcaggtgtgtgagtgactcccccagggggctcttcccaggccaggtgcccagacagtttccccatctgggctcaggacctgggctagcagggtgccaagcctccccaaggaggagactcttctccctccccatgcccataccccttcctgggcctcaggccctgattgctatggtcaggccggccactaaccaggctgcctccattccagctccacgtcccacacccaagggcccagctggcaatgctccatgaggcatgaccaggccatgcggggtcctggagaaatcttcatcttctgagccatgtggacctggtttcaaatcttgactctgcctccttctagctgcatgacctcaggcaagtcacatgccctgtctgagcctcagtttcctcatgtgtaagatggaaatatccaacgtgccaggttccttggaatgctgtatatcataataataaccattgatacttgagtgtttctgtggctggccgggtccaggctcattctgcacgcttgcagtaaatcaatcactgtgacaaattttgcaaaagagaagagagttatttccctcaagggcgccaagtgaggaggtgggagaacagccctcaaatcctcctgctggaagataaggcttaggggtatttacaggttaggggagcggggttctctaaggcttgggggaaaaggtgattggcagtggggaaatgaagcaacacattcattctgcacaagtgcagtcggggttcatggtatttcataggacatgtgtacagaaaacagcagtggtagcatgacctgagggggtaggttttggctctccgatgtcaaaaagccacctctcaggcacttgtgcaggcccagttgaagggtcagtggtctcaactggtttgaactggacaggagctgccccaagttcctgaaaaacaatggaagtgactatgaccttggtgaccgatgaatgttatctataaagtagccagtgaaggttaagtttcagcattcagtggtgaggccttcggctaccacagactttagcttcatggaaaaatgaaaaaaaaaataacaaaaagtgagtgagtggccaaaagcaagcgggccaggcagccccgatcaaattaaccccttggtttcatttcctctttgccaggtattattctaaatccattacatgtattaattcatacaatcccatgtcaatcctataagcaggtaccattattatcccgatttta

SEQ ID NO: 691812 - DNA, 657 bp, Homo sapiens
tgccttataattggagcttggcctcaaatgtcagcatttgttgctaggttttttgttttttttttttccctagatcagggtcatctaatagaactttctgtgatagtggagatattctactgaactgtccaatggtggccactagccacatgtagccattgactacttgaaatgtgaatatattaactgaaaaactgactttcagatgttatttacttttaattaatttaaattgaaatagccacatgtgactgtgtctactgttttgggcagcacagctccagataaattcatggccttttattcctttcttcaacttcggtctctttaaagtttctggcctggatatctaattctctgtttggagctggagagaagaagagaggccttcaccaatattgtgtatctgaatgatatgagcctgatggaaggggacaatggtatgtcartcctaactggttactcttggttgtcaatttttagaagttactccagacctctcaacaaaaaaatttggtgaacctttcaatgatcatatatttaatatgtgattccacttagttgtcacatttgtggagtttttgtttttgtttttgttttttacctatagcccttgatatgttatgaaatcacaattaagaataaactataggcaac

SEQ ID NO: 691813 - DNA, 1096 bp, Homo sapiens
ggggcatccgagcaagggatggggtttctgacagtgtcttaagggccaggatctgccaaggcctatgtcccacggtggggttgatgcaatccagggtagagggagccattggtcctcagtgagttctagtcctaggccccactgtacagaccaagtcagaaggaacagtccctcatcctacatgccacatccctccactgaagttgagagcagacccgttttccaaacatgaggtgactcgtggtttgaaatggatgacaaggggccggacattcctaaattggcaggataaaggtcattctgtggcatagaatgaggtgtggtttgaatctagaatctccagttaaaaccagtgaaggtggctgggtgcagtggctcatgtctgtcatcccagtactttgggaggctgaggcaggcagataacgaggtcatgattgtgagaccagcctggccaacatggtgaaaccccatctctactaaaaatacaaaaattaactgggtgtggtggtgtgtgcctgtaatcttagctactcaggaggctgggcaggagaattgcttgaacccaaaaagcggagccactgtaaatccagcctggtggacagagcgagactccatctcagaaacaaacaaacaagcaaagccaatgaaggtgtttaactcaaagtgtcacactcaggtctcctgacaggatacatccagcacccggggaaatgtcagggggtggggtggaaattattttgtggcctcaagggagggtttgagaggtagtcccacacaagtgrcggcctaagaaattcccttcgctcaagaagccatattcatttctagcctgtagccacccatgctggagaatcaggctctctacagaacccctcgtgaaatgggctctcgctccattcaataaaaatgggagaatctgtttcccagcaagcagccacaggttaaagatgatgccaagatcaaacaaacgtcccatctatgcgctccggacactcgcataaggagagcgtaaggttctactcacaccgtgtggttttgtaacctccaacgtgtgtgctggtgtgggacgctgtaaacagaggaggggaaagagtgg

SEQ ID NO: 691814 - DNA, 611 bp, Homo sapiens
ttcccattaacaggaggattatgttcaaatctgcatttttatttgactcactgaacaaaactrccagtttctagaaaggtgtcctttgatttgaatgccttaaggtcaggcaggccatgtaagtgtgttcagctgcgtgtccataactcaatagggtacgacagttactgtggggaacaaaaggggagctctctgcattaacaaccagaggtaccaaaacaaaactgatttaaaagtcttcattcatcaccaatttatgtcccctgtgctgtcacttttgtttcttacacatataaatataacactgaatatagttgccattaatagtaaaagttcatgacactggagagaactctgaccagaagataaggagtctaggcccaacttaaaagggccttgaagcccagggtgcacccaggaacaccttctggtacttgtgcctcctggaatcactgggttaatggaataagggcaaagtcctttctggcttgcagagacttaggagaatttatggaatgtaggagtagtagtctgcgagtaggtcatgttattttccaattccaccctgagaaataagttataataacagtttatataggctacatctgtca

SEQ ID NO: 691815 - DNA, 611 bp, Homo sapiens
ttcccattaacaggaggattatgttcaaatctgcatttttatttgactcactgaacaaaactgccagtttctagaaaggtgtcctttgatttgaatgccttaaggtcaggcaggccatgtaagtgtgttcagctgcgtgtccataactcaatagggtacgacagttactgtggggaacaaaaggggagctctctgcattaacaaccagaggtaccaaaacaaaactgatttaaaagtcttcattcatcaccaatttatgtcccctgtgctgtcacttttgtttcttacacatataaatataacactgaatatagttgccattaatagtaaaagttcatgacactggagagaactctgaccagaagataaggagtctaggcccaacttaaaagggccttgaagcccagggtgcacccaggaacaccttctggtacttgtgcctcctggaatcactgggttaatggaataagggcaaagtcctttctggcttgcagagwcttaggagaatttatggaatgtaggagtagtagtctgcgagtaggtcatgttattttccaattccaccctgagaaataagttataataacagtttatataggctacatctgtca

SEQ ID NO: 691816 - DNA, 1316 bp, Homo sapiens
tgtagcccaactcattacaggaggcagagacacgagtcgctgcagccaagcacatttctaaaaaaaaacaaaaaaaaacgaaaaaagaaaactctgatttctaataacatcttcaaactggtcatggggaataaagtccgggacggacccaggagagtacaaatgggtctgttcagatcctctttctttttgggtcagtgagtttagataacaccaggggccccacagcagccttgctgaagtcttgatggagacaaggaggctaacattcccagggcactgcaggcaatgctcagccacagctcttttagaacgttctgcagtctacagctcaacagggctgcctgtcctcctgtgtcccttacatgcgctgcccacctccagttgcccaggctccagacttccagcaatctctgactctttccttgctctctacatgaggttcctggggctgctatcacagatgaccacaaactggggggcttcaaaccacagatgtgtgttctctcccaggccagaagtgccctcttgcaaggcaaggctcccaatagcacccccaacaggacagagcccagtcctacgcatgcattaaggatggggctgacagggaggagccgtttctctagatgccaccagaaatgagatttaagcacagtagggagtaaagagagtgcctaatctcaagcccagccttctgtcctctggacaggaaggaaatctactcttcagaatcagtgactcgaagatgtggggaagggaccctgyagcctcacgggggcctgttgtgggctgtgcctggagatttcctggacaggacgtggctttgctgaggacccggaagtactgacacttgtgcctgtttgagcagcctggcatctgggtaccaagggctcagtcactaactggagcctccactttcctcttggagtggtttggaacagactgaagagtcagctgcccagccatggaatgggagaaacaaatgctgtgctacttccgagaatggatctttaaaccaagaacgctcaactcacgcctgctgaggctgtgccgtgtccaccacctgcctccctcctctccagttctaaccctacagcacatggcacttacagaagaaaggctccgactctgcgtgcttctgtgtcatatgcaaaaggagcccaggactggcaatgtgttatgtcctttaaccgcaccacggagcgtgtgagtgagggcgtcaacattagagcacaaaagtaaagcgggtagatacttatctccccatccccaaatttctctgcacatttagctggtcagagaaacaaaatgaaatt

SEQ ID NO: 691817 - DNA, 926 bp, Homo sapiens
ggtccatcattgactgaaacattgttatgagatacatcactttatatattttcagaaatgtcataagaattataaacatataaatataaatatttagtaaatataaacatttaataaataaaatttattaatttttgtataattttaaaatatttaagaaatacaattatttgctatatttgttttgggaaatttgtggaacttaatataatgagaagagtagtagtgataatagtggcaaattccagtgccattttttcccaggaaaacatatcttgacaaatactctacttctgcaggtggaaaaaagcctttggtttttgttgacttatcaaatatcagctctggtagcaaatttctactctactatttctactatttccagctctggcagaaatttctagttcaaaagagctaaactactttatcagatcataaactctttgtgatccctgccattgacccacaagaatcactttcactsttttctttcttattaggctattaacagaatcaaactatgactcaaagattagaaatatttatgccgacttgctgaataccaaataaatgtctaatttttgactgatgggtaattaatttccctcctttgttattaattttctgtagtttagtggattatgaaacgcatgcaaaggatgttacaaagctctcagttctaaaccgagtcatgcataaacacatatttttggtaacatattttaaaaatatgtatttctactttgataatggtgaagtgcttcagcaagtattcttgagtacctacataggccatgcaggaaatttaagatgtataaaattcaatttagctgctgtcaacaaacctataattgctagtataaacaagacacatgtagacagccttggaatgtgctataggaattcagaaaaggaggagcaagaat

SEQ ID NO: 691818 - DNA, 926 bp, Homo sapiens
ggtccatcattgactgaaacattgttatgagatacatcactttatatattttcagaaatgtcataagaattataaacatataaatataaatatttagtaaatataaacatttaataaataaaatttattaatttttgtataattttaaaatatttaagaaatacaattatttgctatatttgttttgggaaatttgtggaacttaatataatgagaagagtagtagtgataatagtggcaaattccagtgccattttttcccaggaaaacatatcttgacaaatactctacttctgcaggtggaaaaaagcctttggtttttgttgacttatcaaatatcagctctggtagcaaatttctactctactatttctactatttccagctctggcagaaatttctagttcaaaagagctaaactactttatcagatcataaactctttgtgatccctgccattgacccacaagaatcactttcactcttttctttcttattaggctmttaacagaatcaaactatgactcaaagattagaaatatttatgccgacttgctgaataccaaataaatgtctaatttttgactgatgggtaattaatttccctcctttgttattaattttctgtagtttagtggattatgaaacgcatgcaaaggatgttacaaagctctcagttctaaaccgagtcatgcataaacacatatttttggtaacatattttaaaaatatgtatttctactttgataatggtgaagtgcttcagcaagtattcttgagtacctacataggccatgcaggaaatttaagatgtataaaattcaatttagctgctgtcaacaaacctataattgctagtataaacaagacacatgtagacagccttggaatgtgctataggaattcagaaaaggaggagcaagaat

SEQ ID NO: 691819 - DNA, 617 bp, Homo sapiens
attttagaacagttcccagtctctttaggctttcttatcagtaaaacacagtactcagatttacatgaataaattacaggttttggaaagtaataggaattagataatgtagagatatgagctcatggagtttatggratagttatttttcattacttacagatttggctcacataattatctttcctcactttgcaccttatatattctcatttattagtgggtttcccaacaatcttcctgtttcttctcattatgtatattgcttcccagtggtgaaaatggtgttgaatgagaacaagcattgtcaactggtgatgttcattgctgtccgtagtctaagaaatgaggcagagatggatgctcaacatatgcttaatgctgagcccctcccccttcatctaaatgggttgcaacatcttccaaagttggaaaaccatccgagtcaaaacatatctactgcttgtttcctggtaaaaggggcactttgagagcagagccaccagaattaaggtatgttgaactatcagtatttttgaatttcttgagtaattgatactgaactgattcctttggatatggcacttacttcatagaggcttttcttgggatgggat

SEQ ID NO: 691820 - DNA, 617 bp, Homo sapiens
attttagaacagttcccagtctctttaggctttcttatcagtaaaacacagtactcagatttacatgaataaattacaggttttggaaagtaataggaattagataatgtagagatatgagctcatggagtttatggaatagttatttttcattacttacagatttggctcacataattatctttcctcactttgcaccttatatattctcatttattagtgggtttcccaacaatcttcctgtttcttctcattatgtatattgcttcccagtggtgaaaatggtgttgaatgagaacaagcattgtcaactggtgatgttcattgctgtccgtagtctaagaaatgaggcagagatggatgctcaacatatgcttaatgctgagcccctcccmcttcatctaaatgggttgcaacatcttccaaagttggaaaaccatccgagtcaaaacatatctactgcttgtttcctggtaaaaggggcactttgagagcagagccaccagaattaaggtatgttgaactatcagtatttttgaatttcttgagtaattgatactgaactgattcctttggatatggcacttacttcatagaggcttttcttgggatgggat

SEQ ID NO: 691821 - DNA, 1025 bp, Homo sapiens
taggaaaataatgatggctcaatttatttctataacgatagaaatcaagcaatgcttcctacttgctagtgtatatgtgtaaccattgattcaatatggaaaaacttagacttgtaaaattaagaagacatggcttgttttgaatatcctgataaactcaacaaatctctttctttcctttaaaaacctctacatgaataagtgaatgagatcttacagtcttaagtatgcccattcaaaaatccctctaggtggtaatactaaagatattaatatttggtttctatccagtgagaagattaaaattgataaaatcattataaaggcatatgttttacagagaccatgaaattaaagttgatgtggagtttgagtcaaaggaaaaaaatgcgcttatgatgcaagcataaaagttggtcaaaaataaggaaaaaagtattgcccttaaaacttttgtgaaaaatatacacttccaaataatatatggagctgttgaagtcacatgccttttgtatgtcttctccagtgttctattttacagagctcacaacttatctttacttaattttaaaaaattatacttaaaagatcaagtatgagaaagaaccgagtcgacaaaatatagcaatggtattgtttcccatatcttggcaatgagataagtcctgaagttactgcctgtgagaatgtattggtttttttttttgtttaaaaaaaaaaaccatacagatggtcttatcatattcaggaatgttggtggcattaagttttagttttagacactcattgctgagaataattatccctttggataaatattttctatccttaaacagttgatattttyttcatttcaaatccaggtaaactaacatacctattggatttgattcagatctataattcatttctgtccttcccatccataagagtgattagattaaattaatattgttccccatcccaaacagcattagggcattgatttgtaaatatcatcagaatgagattttatcatttgcaaa

SEQ ID NO: 691822 - DNA, 2394 bp, Homo sapiens
taggatctccatggctagataacaaaggtgccaattaatgctggttttaaagggaaacagcagggcccaccagtcatcttcccataagrcttataagaacaattaaatacgtaggctgacatttcatctttggcgtttacataatgcataccacagtgattgatcagaaggagctacagagatgtgacagactgacagagaataagggcagatgtcgcccatctttttcattatgatgactattttaacgaacagacctgctcatttctgcagtccattaaatcagctgacagtataaacatctgcaaaatagccctgggaattgggtttgtcaggtgaggacactttggttagcagggaggagatgagggattcctcaggggctgctacttctggggagaaacccacaagctgtcccgtacgggagaccttgcttttcttgacaccaggagctcaggatatagaaaagatttgtgccaccaaaatgacatacagccaagatcattttctgtccttttacattctttcagaattctctcctgtgtctggcctctcttcatttgctgagctctgaatgtgattcatggaataaccttgagcaaatgataacctctcctggcctcctgttttctcacctgtgaaatatggatccctgcgactctcagttccctctccccatggaataactctctctgaaaagcattttgatctccatagggaaaggtgttctatggcaacacagaattatatttgattctgcaccacccacaagttcaatttgtgtggtcccaacctgactccataaacaatctaagtttttcttggggtatgtgggtaggaacacctgagaggggaaaccattcatgtctcaacactagcagcattctgcattgttttcacccgcctttgtccttctaaaacagcgtttcttaactttggcactattggcattttgagatgaacaattctttgctgtggggggctgtcttgtgcattgtgggctgttaactagataccagtttgaccctctcctcctacctggagttatgaccagcaaaaatgtctccagacgtggccacatgtcctctgcgtgtgcagaatctctcctagttcagaagctctgctctaaaatgtgctgtgatagtcttcccagcaacttgggacagggaagtcttgaatctgggtctaggcttgggcgtatataaattagctggttgcttccagggtatgaagcaaatccaagaaagaaaaaaaataccgtttttatatttgagtgcagctagtttcatgatactctcctggcattttttttttcccacaagattgctactacttgtcatagtgatgagaaaaaacaagggatgctggattctgcaccctgagctttccttaaatgaagactaaaagatctattaggtctgtttgaagtctctgggttgaaaagcagacaccaagtcttgctgtatgagatacagtctcctcaactaatgatgttgtatgttttcttggaaaagcttcctgcttcacagttgtagcccattagttgattttgtatccagcaagcatacccattgattcttctctgttaagggtgtgatatgaaagcttgcactgtgctgggcaggcatagtctataaacatgatgtaatcattgtaattaagtcataaaacaatcagaaaggaccctggctaaaatgactaagagatgaaatattgcatctactacaggaggccaaagaacagaaaggtatttagaaatttggttaattattctgtctgctaactgaaaatactgggagtattttttgaaaagcataatgaaatgttattggaagaggatcccttatctgtaaagagtcaagtatttaagaattaatttttttaaatcaatattttaaagaattttaaattctcagacaaaatgccactgtcacaaatttgtttccactgagtgctgctttttgtattgtaatttgtaggacacgttgcctaaatggacagcctcgcttttccagaaaagagataagaaatcaggaggcaaaataaaaaaaaattctcctggcaatcacaagagattcttaaaaaatcacacactaatgtttgtgtgctaatcaattaattaaataatttattcacatccttttcagtacatccattcaacaactatcagctccaagggaacaggcctgctcaggtctgggaagcaggctctatgatgtgtacgtagagtctcaggtctcaggtactaggattgtatctagaagtattggctccggtgggcatgttctcctggttctttacagactatggatatgggaagggcatggctggagaaggagtagactaaggccttttaaagggcagggcctagaataaggaacccgtttgctcaaa

SEQ ID NO: 691823 - DNA, 2394 bp, Homo sapiens
taggatctccatggctagataacaaaggtgccaattaatgctggttttaaagggaaacagcagggcccaccagtcatcttcccataagacttataagaacaattaaatacgtaggctgacatttcatctttggcgtttacataatgcataccacagtgattgatcagaaggagctacagagatgtgacagactgacagagaataagggcagatgtygcccatctttttcattatgatgactattttaacgaacagacctgctcatttctgcagtccattaaatcagctgacagtataaacatctgcaaaatagccctgggaattgggtttgtcaggtgaggacactttggttagcagggaggagatgagggattcctcaggggctgctacttctggggagaaacccacaagctgtcccgtacgggagaccttgcttttcttgacaccaggagctcaggatatagaaaagatttgtgccaccaaaatgacatacagccaagatcattttctgtccttttacattctttcagaattctctcctgtgtctggcctctcttcatttgctgagctctgaatgtgattcatggaataaccttgagcaaatgataacctctcctggcctcctgttttctcacctgtgaaatatggatccctgcgactctcagttccctctccccatggaataactctctctgaaaagcattttgatctccatagggaaaggtgttctatggcaacacagaattatatttgattctgcaccacccacaagttcaatttgtgtggtcccaacctgactccataaacaatctaagtttttcttggggtatgtgggtaggaacacctgagaggggaaaccattcatgtctcaacactagcagcattctgcattgttttcacccgcctttgtccttctaaaacagcgtttcttaactttggcactattggcattttgagatgaacaattctttgctgtggggggctgtcttgtgcattgtgggctgttaactagataccagtttgaccctctcctcctacctggagttatgaccagcaaaaatgtctccagacgtggccacatgtcctctgcgtgtgcagaatctctcctagttcagaagctctgctctaaaatgtgctgtgatagtcttcccagcaacttgggacagggaagtcttgaatctgggtctaggcttgggcgtatataaattagctggttgcttccagggtatgaagcaaatccaagaaagaaaaaaaataccgtttttatatttgagtgcagctagtttcatgatactctcctggcattttttttttcccacaagattgctactacttgtcatagtgatgagaaaaaacaagggatgctggattctgcaccctgagctttccttaaatgaagactaaaagatctattaggtctgtttgaagtctctgggttgaaaagcagacaccaagtcttgctgtatgagatacagtctcctcaactaatgatgttgtatgttttcttggaaaagcttcctgcttcacagttgtagcccattagttgattttgtatccagcaagcatacccattgattcttctctgttaagggtgtgatatgaaagcttgcactgtgctgggcaggcatagtctataaacatgatgtaatcattgtaattaagtcataaaacaatcagaaaggaccctggctaaaatgactaagagatgaaatattgcatctactacaggaggccaaagaacagaaaggtatttagaaatttggttaattattctgtctgctaactgaaaatactgggagtattttttgaaaagcataatgaaatgttattggaagaggatcccttatctgtaaagagtcaagtatttaagaattaatttttttaaatcaatattttaaagaattttaaattctcagacaaaatgccactgtcacaaatttgtttccactgagtgctgctttttgtattgtaatttgtaggacacgttgcctaaatggacagcctcgcttttccagaaaagagataagaaatcaggaggcaaaataaaaaaaaattctcctggcaatcacaagagattcttaaaaaatcacacactaatgtttgtgtgctaatcaattaattaaataatttattcacatccttttcagtacatccattcaacaactatcagctccaagggaacaggcctgctcaggtctgggaagcaggctctatgatgtgtacgtagagtctcaggtctcaggtactaggattgtatctagaagtattggctccggtgggcatgttctcctggttctttacagactatggatatgggaagggcatggctggagaaggagtagactaaggccttttaaagggcagggcctagaataaggaacccgtttgctcaaa

SEQ ID NO: 691824 - DNA, 581 bp, Homo sapiens
ctaaaaacctttatcctgactgagatgtctaaaatttttactcattgccttacaaaagaaaatcattaattaattcaagttctgtaaattagatgtctaaatttgtattagggaaaagttcatctatatcatagggcacaacatatcacttwgcaattccctaataagcactctgttgtgcccacgggattttttaatctggacatttcctatatacaaacaattattcccctcttcatcaatgtatcccttcactgaacattacctgtatgtttagtttgaactgtataaaattgaaattttacagttaaatatttttcacaaacatagctagacctggttcttgtattcttaccctttcctatttcagtctactgtcaaagttccggatttctttttattttaacatattaattacaattttaaaaattaaaaagcatttcttgggattggagttttttacaaagaggagaaatttgcaaggatatataaaggcaaatataaatactataatttccagtaaaactttatcccaactgaattaatacattctataattatgaataagcattcattcttga

SEQ ID NO: 691825 - DNA, 1339 bp, Homo sapiens
caacagattcattttatgtacaattgctttttcttttcatgttaaacgcaaccgtatttttatattacatacactgccttggatagtcactgtatcctctaaggtttagcatagaataatgaggaaaatacattaaatatttcattataaatgagttaatattttttctatagttctatcctaaataagaaatgttttactattatcataaagttttattcttaacagttaaattgactttctatctttattcatgtttatttaaaaaacagattttgtgagagatattttacacctatgggtctatctttgattgaatcatgactttttatatctaccttttttcttgatacactttctacaaaaacactactcttaaaatatttgtcactttacaatctctatgtaattatctagatttatccatgagggctgctcttagatgtcttaattaattatttccttaaaaaataattcgttacttgctacatgtcagccctttgcaaggtattgaaataaaagagacatgactcattataaaagacattacagtttaatgccttttaaacaacactttaaagacattaacgtgtaacattaatgtaacacctaccctaccaatggtagtagggtagatgttactttttgcaacagaggctgcaatttttcaacagaacaaactacacaaaatattaaaggtgccagtaaatattttatatatatatatctatactcacatatgtatatattatatacatacatattatattatatatgtatttatctgtgtgtgtgtgagtgtgtgtgtgtgcatgtgttagttgggttgcaaaatgtggatcagcatagcctttatggagagttgaaattagacagattcccggacaataataaggtatcatttagatggatgataggtgaaaattcattgtaggtaaataaaccaaggggagcaaaggcagtgtggtattaaagggtcgttcatatttaatacaatggagragtgagtgaattatttacgatagacaatgcgcagataagtgcttggcaggagctgcatttaaaggaccaccaatggacagaccctctgcaaaccatataggatcccgttgactctaacatatcttttcaaattttgtcaggtagactgatgtgctagttttaaagcaattggttcccagctccaacaccatgcttctgtaacctgctttggtaaactgacacagggaatctgcaaaccacattgtttcttttcatgctgaatttatgtaagtatacgccaacagtaagtagcagactgagactgtaagactggaaaaggaagacgggatttacactt

SEQ ID NO: 691826 - DNA, 1339 bp, Homo sapiens
caacagattcattttatgtacaattgctttttcttttcatgttaaacgcaaccgtatttttatattacatacactgccttggatagtcactgtatcctctaaggtttagcatagaataatgaggaaaatacattaaatatttcattataaatgagttaatattttttctatagttctatcctaaataagaaatgttttactattatcataaagttttattcttaacagttaaattgactttctatctttattcatgtttatttaaaaaacagattttgtgagagatattttacacctatgggtctatctttgattgaatcatgactttttatatctaccttttttcttgatacactttctacaaaaacactactcttaaaatatttgtcactttacaatctctatgtaattatctagatttatccatgagggctgctcttagatgtcttaattaattatttccttaaaaaataattcgttacttgctacatgtcagccctttgcaaggtattgaaataaaagagacatgactcattataaaagacattacagtttaatgccttttaaacaacactttaaagacattaacgtgtaacattaatgtaacacctaccctaccaatggtagtagggtagatgttactttttgcaacagaggctgcaatttttcaacagaacaaactacacaaaatattaaaggtgccagtaaatattttatatatatatatctatactcacatatgtatatattatatacatacatattatattatatatgtatttatctgtgtgtgtgtgagtgtgtgtgtgtgcatgtgttagttgggttgcaaaatgtggatcagcatagcctttatggagagttgaaattagacagattcccggacaataataaggtatcatttagatggatgataggtgaaaattcattgtaggtaaataaaccaaggggagcaaaggcagtgtggtattaaagggtcgttcatatttaatacaatggagaagtgagtgaattatttacgatagacaatgcgcagataagtgcttggcaggagctgcatttaaaggaccaccaatggacagaccctctgcaaaccatataggatcccgttgactctaacatatcttttcaaattttgtcaggtagactgatgtgctagttttaaagcaattggttcccagctccaacaccatgcttctgtaacctgctttggtaaactgacacagggaatctgcaaaccacattgtttcttttcatgctgaatttatgtaagtatacrccaacagtaagtagcagactgagactgtaagactggaaaaggaagacgggatttacactt

SEQ ID NO: 691827 - DNA, 875 bp, Homo sapiens
tgatttaaacaaaagtggaaatcatgacatgaagagaactctatgttagtaagtcagaaagcaagggtttctgaaattctctatcctttcacttgattggacagtaatggcgaattatttaatataatagattttttcaacatgtttagtattatttcaagaaagatgttaagtctctacatttaagccacacccagttcagcatttctaagactgtacttaaaggccttcctaagatagaggtaaccaccttgcgttgtaaaaataattccatcagtgttataaaattatttgtaatgatttcaacctactcctcttttaatagctttttctaaaatacaaacaaactaacaaagatgcattccactatggtcaacttctataagtatctatggagtactgtaagatctaagttttgagtatctgtatgtcagcaaattaaataactaattgataaatgatctttcaaaataaaatggcacaaattttgtatataatataaagtctctgaattttaagggccatcaaataacaattttacattgggatgatgctcaattgaaaacagtagtgccacagtcaacattctaaattgctgcatattctgagtcagtatccaaccttaataggacagtgacattctaaattgatacctwataattacaactaattagaagtaaaattaattttactagcctaaagtcatagttgccaatcaaggtttcaagagtaactgctaacattgagatggactgtcataatctctgcaagtcaaggtctgccatctgctgtaccaagagcaaactaacttgaaatttgattaaaatgaagtgagtctcactgaaagattttacattaaaccttcccacataaaa

SEQ ID NO: 691828 - DNA, 875 bp, Homo sapiens
tgatttaaacaaaagtggaaatcatgacatgaagagaactctatgttagtaagtcagaaagcaagggtttctgaaattctctatcctttcacttgattggacagtaatggcgaattatttaatataatagattttttcaacatgtttagtattatttcaagaaagatgttaagtctctacatttaagccacacccagttcagcatttctaagactgtacttaaaggccttcctaagatagaggtaaccaccttgcgttgtaaaaataattccatcagtgttataaaattatttgtaatgatttcaacctactcctcttttaatagctttttctaaaatacaaacaaactaacaaagatgcattccactatggtcaacttctataagtatctatggagtactgtaagatctaagttttgagtatctgtatgtcagcaaattaaataactaattgataaatgatctttcaaaataaaatggcacaaattttgtatataatataaagtctctgaattttaagggccatcaaataacaattttacattgggatgatgctcaattgaaaacagtagtgccacagtcaacattctaaattgctgcatattctgagtcagtatccaaccttaataggacagtgacattctaaattgataccttataattacaactaattagaagtaaaattaattttactagcctaaagtcatagttgccaatcaaggtttcaagagtaactgctaacattgaratggactgtcataatctctgcaagtcaaggtctgccatctgctgtaccaagagcaaactaacttgaaatttgattaaaatgaagtgagtctcactgaaagattttacattaaaccttcccacataaaa

SEQ ID NO: 691829 - DNA, 636 bp, Homo sapiens
acaacaaaaacaacacctaaaattctactattaattttacaccactgacagctagattttgcaactaatttttcagacaggtagactttcttcataaaaagcaatcaccaatgagaaggttacatagttcactcatatccaggaacttaatctgtttagtawccttagactcacttactcaattattctcagtcatgagtcgcaatgggatgacttcccaccagcctccagatgctataattatatttatcttctttacatctaattacatagcatactattttactttcccactgttcattaaaaaaatttctagctgtggcatactgaatgccttagagaataaagagatgttaatagtcctaaagatgtatttctggacttctagcatttactcaaattaacatgctttcatgatgatatggtatttaatgtagcccactattggcaagaaataaatagtattagtcaattgtacttcaatcaaatgggtaaattaatggtatttttggtattcttagtcatgcctcttacaaaggtgtagagtaagtcctactaaaacgtaaagaaatagttgatacatttttgtcacaaccccaaatagacacaaacttttttcaattattgtgtttgaga

SEQ ID NO: 691830 - DNA, 636 bp, Homo sapiens
acaacaaaaacaacacctaaaattctactattaattttacaccactgacagctagattttgcaactaatttttcagacaggtagactttcttcataaaaagcaatcaccaatgagaaggttacatagttcactcatatccaggaacttaatctgtttagtaaccttaractcacttactcaattattctcagtcatgagtcgcaatgggatgacttcccaccagcctccagatgctataattatatttatcttctttacatctaattacatagcatactattttactttcccactgttcattaaaaaaatttctagctgtggcatactgaatgccttagagaataaagagatgttaatagtcctaaagatgtatttctggacttctagcatttactcaaattaacatgctttcatgatgatatggtatttaatgtagcccactattggcaagaaataaatagtattagtcaattgtacttcaatcaaatgggtaaattaatggtatttttggtattcttagtcatgcctcttacaaaggtgtagagtaagtcctactaaaacgtaaagaaatagttgatacatttttgtcacaaccccaaatagacacaaacttttttcaattattgtgtttgaga

SEQ ID NO: 691831 - DNA, 630 bp, Homo sapiens
tactatgcatttcatgcgtgtatcaaaatgtctcatgcaacctgcaaagatacacacctactgtgtaccttcaaaaattaaaaaaatatatatttttaaaaagagcacatgtatttctataataacaattttagagagctagataaatctaaaggaagcatgcttgcagaaaataatacttgttttgaaattccttataaacctttactataatttcagtgcaaatcttaatctttcacctttagtttttgtttccctttggaaacctattcaacaaatatttattgaagacctgttataaccctatcattttgctttgtcttacaattataggtgaacaagacaatcaggatttctaccctacaaagtgttaaggaagacagaaaataagcaaatyaatacacaacacattgagataagggccacgatgaaaatgtaaacaagtggatgtcataggaagagtggaagaagtccttcatgttgggagtttagggaatagatatttcagaagatgtggtttaaggtgaatgagagagtaagctagctatgagaagcatgtcatagagaaagtgtattagtgcattctcacactactaataaagacacacctgagactgggtaatctataaa

SEQ ID NO: 691832 - DNA, 630 bp, Homo sapiens
tactatgcatttcatgcgtgtatcaaaatgtctcatgcaacctgcaaagatacacacctactgtgtaccttcaaaaattaaaaaaatatatatttttaaaaagagcacatgtatttctataataacaattttagagagctagataaatctaaaggaagcatgcttgcagaaaataatacttgttttgaaattccttataaacctttactataatttcagtgcaaatcttaatctttcacctttagtttttgtttccctttggaaacctattcaacaaatatttattgaagacctgttataaccctatcattttgctttgtcttacaattataggtgaacaagacaatcaggatttctaccctacaaagtgttaaggaagacagaaaataagcaaatcaatacacaacacattgagataagggccacgatgaaaatgtaaacaagtggatgtcataggaagagtggaagaagtccttcatgttgggagtttagggaatagatatttcagaagatgtggtttaaggtgaatgagagagtaagctagctatgagaagcatgtcayagagaaagtgtattagtgcattctcacactactaataaagacacacctgagactgggtaatctataaa

SEQ ID NO: 691833 - DNA, 621 bp, Homo sapiens
tctaaatgtttagcttctgcaataaaatattttgtctcactttctttcttttttaaaataatgtttaggaattttttctaacaatttttccttcggatggaggttattatttgtacctgcttgtcttaatattaactatatgcatcactagtctattgactcttaaatacaataaatctaatggtaagtagtcaattgacatcacagactttatacatacaacagggcataaaaagggtataagatgtgtcaactattaatatgcattaaatatagttaaatatttgataattcagtatagacatatgcatataaataaaactttattgttgatttgaaaagtctagaaagcttccaaataatattttataatctgttggtagcaaaaacttaaatttggaaggattcttagctttttaacacaccggtttatcgttacacaaatctagaccattgacattcaagagaaagcaaaaatccaatccagaaaattgaaggatggcaataaaacaatacaagagataaaagaagaaayggtcatttatcacgggaaattcagcccccaatatttcatgtgggtccttttctattttccctaagtgtcagcctgtctgagaaata

SEQ ID NO: 691834 - DNA, 617 bp, Homo sapiens
taacgagcatgtctcagctcagactgaaattcaactgtgttaacatgaccgtgcccatagggtgaactaatggcaatgcgtgggttctgctaaaaggccaccagccatgtggcttacctttttcactgattttttttttacattttttaaagatgacttttttttttttaaacagcgtatatgtacaaaggttttaaatccctaacaaagatatatattcttttaaaaatcggtcattttacttgcgtcccatttttgagatgctgatgttgcatctttaraatttctcttgatattccggcatttattttaggccaacatgttcttcatacgaataggggtgctgatgaaatgcacgaaatattttgagggcataagaaacaagaaaaattgggtcatctactctcagagtgtttttctcactgtgcataaagaaggtaaatataaccatacaaaaattcttgctgtgactttatgcttcaataccatagatatgtagtttatcacctgaaaagtacgtaattgtacagtttatattatctctgcattttagttccagtagcttgggatgtcttgtcctgtttgataaaataattaaaatgtcttttttctaacta

SEQ ID NO: 691835 - DNA, 671 bp, Homo sapiens
acttgctctccaagctctgtagttctggtctctttacctctgaattgtgataaacccaatctatctcttaatagacaagcaagattagcagatgttcttcattaaaatgtactgacctgtgctcacggcagctaaattctggtgtctttgcagattgctttcccacaccccagtgcgcttatgcactctccaggagagctgcatctacaaattcttctcctatacttttaaattcattttgtacttactattgcaattatattttaaatgttatactaatataaatctgaaaaaatatgagtgtgaatgaaactgtgtccatgtaaatcagtttaaatgttctggaacagctgttgaaatactaggggactggaaaataaaataggtaaaattttagatgaattctctcatcaaactgcttcccaagtatctttgcaattcttcttcctctttaaagaaatttaaaagggacacaatgtatgatgtatttaggtagggcaaraaaggcaaaatgaaactcctagaagcagaatgatacttaaagaatatatctgggttcccaaaaaaagatagatgaaaaaaaaaaaaaaacacacgttcaggtacttagtgttcaaatccttatttaagttatgtatgtatttttgtcttttcctttaaatgtttctcca

SEQ ID NO: 691836 - DNA, 1503 bp, Homo sapiens
tatttgtttcccggggctgctgtaataaatgaccacaaagtgggtggctgaaaacaacagaaatgtattctcttgcagctcaggaggccagacgtcctaaatgaagttgtcagcggggcctgctccstttgaattctccacaggaaaattcctccttgcctcctccaattcccggtgggcccaggcactctttggcttgtgctagtgtaactccaatttctgccttctgtcttctctcctgtctattataaggacacttgtcattggcatgtagggtccacccagataacccaggatgatctcgccttgaaatctttaattacatctataaacccttttttccaaataaggtcatattcccaggttccagaggttaggatgtgggcatgtcatggtgtgactacaccatctcacgggacggggagtgggcaaagctccctgctcccgtgtctatggtgagaggcaaggttctgcatccccccagcactgcacactacagagttgagtagaaaatgccgtgagatattaaagccaaaataaaccaagattgcaatcacagcactagtgccaaagcctaccatataacacaggagagataaaagagagcacaggagacgaatcctacatgggacacaagaaaagcttcgtgacacaagctgaaccttcgaagatacttgggtgtgttaggtggtgtagaggagaaaggaaattccaggcagagagggaacagacaagcaaaaagcatgaaggtatcaaatgtccaaagcattcagggaatttcaagcccggatggaagagcagtggcactagataaggagcttgtgctgaaatataaatccaggaagtcactatgcgaattcttttttgtttgtttgtttgtgtttctttgatcactgcaagagtttctccatgatagaagcaacacattgatttagataaggagcttgtgctggaatataaatccacgaagtcactatgcggattccttttctggtggttttgtttttttgtttgtttgtttctttgatcactgcaagagtttctccataatagaagcaacacattgatttagaaaaggagcttgtgctggaatataaatccacgaagtcactctgcggattcctttttctttgatttctttgatcactgcaagagtttctctccatgatagaaacaacacgttgatttacactctggtgcaaagtcctcctctcgttgtcacagagaagtcattggctggctacttcaaatggtgctggcagagcacagggtgtgaattgggggtgggacatcatgagcaaagatgcagatcagattgtggggggctttaggcgacatgctcaggtatttggactttctctttagagctggagagtgatacaatggtgacacagagggtgacttttaggacttgagtgtgacggcacggagcattggagattggagaccattatattatctgtttccccaaactcagttctttattccagtattggtttattt

SEQ ID NO: 691837 - DNA, 1503 bp, Homo sapiens
tatttgtttcccggggctgctgtaataaatgaccacaaagtgggtggctgaaaacaacagaaatgtattctcttgcagctcaggaggccagacgtcctaaatgaagttgtcagcggggcctgctccctttgaattctccacaggaaaattcctccttgcctcctccaattcccggtgggcccaggcactctttggcttgtgctagtgtaactccaatttctgccttctgtcttctctcctgtctattataaggacacttgtcattggcatgtagggtccacccagataacccaggatgatctcgccttgaaatctttaattacatctataaacccttttttccaaataaggtcatattcccaggttccagaggttaggatgtgggcatgtcatggtgtgactacaccatctcacgggacggggagtgggcaaagctccctgctcccgtgtctatggtgagaggcaaggttctgcatccccccagcactgcacactacagagttgagtagaaaatgccgtgagatattaaagccaaaataaaccaagattgcaatcacagcactagtgccaaagcctaccatataacacaggagagataaaagagagcacaggagacgaatcctacatgggacacaagaaaagcttcgtgacacaagctgaaccttcgaagatacttgggtgtgttaggtggtgtagaggagaaaggaaattccaggcagagagggaacagacaagcaaaaagcatgaaggtatcaaatgtccaaagcattcagggaatttcaagcccggatggaagagcagtggcactagataaggagcttgtgctgaaatataaatccaggaagtcactatgcgaattcttttttgtttgtttgtttgtgtttctttgatcactgcaagagtttctccatgatagaagcaacacattgatttagataaggagcttgtgctggaatataaatccacgaagtcactatgcggattccttttctggtggttttgtttttttgtttgtttgtttctttgatcactgcaagagtttctccataatagaagcaacacattgatttagaaaaggagcttgtgctggaatataaatccacraagtcactctgcggattcctttttctttgatttctttgatcactgcaagagtttctctccatgatagaaacaacacgttgatttacactctggtgcaaagtcctcctctcgttgtcacagagaagtcattggctggctacttcaaatggtgctggcagagcacagggtgtgaattgggggtgggacatcatgagcaaagatgcagatcagattgtggggggctttaggcgacatgctcaggtatttggactttctctttagagctggagagtgatacaatggtgacacagagggtgacttttaggacttgagtgtgacggcacggagcattggagattggagaccattatattatctgtttccccaaactcagttctttattccagtattggtttattt

SEQ ID NO: 691838 - DNA, 1744 bp, Homo sapiens
tatcctaatgtagacaatttgtgaacacttaaggtttctgattatattttttctggcttagtaacttcccatcttaacatactgtcagtttaatcttattttggttataatacataccatatagctgggactacaggcatgcaccaccatgccaggctattttatttgtgtagagtcgggatctcaccatgttgcccaggctggtcttgaactcttggcttcagacaatcctgcctccacctccgaaagcgttgggattacagacatgaggcactgtgctaggccaggattggttctttttaatgaatgggttttagaacgaagagggatgtaaaaaggacttagggaaaccgtcattaaaagaaagatactaaccagtgcctttttgtttttaattaattaattattattattttttttgatatggagtctcttgtcacccaggctggagtgcagtggcgcaatcggctcactgcaacctgtgcctcctgggttcaagccattctcttgcttcagcctccggaatagctgggattacaggcgcccgccaccatgcctggctaattttttttttttttgagatggaatcttgttctgttcctcaggctggagtgcagtggcgcgatcttggctcactgcagcctccgcctcccgggtccaagcaattctctgcctcagcctcccgagtaggtgggactacaggcgcgtgccaccatgcctggctaattttttgtatttttagtagagatggggtttcactgtgttagccaggatggtcttgatctcctgacctcaggtgatccaccctcctcggccccccaaagtgctgggattacaggcgtaagccactgcacctggcctaatttttgtatttttagtagagatggggtttcgccatgttggccaggctggtcttgaactcctgacttcaggtgacctacctgccttggcctcccaaattgctgggattatagacgtgagtcattgcaccctgcccataaataaaagttttaatggaactcagccatatccatccctttgcttattgtctctggttgcttttgtagttcaagagcaaaggtgagtagctgtgacagaaaccataaggtctgtaaaatctaaaatgtttacccgctaacattttgtagaaaaaagctttcctctcctagaacaatcttggatttttttttcatctgtaaaatgagtttycttaatttttttttttttgagacagtttcactcttgtcacccaggctggagtgcaatggtgcaatctcagttcactgcaacctccctctgccttctgggttcaagccattcgcctacctcaccttcttgagtagctgggattacaggtgcgcgccaccattcctggataatttttttttttttttgtatttttagtagagatgaggtttcaccatgttggccagcctggtcctgaacttgtgacctcaggcgatccgtccgactcgacctcccaaagtgctgggattacaggcgtgagccaccgcatctgccaatatattcaccagttttgttattaatttttgaagtcttaaaaaatttttaattgtaaaatacacataaaatttaccatcttaaccctttttaagggtacaagtttagtagagcttaagaacagttacattgttgtgcaccagtctctaaaacttcatttttgcaaaagcaaaatatattacattttgcttatccatgtatcagcggacacaagttgcttcca

SEQ ID NO: 691839 - DNA, 654 bp, Homo sapiens
cagcataaggtttatatctttaccacctacactgctttctactttattatatgattcataatagtttctattacaaactaagttctcaataaatgcaggcatgcattgtaatattgcaggtttagtttcagaacactgcagttaaacaactattccaataaagcaaatcatacaatttttttttggtttcccactgcatgtaaaagttatgtttatcgtatttgtagtttattaagtgtgcaatcgcattatgtattataaaaatgaacagaccttaaataaaaactgctttattgttaaaaaaattctatttgatgatctgagccttctgcaaatcataatctttttgtcagtagwgggtctttccttgatgttgatgactgctaactgaacaagctagtggttgctgaaggtgggtgtggctgtgacagtttcttaaaataagagagaaataaagtttgccacattaactggcaattcctttcacaaaattttatccatagcatgcactgctgtttgagagcattttctccacaatagaccttctttcaaaatgggagtttcttctctcaaatcctacttctttatcaactaagtttatgtaatattcgaaatcctttgttgtcacgtcaacagtgtttacagcatgttagc

SEQ ID NO: 691840 - DNA, 613 bp, Homo sapiens
ccagttgtgataaaggaaaataacttggcttattactgtaaaaataagttccatacaaatgttgacatttggtggattactacctcacatagtgtgttttgttcactttctccctgaacttggagcattagtttcatttgagccagtgattgagtgtgactttataagggaatgcattctaatactgcagaaggctctgtctttatttatgactctgtgtcagggtaagaatgatggtcctggctctatttggacctgcacagctgtgagtggagtgacccatggcagcacaaacagcccgtcatttcaatgaattatttaaggctcttacacttcccttcaagtagctggatcatggtggcaccacatacagagaacaagttagtrtttccttagagaaatgcagcttttgttgaaagagagtctgaagagaagagattcagcagggcttcttcaactgctggttgaggaaagaatgtagtttgttactgaagggtgatggagattgggatcaactttctcaacccagctgctgactgctgaggtgaaaacagcagagataaaacatttgctccagtttctcttcagactctgtgaagatccccatcccctg

SEQ ID NO: 691841 - DNA, 664 bp, Homo sapiens
attatctagtttaacttttttgaatggagagattttataggctggcaacgggagcttctgacttttcttctgcatgagcactgatgatggagggagtgactgtgtttgagtgaattttaggtagaagaaagggagcctggtaacaacaaactgtgagactggttgtattacgttacttgttaatccttctgaaggagagataccagggcctctgccctgcatccttccatgctagaaatattcatagttggaggaagcaagaaatgcagccyttgagcacgttggatttttttttaactattgattttgaaaaaaaaattgtttttgtaattatgagtaccaggaaaaaaaagtaaatgagaagagagatgtatagcagattaaatatgtggctgcctttttgacttgtgtaacatcagatatcccactccaccttcatttttaaataaacctctctgtttcttgccctttcagctaatcagaacttttctcctgctctcccctgttgtctcaggatttaggaagagagctgatgggattgggctgggcctaggaaggattgacagcacctctaagggtttgctcctgaggagagaataacttgcctcttgctcctcttcaagcctcagacgggagctcacccccagcctagcagttaacattg

SEQ ID NO: 691842 - DNA, 569 bp, Homo sapiens
tggagttaagctctcctcttaaaagatacaggctggctaaaaggataaaaaacataatccgactacgtgctgcccacaaaaaatgcactttccctgtaaagagacatacagactgaaagttaaagcatggaaaaagatattccatgcaaatagaaaccaaatgagcagagagaacaaaaggattagaaaatctatttagtggccaggcacggtggctcatgcttgtaatcccagcactttggaaagctgagatgggtggatcacctgaggtcaggagctcaagaccagcctggccaacatggtgaaaccctgtctctaccaaaaatgcaaaaaattagctgggcatggtrgcagatggctataatcccagctacttgggaggctgaggcaggatcacttgaacccaggaggcggagcatgcagtgagccaagattgcgccactgcactccagcctggcagcggcgtgatctccgctcactacaacctctgcattccaggttcaagcgattcttctgcctcaggctcctgagtagctatacttagataaaacagactttaagtcaaaaat

SEQ ID NO: 691843 - DNA, 569 bp, Homo sapiens
tggagttaagctctcctcttaaaagatacaggctggctaaaaggataaaaaacataatccgactacgtgctgcccacaaaaaatgcactttccctgtaaagagacatacagactgaaagttaaagcatggaaaaagatattccatgcaaatagaaaccaaatgagcagagagaacaaaaggattagaaaatctatttagtggccaggcacggtggctcatgcttgtaatcccagcactttggaaagctgagatgggtggatcacctgaggtcaggagctcaagaccagcctggccaacatggtgaaaccctgtctctaccaaaaatgcaaaaaattagctgggcatggtagcagatggctataatcccagctacttgggaggctgaggcaggatcacttgaacccaggaggcggagcatgcagtgagccragattgcgccactgcactccagcctggcagcggcgtgatctccgctcactacaacctctgcattccaggttcaagcgattcttctgcctcaggctcctgagtagctatacttagataaaacagactttaagtcaaaaat

SEQ ID NO: 691844 - DNA, 491 bp, Homo sapiens
tcatataaaaatactacagaagaaaacaataaagttcttagacaatcacagttccccctcaactattttacaataaaagatgattctagcatattcattcaatgtccaatgcaagttcttttttttttkttttttgagatggagtctcgctctgtcatccaggctggaggagtacagtgatgtgatctcagctcactgcaacctccacctcatgggttcaagcaattctcctccctcaatctcctgagtaactgggattacaggcacacaccaccatgcccagctcaatttttgtatttttagtggagatggggtttcgccatgttggccaggctagtcttgaactcctgacctcaggtgatctacccaccttggcctcccaacgtgccgggattataggcgtgagccaccgagcccagcccaaagttcttaatatgtaatattcaactaccaagcacatataagacaatgtgtttgttctaattaatggg

SEQ ID NO: 691845 - DNA, 588 bp, Homo sapiens
tataccatggattattactcagtaaycaaaaaggagaactacctaatactaacaataatatagatgaactacctaatactaacaataatatagatgaatctcaaatacattatgctaagtaaaagatgtcagactcaaaatactaaatactagatgatttcatttatatgacatactggaaaagacaaaaccattgagataaaaaccaatcagtgatcaccaaaattgtcagcagggcaatgggttgactgtagaggtgcaaagggggtattttggggtaatgatcctgttctgtatcttatgaatggtattggttagacaacaatacacatttatcaaaacttgcagcattgtacgtgagaaagaatgaattttgctgaatttaaaatatggacttcattaaaataccaaaaatagaaaaaaatgcaataaaaaagcattgcctcgctgctctatcttcttgtaagagaacacactgaaactttgaggccagtaagtagtctagcactaagacaaggaaattctgaagaaattcatgtaagcagtcataagcaacggcctgatctctgcaaaccagctcacactgca

SEQ ID NO: 691846 - DNA, 1388 bp, Homo sapiens
tgactctagctttggtatagtattggcatcaaacagtagtttgagaagcactgtatgatctacataagtgtgtcctctccaccaaggaccactcccctctcaaataaacatacaatcctagtaaaagctgtgtgcttgctgtgaaaatacagctggagaacaagcttccctatctgcaatcacactatactgaataagcctctgtactacagaaattctaaagcttcccagcctgcctttggaatcccggaccggtagcctggccattaaaatatttctttattttatggagtatttttactctacgtcttttctggccaatcattcagttagaaatcacatttcatggcaggacagggcaaggatttctgatggaatttttactatccaaatgatacaacacactttttttccctctccaaacactgttaatgagtatrtcagtgctggggtacaaaatctcctcatgaatattctatgttggttttggtttttgtttttatgctaggggatatcatcttcacagtctagcaccgtttttgacatttttaatcttctttccagaaacagagttgcaagattgatagcagagacataaccatggtgttttatgtgtcatgacacctttcatttacccttagtctaagaaaatatgagacatggaaaaaaagcatgtcttccattttcttcataacatatttttattgcaatctggctgagaacttccgtgtttgagtatgaaaaattacgtggccatatttatgggctctaggtgtgacagtcaataaactttgcttttataaatggcacaacagataggcagaaatttctatcatgtttttttaataactttgtgtagactagctatcaaattattgattaaatcctcaatttagaatgtgagagaaattatattaccctctacaattaactctttttctatcttaaaattggatattttaatgaaaataaaaagaaagggagcacatttaaatttataaaaattacaaatggttaaatagatgaggcaagaatgtacataggtatataatttttctgttgctttacctgggaaaaatataaaagtatatcactattgaaatcctcggagggaaaaaaccttaaaatccgagtagacagaataattttgacatttttttaagaaaaaaaaattgatttttcagagacttcaaggcatcctctgtatcaattgcaatcaacagggactgaaaaaaaaatctggggtaataaaagcagttagagaactgccctttgggcactccttcccctggagagcataattgcctttgacagagataactaatattccacatatttcccctaatcaggatgcctaaaatcattttagtcttgagaagagaaaacct

SEQ ID NO: 691847 - DNA, 1388 bp, Homo sapiens
tgactctagctttggtatagtattggcatcaaacagtagtttgagaagcactgtatgatctacataagtgtgtcctctccaccaaggaccactcccctctcaaataaacatacaatcctagtaaaagctgtgtgcttgctgtgaaaatacagctggagaacaagcttccctatctgcaatcacactatactgaataagcctctgtactacagaaattctaaagcttcccagcctgcctttggaatcccggaccggtagcctggccattaaaatatttctttattttatggagtatttttactctacgtcttttctggccaatcattcagttagaaatcacatttcatggcaggacagggcaaggatttctgatggaatttttactatccaaatgatacaacacactttttttccctctccaaacactgttaatgagtatgtcagtgctggggtacaaaatctcctcatgaatattctatgttggttttggtttttgtttttatgctaggggatatcatcttcacagtctagcaccgtttttgacatttttaatcttctttccagaaacagagttgcaagattgatagcagagacataaccatggtgttttatgtgtcatgacacctttcatttacccttagtctaagaaaatatgagacatggaaaaaaagcatgtcttccattttcttcataacatatttttattgcaatctggctgagaacttccgtgtttgagtatgaaaaattacgtggccatatttatgggctctaggtgtgacagtcaataaactttgcttttataaatggcacaacagataggcagaaatttctatcatgtttttttaataactttgtgtagactagctatcaaattattgattaaatcctcaatttagaatgtragagaaattatattaccctctacaattaactctttttctatcttaaaattggatattttaatgaaaataaaaagaaagggagcacatttaaatttataaaaattacaaatggttaaatagatgaggcaagaatgtacataggtatataatttttctgttgctttacctgggaaaaatataaaagtatatcactattgaaatcctcggagggaaaaaaccttaaaatccgagtagacagaataattttgacatttttttaagaaaaaaaaattgatttttcagagacttcaaggcatcctctgtatcaattgcaatcaacagggactgaaaaaaaaatctggggtaataaaagcagttagagaactgccctttgggcactccttcccctggagagcataattgcctttgacagagataactaatattccacatatttcccctaatcaggatgcctaaaatcattttagtcttgagaagagaaaacct

SEQ ID NO: 691848 - DNA, 1842 bp, Homo sapiens
catcaaggaagggaatttaaacagtcaataccccttgaaaagtagtcttctttcagtaatacttattttaagttgccatgacttaaatagttttgcctctggtctagatgtcatttcaaacaggaagaaacagaacaacaaaaaacaatcaggaactttaaaaaattactgaagaaacatttcaaactcaagaggagagtttgggcacagatacgcagataagtatgtattattgctaagttttgatcgcacagacaaaaccaagcccaggtgctcaaaataatccagtgatgaaaatgatctagattttcaattctaagatgatacatcatggcaaatataggaaaaagatagcatttatggatgagttacttatattaatccatagctgtcactatgcattaagtatgattgatatctcccttgtacattttaggaarcaagcacaggctaatctgcagatgaagtagtgtttagcatgtacctggatagaaatgagcagctttcaacagtgcctaatttgagccattctgagcatctgaatactgaatgtcatacccatgtatggaattctcacttcagttatctctaataattcctacagggattttttttatcttgaactgtttaaaaacaaagttatgaaaattttacgcatacacacatttctcagatcagtttccagttcctcctcattaaagaaatagagattggcttagatctaaatgtcttctctccctctttccctccctctctctatgatgtatgactcactatttttacgtctcacaatgctttattttcaatttaatacacttctcttcatgtttcagtgacacagtggaaactggccagatgttaaataataacattctcttttcctagttacatagcagcactacagtttttagctttccttgtacttaagtagggaccatataactcatccccaaagaatgcggatggaaataatgtgagcttcttccaggccttgccacaaaaaccattcatgagattatccacacatctttcctcttctactgccatttttaaaagatgtcagcatcataagatggaaagatcttggccctgagtcattatttaaagcaggaactgcctgaactgcatagatataaactttgtgtaaaaccaatatttggaggggtgtttatgatagcagtcagcatcattatcctgcataatcaaaatgttaaggtcattgaaagatatcataacccaggcggccgggcgcagtagctcacacctgtaatcccagcactttgggaggccgaggcgggcggatcacgaggtcaggagatcaagaccattctggctaacacaatgaaaccccgtctccactaaaaatacaaaaaattagccaggagtggtggtgggcgcctgtagtcctagctacttgggaggctgaggcaggagaatggcgtgaacttgggaggtggaggttgcagtgagccgagatcgtgccaccgcactccagccagggtgacagagtgagactccatctcaaaaaaaaaaaaaataaaataaataaaaataaaataaataaataaataaataaataaaaggtatcataacccaatatcattctgtcactggcctacaatggatgtctgaattttctataactactcacaactttggttgcaatcttcagaatcagtgtcaatacattatggccaaaaggtaattcactaaatgattaatatcttaccagtatgtgacagaaataacaccaacttaaactcacaaggtctgagctatagaataacccatttagagaagaacatgaatgacctgattgaactgaaaaacacagcacaagaa

SEQ ID NO: 691849 - DNA, 600 bp, Homo sapiens
  misc_feature 50: n = A,T,C or G
catttcattttgggcagtttattaaaattactatttaagtttgcctaccnagtttatggttcctcagcttctcctccaggtaagcagatctcagctatgactatctggatttccctttctctccagattttaggcttgctgtttaccctgtgacctcagttatctgatgggtccaagaaaagttaattgactttcaatttccttagctttctgttattgtaaagacaggagtgattacttataagcatttacatgttgaacctgaacctttaagttgagtctatgctttacaaaatataacgtattttattttgtatttgaagccactatatgygtgcaccaacatcaaaagatgattatgatttcaaatgcttcagaatttaggaattttgaggagagtgacattgtttcaattttctcttccaagggcattttcaagtgtttgtcctaaaacatgaaaatcgcctttggagcctgttaaaaataaattattgagccctttctccataacaatgaggcgtaatttctttgaatggaggccagaaatacgtatattaacaagcccaccaactaatacctacatataggcaagctaagaaa

SEQ ID NO: 691850 - DNA, 600 bp, Homo sapiens
  misc_feature 50: n = A,T,C or G
catttcattttgggcagtttattaaaattactatttaagtttgcctaccnagtttatggttcctcagcttctcctccaggtaagcagatctcagctatgactatctggatttccctttctctccagattttaggcttgctgtttaccctgtgacctcagttatctgatgggtccaagaaaagttaattgactttcaatttccttagctttctgttattgtaaagacaggagtgattacttataagcatttacatgttgaacctgaacctttaagttgagtctatgctttacaaaatataacgtattttattttgtatttgaagccactatatgtgtgcaccaacatcaaaagatgattatgatttcaaatgcttcagaatttaggaattttgaggagagtgacattgtttcaattttctcttccaagggcattttcaagtgtttgtcctaaaacatgaaaatcgcctttggagcctgttaaaaataaattattgagccctttctccataacaatgaggcrtaatttctttgaatggaggccagaaatacgtatattaacaagcccaccaactaatacctacatataggcaagctaagaaa

SEQ ID NO: 691851 - DNA, 1188 bp, Homo sapiens
ttctcctgcttcagcctcccgagtagctgggaccacaggtgcccgccaccacgcccagctaattttttgtatttttagtagagacagggtttcaccgtgctagccaggatggtctcgatctcctgaccttgtgatctgcccgccttggcctcccaaagtgctgggattacaggcgtgagccaccgtgcccggcctacttcaaaggattttcacaggggattaaataagctaacacatgaggaagagcaggacacaacaataagtgctagtttttctttccatttcttttttttcctgtttctttattaattgagacatagtctcgctctgttgccaccatgcctggctgatttttgtatttttagtaaagacagggtttcaccatgttggccagggtggtcttgaactcctggcttctggtgatctgcccacctcagcctcccaaagtgttgggattataggcatgagccatcgtgcctggccttttccttccatttctatatgcactgtttcactaagagtcaattgagaggcggaaaaccactgagacaaataccattaaactaatattcaagttgaattggagccaagacaccttttctggctatcctcagtttgaccttgtctgctttagacctgctaaagctaaaataactggcgtctggctatgactatgcctgcgaattttagaggaacctatgtctactgtcccaatgagaggctgcagctcagttacccacagctaaagcgcaaggctgcttagcaggtctgtgtatgctttgttggtctacaataaaagagacttaagtaatgctcagttgttaattgatatctcctaaaatagctaattcaagttgcaaaatgttatttgatttctctctcrgtgttctcctggcttcttttattcaggaagcaaggaggctacattggggaatggtgactttggtttgtgcgggcactctttttaaatcgtgggatgagaacatcacccagtgagaaagcccctgggctggtaatcagcacagagagcttagtcaggactataacccatcagtcagaaaaatatttgcctgggaagagagatactaccgtgagagcttcattcacttttatcgtggtcgctggggtctctgaggtaagtctgttatggcatgatatggtctggatatgtgtcccctccaaatctca

SEQ ID NO: 691852 - DNA, 573 bp, Homo sapiens
cttcaccaccactcctgtgcctgacggattcctagtcattgaactgacaccgcaggcagcttgtggtctttatgggaagtgctgctgctgtcacttttacttaatttgaatgtcattaatattgaattcttcaaaatgaagaggtaaaaaccaaaatgaatttcacaaacattgctyttaaaaaaatttaagagagaaatgtttcactgcaaatgcacatattttagcattgttttgaaatgcccttttgaaggcaccatgtttttttcatgtgtaaaaacctacttccccagaaaattgaaaaccaggtgcattgctggtgggaatgtcaagtgatacaccccctgtggaaaacagtatggtggttcctcaaaaaattaaacacagaattgtcatttaatccaacaattcaacttgtaggtatatacacacacacacacacacacacacacacacacaaacacacacacacaaactgaaagcaggaactcaagatatttgtatgctcatgtacatagcagcattattcataacagtcaaacaggcataaaccaaatgcctgtggatgcatga

SEQ ID NO: 691853 - DNA, 573 bp, Homo sapiens
cttcaccaccactcctgtgcctgacggattcctagtcattgaactgacaccgcaggcagcttgtggtctttatgggaagtgctgctgctgtcacttttacttaatttgaatgtcattaatattgaattcttcaaaatgaagaggtaaaaaccaaaatgaatttcacaaacattgctcttaaaaaaatttaagagagaaatgtttcactgcaaatgcacatattttagcattgttttgaaatgcccttttgaaggcaccatgtttttttcatgtgtaaaaacctacttccccagaaaattgaaaaccaggtgcattgctggtgggaatgtcaagtgatacaccccctgtggaaaacagtatggtggttcctcaaaaaattaaacacagaattgtcatttaatccaacaattcaacttgtaggtatatrcacacacacacacacacacacacacacacacaaacacacacacacaaactgaaagcaggaactcaagatatttgtatgctcatgtacatagcagcattattcataacagtcaaacaggcataaaccaaatgcctgtggatgcatga

SEQ ID NO: 691854 - DNA, 573 bp, Homo sapiens
cttcaccaccactcctgtgcctgacggattcctagtcattgaactgacaccgcaggcagcttgtggtctttatgggaagtgctgctgctgtcacttttacttaatttgaatgtcattaatattgaattcttcaaaatgaagaggtaaaaaccaaaatgaatttcacaaacattgctcttaaaaaaatttaagagagaaatgtttcactgcaaatgcacatattttagcattgttttgaaatgcccttttgaaggcaccatgtttttttcatgtgtaaaaacctacttccccagaaaattgaaaaccaggtgcattgctggtgggaatgtcaagtgatacaccccctgtggaaaacagtatggtggttcctcaaaaaattaaacacagaattgtcatttaatccaacaattcaacttgtaggtatatayacacacacacacacacacacacacacacacaaacacacacacacaaactgaaagcaggaactcaagatatttgtatgctcatgtacatagcagcattattcataacagtcaaacaggcataaaccaaatgcctgtggatgcatga

SEQ ID NO: 691855 - DNA, 573 bp, Homo sapiens
cttcaccaccactcctgtgcctgacggattcctagtcattgaactgacaccgcaggcagcttgtggtctttatgggaagtgctgctgctgtcacttttacttaatttgaatgtcattaatattgaattcttcaaaatgaagaggtaaaaaccaaaatgaatttcacaaacattgctcttaaaaaaatttaagagagaaatgtttcactgcaaatgcacatattttagcattgttttgaaatgcccttttgaaggcaccatgtttttttcatgtgtaaaaacctacttccccagaaaattgaaaaccaggtgcattgctggtgggaatgtcaagtgatacaccccctgtggaaaacagtatggtggttcctcaaaaaattaaacacagaattgtcatttaatccaacaattcaacttgtaggtatatacayacacacacacacacacacacacacacacaaacacacacacacaaactgaaagcaggaactcaagatatttgtatgctcatgtacatagcagcattattcataacagtcaaacaggcataaaccaaatgcctgtggatgcatga

SEQ ID NO: 691856 - DNA, 602 bp, Homo sapiens
tggaactgcccagttctcactcacatttcatttaacaggctaaccttggtctttctattgttaccatcaccagggaaatttatactatgtctaattatggtccagaaaatatacattctaactggtttttcttctttgagaagctatgtgctcctgaactgctcaggagtttattgttacagtcacctttgtttccaacggggaaaatttgatgtatttgttcttttaagagcttcttttgtaaaattatagtatgtggcaccttttgtggcttaataaaagatgtggagaaaaaatgaaatttattctaagaacataactatattgttaaatactttgctrttggtaaaatatgtttgatcctgataggtaaggcgttcctggaactatatctaatggactcctacctgtctcttattctcattctcacttttaacttttaatctcttttcaactaccaacattaatgtttacggatgtatattaaaatatactctgggcttggaatcaagagtcttaggtaccagcattaggtatattaccaagtagctaactgaactaaaaacaataatttggcattcctgtgcttcagtctttccatc

SEQ ID NO: 691857 - DNA, 621 bp, Homo sapiens
tattattttaacaacacaaagctgttttatagtcacaatgtctttaaayagatgctatcttataaacatttcaaaaacccatacaactcaaattcaaccagtcctctgccaagagggtatctggggcactgttgccttaacaacactaaccccattctcaggaggcagctctattaactgctcctgctaccacattccacagagaggtattagcagggatattgctttccctgagttcctcttcatgaggttgatgaggcctcaagagaaacaaaaaaatctcaacaggagaataggaataacagggctaaaaaaccctatcacctgtcttttccgctaagaatgcagacagcacaaccttcagcagcgttttttttttaagcacatgcagcatatttagaactcagctgtgtcacatcagacttactggtgggaagtggatcatgaacagaatccaaaaataacagccattaaagacctagcaaccaaaacatgtttacgtatccattgaaagcctagtggttttgattatatagtggagagcataatccactagtctattctgggtgaattttcctttcaccttcccttaatattaaggcacaggacaatttctgagtt

SEQ ID NO: 691858 - DNA, 647 bp, Homo sapiens
gaactgcttctgtgtgccctgttttcatcccaagatttctcacttcatcctctcctacctggctcttttgtcccagggaggggtcctgttcggaagcagtggctgaatttatcccctgaaagtggttttggaggaaccgggatggaggaggccttcccctgtgggaatagaatcgtccactcctagccctggttgcttctgatacacagccactgcacacacacactcacactcacactcccttgtctgatgccccaaagccaattcctggggcaccctaccctctcttatttggagtttccgttggtttacctgagttttctctggggtctgcacagaggcagcagcatggacatcatggcctctcaggtcccttttggttctcagtttcattggttcctctttctgttcccccattgacttctgtgccccaccctagccttttccataaccttaggtattcagtttggaggggttttttgtatttttgaggattcctgtattctgtatcctctcctcgcatctcctcacrtggaaagaaataatgtatttgtgccttctgtgaggaatggggggaacaagtggtcccaggtatccccatttccaaggcccccctccctctccaggtccccccacagcaataaaag

SEQ ID NO: 691859 - DNA, 632 bp, Homo sapiens
ccaaggacttgcttgatctccatatatatgcacgcctctggggctgtcatgtggggagggttggagacattttccttgctacagtaaggtcagaaactgttagcaaaagaatgtcctaggtatcagttacttgcctttaaggcccggctcaaaagagttttcctcaggctaaatggcctctctcctctgtacatccatagctctgatcaatctgcctggtgttagatgtactgttgtaacagaaatgttaattcttctgtgtttagagtcctgtcttcttcaaagcagggccttcatctttgaatatataatgcttagcactgccaaatatgcggtagatactcaagaagtatttctcaagttgcaytggctttcatatgtcacatctttaaatagtgattatctaggcttacagttttgtctcttccataaccacaagctaagagcattaaaggatgagggcaagtgccattccgctggagtgactgggaccaggtcagactttatctctgtaggtttggaatacataacattagagggcctgaaatactttctaaaaacaggtgggctgagtcagataaaatataaagtaccacatactagaaaattccctctcctcttatccagattgt

SEQ ID NO: 691860 - DNA, 561 bp, Homo sapiens
acaaagggcacaaactctaatcacaggggaaagtaacggacgttgaagaaactagattgaagttgacaaagcagtgaaactagatacacctggacctgtttcttggccagagatttactgtttttatgtcttggtctcaggccaaaaatttgtcctaaaattagagcagggcactgggttcacaggtggctgctacgaacatttccagggccagagtgactggagccacaggaacagggaatcacagagaaacaaaaaactaagggcacaagccgcagtgggtgagacttgatgagcaaggcagttttctgacctagttcaggcttcccctttactttcctgtgtggcaggaatcaatcccagcacagctggactcaggctcatagatggaagcttgcaatttgaagcacctggccaaggcagcytgcaccgagcagggacacagctgtagctttttgtaagtgagtcctctcatgggtaggggtagggggatcacattaaaaaataaataaaagctactgcaaagatggatatagcagacctctctatattattaaacac

SEQ ID NO: 691861 - DNA, 517 bp, Homo sapiens
taactatatcatttcagaagaggaactggaagcagccaccagagttgaacctgtaagcaaggtggcagttctgaacatcagcaggagctactatgcatgatttgagattattcaaaagccagcatgcaccttcacacccttctcaaagtagggtgtggtaccggctggctgagaaaatagattagcagtcaataatacacttttaaaagaataactatttttccaaaggggaaaaaacatgatttagtctcttttttccaccctatcagggtattgactacttgcattttttggtaatcattagtcattttactgcaaaaatgaagaggtacaaaaatacaatgtaggaaagagagaagagaaaagaaaaggaagatttcaaattcagaagaatacatctggaagcatttatttagttgatccattgatgaaagaaaaaagtcaattgatttcacaaggcaaaattggggctactttactagtgtatttcccagcmgttgacttgataatgattttt

SEQ ID NO: 691862 - DNA, 644 bp, Homo sapiens
  misc_feature 603: n = A,T,C or G
aggctaaaaaatgcacaaaacaaccaaatgaaacctcaaattagatggaaaatggctcagatgggtcccaatctctgggagttctagttaagcaagcaaacaaaatgggctgggataaatgattattgtaactcaggaagattagaagaaaatgtaattagctccccagctacttcttgttccccagcctttttaagagtgtscaacgccccacccgtgaatgtacccaaggcttccttatacacaccaaaaagtccccactgcaacgctgggagggttaacagagctggtaccccagcctgccagctcaccaaaggagagagcggtgaggctcagagcccgccccctgccaagccgcccagccaatgggcacctgtggggagtgtggcgctgtgtcccattggctgccaacctacatgcataagaaagaaagagagaggcaggcagggcagcattgttatcttaagacactcatctggtgtctgagtctgcaggtgacactgcttaggtacggagcgcggagtcggagcggggacgcgccgggctgcagctctgggatgcaatcgcctgcctcgcaagctgctcgccgctgcgctggcgctnatacgctgagctcggaggatccattaggacttgccggggat

SEQ ID NO: 691863 - DNA, 860 bp, Homo sapiens
ttggaagctcctgacttaaaccacacataaacccacagtagaggccttcattagacaagactgagtgggtagaactacacatggccaatgtaaaacccatccattttctgatgtcaaaacccctttattttccgcatcgtgttcttgattttaaagtatcatcttaagaaaatagaaaacaagcccaccttccccatcaagtggcctattagttgcaaaatacaagagacagtgttcctttctacctctttccacaagtcctcaggtgagggcctctttgcctgaatgtttctaagataatggctcaagttccttgcgcacaggtcattgtctaaggaggtcagaactaacttgagtctgagaagagatggatgggacaccacagtacatatgtttctcccaccgtgtttcctaccagtcaggataatcatagctcaggagggctgttagggtaccagccacatctgtctgtttgcattctggctccaacccctagttttcctaaagcaaaattcttattagttaggagtcaaggatcaccgagccttttccccataaagagctattttgtttgttgttgttggtttttgttttgttttgttttttgagagagggtcttgctttgttacccaggccggagtgcagtggtgcgaatatggctcactgcagcctctaccgcctaggctcaagttatcctcctgcctcagccacccrtgtacctgggaccacagtctcgtgccaccatgccgagataattttttaatttttttgtagcgatgagttctcactttgttggccaggccgttctcgaactcctggtctcaaacgatccttccaaagtgctgggattacaggtgtga

SEQ ID NO: 691864 - DNA, 580 bp, Homo sapiens
atcctaagggaagagtcatgggaaagccagcctataaagttcmagggtcaaggttaaacaccacacttgatctcagtgcctgcttgggtctcttacaagcctactctccttttctttctttcctgttctaaagccttttaaataaacttccactcctgctctgaaatttgtttcggtctccttttctgccttatacctctcagttgaattctttcttctgaggaggtaagaattgaagttgctgcagacccatacagatttgccaccagtaactcagataccttccaccagtaacataatggcctccagctccatccgtattcttgcaaaggacatgctctcatcaatggaagactagataaagaaaatgtggtacatatactccatggaatactatgcagcccttgtagttttgcattactcttagctttccgtatctgtaaagcattcagtaaagctacatcaattgtcaggccatgagccatccagcttctttctctttggagaccagatgtcccaaattatcatcacagtctcatggattaagaacagcagatagctgggcacagtggcccatgcc

SEQ ID NO: 691865 - DNA, 673 bp, Homo sapiens
tttctgcttttaaaaaaaagaaacttaaaaaaaaaacctagtagattccagtgagaaacaaaagtacttgcatatcagtgtttcttagaaaaaaagaattagattcagtgtgctacaggataaaaaagataaaacttacttttttataattatatgtttaataattataaacatttttatatgttttataattattagtgtcttttcccatatattattttatgtattagtaagtaataaagtcatcaaaaggggcatacatatgtacattattttaatgtttatgttttggacactcactgctttaatttttatatagtcaaatctatctatatctatatgtctatctatctacctatcatctatctatctgtctatcacaarcaggttctcagtctgtcactgagactgcaatgtagtggcatgatcatggttcactgcagcctcaaactcctgggctcaagcagtcctcctacctcattctcctgagtacctaggatgacagacacatgccaccacactcagctaattaaaaaaaaaaaattgtagagacacagttttgctatgttgccaagtctggcctcaaactcctgacttcaagctctcctcccccattggcctcccaaagcattaggatcacaggcatgaaccaccatgcctggctcaacgtaac

SEQ ID NO: 691866 - DNA, 647 bp, Homo sapiens
tccagctgctgaggctggaataagagatcctttttatattgtgtattcccatattctatctatgatagcacatatatacactagggatttaatggatactgttgaattaattagccattttgaaggaagctaaaaaagtgttcaacatccagagtggtcagcttaggtcaatcggcctagaatgatgccttaaggtattcttgtttggggctataatatgctgtacaccaggtataacatgatctttgccttgcagtcctaaaggatatgttcattctacagaaagcatccattttaaactttgaagactgttaaggtttaggtagatattaattagtatcattatttcttctcaatattctaaaattaatttcaaaatagtcttaccatatagatttttttatagaattttgtcatttgtcatgcaagactccatatcttttyataaaattaaaaatttggtttattttttttttcagatggcagaaacctgaaatcaagtttaaacattatccttgttttattattcattagtctttagtaactattgatactagaacatgtttctgtgttgggcaatattcaaaatttaacaaaaattttgaatttccatcctattttaagaatgaaagctgatagagtattta

SEQ ID NO: 691867 - DNA, 647 bp, Homo sapiens
tccagctgctgaggctggaataagagatcctttttatattgtgtattcccatattctatctatgatagcacatatatacactagggatttaatggatactgttgaattaattagccattttgaaggaagctaaaaaagtgttcaacatccagagtggtcagcttaggtcaatcggcctagaatgatgccttaaggtattcttgtttggggctataatatgctgtacaccaggtataacatgatctttgccttgcagtcctaaaggatatgttcattctacagaaagcatccattttaaactttgaagactgttaaggtttaggtagatattaattagtatcattatttcttctcaatattctaaaattaatttcaaaatagtcttaccatatagatttttttatagaattttgtcatttgtcatgcaagactccatatcttttcataaaattaaaaatttggtttattttttttttcagatggcagaaacctgaaatcaagtttaaacattatccttgttttattattcattagtctttagtaactattgatactagaacatgtttctgtgttgggcaatattcaaaatttaacaaawattttgaatttccatcctattttaagaatgaaagctgatagagtattta

SEQ ID NO: 691868 - DNA, 611 bp, Homo sapiens
ttaaaaagacaaaaaataacagatgtgggtgaggattcagagaaaagagaactcttgtacactgtttgtgggaacgtaaactagtatagccactatagaaaacagtatggagatttctcaaaatactaaaaatagaattaccattcaatccagcaatcccaccattaggtatctacccaaaggaaaagaaatcaatatgtcaaagagatacctgcactcacatgtttactacagcacaattcacaatagcaaagatatggaatcaacctaaatgtctatcaatggatgaatggataaagaatatatgatatatatatatatatatatatatatatatatatatatatatatatmtctatatctgtcacagtacatggcattctccccattttacatataaagaaactgaagtttaggagaggtgaagtgacttgcccatgatcacccaatcagactgtggccggccaggagagaaaaccagatgtgtctgccccaggacccccgctaactacttctgtcctggagcaggaccacattcacttggaaagagagctcacagggaggatttagagcaagcagagtgttgggttaagtcacaaggcccaggacac

SEQ ID NO: 691869 - DNA, 611 bp, Homo sapiens
ttaaaaagacaaaaaataacagatgtgggtgaggattcagagaaaagagaactcttgtacactgtttgtgggaacgtaaactagtatagccactatagaaaacagtatggagatttctcaaaatactaaaaatagaattaccattcaatccagcaatcccaccattaggtatctacccaaaggaaaagaaatcaatatgtcaaagagatacctgcactcacatgtttactacagcacaattcacaatagcaaagatatggaatcaacctaaatgtctatcaatggatgaatggataaagaatatatgatatatatatatatatatatatatatatatatatatatatatatatctmtatatctgtcacagtacatggcattctccccattttacatataaagaaactgaagtttaggagaggtgaagtgacttgcccatgatcacccaatcagactgtggccggccaggagagaaaaccagatgtgtctgccccaggacccccgctaactacttctgtcctggagcaggaccacattcacttggaaagagagctcacagggaggatttagagcaagcagagtgttgggttaagtcacaaggcccaggacac

SEQ ID NO: 691870 - DNA, 617 bp, Homo sapiens
gtacaaaatgttaagcactattgaaatcttccaaatctaccagttatggagttattggtcttggactaactctcctgaaaagaaagaaacaaaacgaaacaaaacaaaaaaacctaaaaacctggataaaatagcctaccgtgggcactggcaatgcaaccaaccaggtaggacctgggtgctacattctctttgtcataacacgaagcattcatacactcttctcaccctcaatctcaccttttaatcttagatctactattaaacgtattcaacattactatcaatcctttggtcaaaatttctttactcacattgtgcttgatgcacttggatagactgttcaagaaagtgtgagtagtgaattcctcaaactcttgcatatttaaaatgacatttttgagccttgatgcttgaagtgtagcttgggtaacgggtgggctttaagccaattttggcatgcaaggggttgagtttattaggcatcagcacctctgaaaatmgtggggatgcaggcttaatttcaacacgcttctaaatacttgaaagatattgtataattctttaataaactcctgtgtctacaaatggttcacattaactcaatatccatgatt

SEQ ID NO: 691871 - DNA, 789 bp, Homo sapiens
tagtaatttttttcatcatagtgacagtgtgctaaattttttaagtcaaatattactttagacatttaagtcaagattctaagaagctgttttaaagtccaaaatttagtttcatatacaatgatattatatatatttgcatataaaattaatatatgtaagccatgtttcaaatagttgagatattattatatcaaagattcttgattatataaaatgccaattacttataggcacacatgctttaaataattacaaaggcaattgtggttgattctactcttgctactggcatttgtatggacataatattatggtctgaagaatatttaggcaaatttgtcactcatatgatcagaagaacaatgcaagatagtttatatctgaaaggaaaaaaatctttatatgttctgaaagcctaaatcattaacaacttggataataattagcataaaaatacacaaacatgccctcttcctggcagtaagtacaccrtgacaacagaatcaaagcatgtggctcctcttctctgccctttctagatggcacaattcctcatgaatctaagtgcagtcgtagggtggattagggtgacctgccatttgtatgcaactgatctctattttggaagtaattaaagtaaaaatatatttttaaaagataatttcaaatttcagtgcaaactagcatggtttcaccccttttctttgtaacattttttctaaggttggaaaagtaaggtaggctttagtacgatttttaataataagttttcaaagtgaaacgcaa

SEQ ID NO: 691872 - DNA, 1516 bp, Homo sapiens
  misc_feature 1438, 1485: n = A,T,C or G
caccgcagtgggagccaagttgaaatgattctcagggactctttgggtagaggctgtagcatcaagcaaacaaagaaagcctgagctggcccctaagctagctagaacctcattgactcatcaccatctgcctggacatgtcaagctctcagcagttcataaggaagatagcagatgtctgttagcccatggacaatgtgcaaatgcattgctgaggtgggggtgaaggccaggccttggaaaacaacagacggaaatcgtggataaaaatccctctgtatagatggtagtcccagtgtgatgaggcatttttttccacaaaattcaaatatacaagtttaaagaaaggatacattaagaagatgaaagtgtgaatagtaatagtgaccaatgctgcctgctaagaaggttaagacattttctcagcagagcctgggctgagttgcatttacctggcattaaggcagcacccaccttccagtaaggacttcctgtcttaaaagcagtaacctggagtatcacctttatgaagcacctggattaaaagaacttggaagttgaaaagttactctttacaaagcatcaaatggatttcccttttttttttttaataaggataatctatgggctacacagtagtcatttccattaaatagccagcttgaaaaaaaaaagaaaaaaagaaggaaaaagctttgaaaactttacttgcagtatcttttcattctttctttgatgtatttggagtgaggagaatacattagtgccttttagcttgacagcaaagtctctcaaatgtaagtgaatggaaaagaactgactagagtgtttatttcattttcagaattctaacgtcaagactgtttcctcaaaaggccaaaaaaaaaaaaagcagaaacaatgctgaagttttaaacaatgcatttayttctcaggagtagtcagcttcaattaaatggatgccgtcccacaggatattttcttaggaacaggtagaattgtcagtccgtgtaccctacagctcacggccaaggtgatgtccacatgggcacctggttgtcatgctggagataggcctcagagagaagagagtgagacttgactccacagtcaagactgcctggtctcccatagcctgttccccatctcagttgactgctagatatccacccccactctttgccctcacccagccccctctccttctacagaaatggacattttcctggcccgtgacctcccacttgagatgagatttcttatgctctttgatgactagatgtactctgtcaacagaagtaagagttttgtgtgccacttccaggtcttgaccttaaaggagggagatgtgctcctcctttctgtctctcccctgctgtcagggtaagatgtggactgtgttcatagcagggaccgagcacctgccacccagatgaangatggcatcccgagagagagtagttcaacaagatggaagggatctgnagcccagatgacttttgaaggaacactgtcc

SEQ ID NO: 691873 - DNA, 2669 bp, Homo sapiens
tctctcattttctttgttgcccttcacagagctttgtggaggcatctttcactggtcttctggagttacatttaattccttctcctaaataatatatttctgtaggaatgtcttttctaggttgtgttattttggttgtttactgttgcttctgtttttattttctatgagagagagagagagagaagagaagtaaaagagggaatgattcaggtccaaatagaaaatattacccagtataaaaaattataaatctgttatttaagttcaaaagacctttttaacccctatcttcactaagttggggaaaatttttatccattttacagataaggccgtagaggcaaaaagagttaaagtgttttctaagaacactgcatggcacattataaagacttaaataataatagaatgaatgtttgaatgactaatactaataagtgataagtggggaatataatctaggcttctctctgttaatgattacactgccactaactacattgctgatcacattaaatataaaaaatctcatgaagctattaaattctactttgtttcaaggattgacatttcttagaaaatatttatttatttttttctctttctccaaaccatgtgctatttaatgactgagaaagaaaaaagtcataatcttttggactttgggaaatagtacataattcacttaaggtactgtatttagtctcttaaacatatgatacttaatccagacctttcctttaaatgtcatatttgccttcttctagaacttatatatttttcaaacaaatgagatgttttctattcctacaccttgctatatccacttacatgagcttctcagtttacaatcatcttagtcttataaaactttatttttgttggttaacatatacattttacacttaggaacaggtgtaaactctgacatctggaacatccatcagaaaagaatgtccctgaggcacctacacgagaggatatcaatacacattcaaacaatgacatttcagacagataaatgcccttatatcagggcaccaaataagaaaaataggaagcatgagcagagagcacatgacataaaatgaaatacatatgtagagattgaccatcatttgcaggggttagggcctgattccatggtgaaactaaagtccattttaaaatgggagatttaacatttaacagctaagcacataaaaaggaattcataacagaaaaacctacatcaattgaagtgacctttctcagagatatcttttacagattttccttctggctgtttcttttcttccttgtcctaccgtagacctttttcaatagggacctttttcttttcttccctcatgtatactcttattttaccctccttagtcttatgaatcagcttccactggagaagattttgagatgatatttctgtcctggtgtgtgaatactttggaacttccagaatccaccatactgtatgagactttttctctcaggaaattggctcatattattgtagtagggaaaacaaacaaacatgaaatcctgccacagttgatgcacatgaaattcctcaaaaaatttttttgtcatgttttctttattttatcccatccatgtagaagtctaagggatgccttttgctaactctaattcataagtccaaaatcagagcataagaagaaagttacaaatttgatatgggaataattatatgaatgataaaaggagtattattattataataaattagattaatatccactgaagaatgaattcaataaatatcataaaaatacaaaatcatcatccttttgttttcttaatcagaatctttgtttgcatggcaactaatatagttccacagaggaaaattttgagaatttataaaattgatctaaatatctaaatcttaaggttcattttactatcataagcttaaaggacacagcttttcaaaaaagataaaagaaaatattgttcttgggaaatgcaatgaccagggcttctggaatctcacccccacaccctaagttgcctcatttaaatatgcactcttactaagccaacatcacaatgtgtatgtaatctccacggaatatgtgaaaatgacaaggcatcactcatatgtaatggcattgaaaatatgtaagaatgaccagcatggacatatgccattacttaattgttacacacaaggcttaggagtaactgagcctaacaaatctgactcttaaggcttattatggtgaaaaaaaggaatttcttagagaagtgctttttaagtagattattgttacaagtcaaaatgatgcgactggtgcttcaatctcctgagagtttttgacaatggccagtgtggttacttctggcaatagaactctaggaaactcaatcagtgaccttggcactatgccatccaaaatgatattaagaggtaatgctcgtattgttcctctattagaaagttcagctggttccaaatatacgtcatggcacatcagggataattccaagaacaaaattaacttggattcaattcactgactaytatatataaaataatggagacagtctgttctcaaatggaatattattattggaatatatgtacatgtatggtgaagagatcttagcttgagagactgtgttgaattcatcctaggattcag

SEQ ID NO: 691874 - DNA, 648 bp, Homo sapiens
aggtcttgctatgttgcccaggctggtcttgaactccttgyctcaagtaaacctcaggcctcggcctcccaaagtattgggattacagatgtgaaccactgtgccaggccggaacatgtgttctaaaaaactaatttacaatcattgtatgtacctttcggtaaaaatattagtcattaatagggccaactgttggcatcttatttagcatctgactagaataaaatggccttcatcacgtccctctgttcagagtcttgaacaatctctgagcccatctagatcctgagatttgagcgtttctgattcttcaagtttatgggtgtttgtggaatcagtggtgattgaagggtccctagacacatgtgggaaaatcttcagcatcaacagagttaagagggtattaggagctttgatgtgtcccataaaaacgatggggagatcctggaagggaaatggtctcaaccctggggagaaagcacatcaagtctaggagggtaagaaagaaaagaaactttttatctgaggaatctgagcctcctttacttataaggcccagagatacattgaaatgtgacgcatgtgacaacagtcatgtatcactctccccttgggctaaataattaactcttgatgccacttgttata

SEQ ID NO: 691875 - DNA, 648 bp, Homo sapiens
aggtcttgctatgttgcccaggctggtcttgaactccttgcctcaagtaaacctcaggcctcggcctcccaaagtattgggattacagatgtgaaccactgtgccaggccggaacatgtgttctaaaaaactaatttacaatcattgtatgtacctttcggtaaaaatattagtcattaatagggccaactgttggcatcttatttagcatctgactagaataaaatggccttcatcacgtccctctgttcagagtcttgaacaatctctgagcccatctagatcctgagatttgagcgtttctgattcttcaagtttatgggtgtttgtggaatcagtggtgattgaagggtccctagacacatgtgggaaaatcttcagcatcaacagagttaagagggtattaggagctttgatgtgtcccataaaaacgatggggagatcctggaagggaaatggtctcaaccctggggagaaagcacatcaagtctaggagggtaagaaagaaaagaaactttttatctgaggaatctgagcctcctttacttataaggcccagagatacattgaaatgtgacscatgtgacaacagtcatgtatcactctccccttgggctaaataattaactcttgatgccacttgttata

SEQ ID NO: 691876 - DNA, 599 bp, Homo sapiens
taagaatactattaattaatacttattaaccacttcctttgagatattcagctaagagttttccaaacattttcattttacctttatattcaagtagtaggtgaacattttacagttgtgtcaagtagggtttaaagaggttaggaaacgtgcctaaggtcacagagaaaagtggtagagctgaagccagcatccttgatcactataccacaccacygtcaatgtacagatacagacaatgccatacactactccttgcttctaaaattataaatataatttttagatggctatttaataacagcacttggatatatagtaactttactgactcactcctctcctggatcagattattttcatattttattcaggatagtgtgattcattcaatacaaaaaataaaaactagataaatgcaagacttgcttgtccacttctaaatttaaattaaaatatataattcaacttactcttttactgaggcaaataactggccacatactgcaacctaatgtgcagcagcaacaaaggcagccacaaagtagccaacgtacattaacaggaaggttcttcttaagacaactgttaactctgtt

SEQ ID NO: 691877 - DNA, 1373 bp, Homo sapiens
tgagaaagttgatagtttttttctgaatttcttttcaatttctmatcttctctggaacttctcttttcttcatacatttcttaaactcataagtaatgagcaccctactctgtatatatccctgttctgggtctaacacagggaaaatttaaagaagcattgtcatggactgaatgtttgtgtccccctaacatttgtatgttaaagctctaacccccaatgtgactgtatttggagatggggcctctaaggagataattaaggttaaatgaggtcataagggtgggccctgatccaacagaattcatgtccttataaaaagaaacacaagaaagttctcttacatgctctccctctctccacacacatacacataaaggctatgagaatacatagtaagaagatggccagctacaagacaggatgagagccccctaccagaaaccaaaatggcgaggcacatggatctcacacttctaggctgcagaactgtgagaaaataagtttctgttgtttaagccactcagtttatggcattttgttatggtaacccaagcacactaatacaagcatgaaatatcatacttcccttaaagagcttacaatggagtagtatggaaaaacaataagagagcaaattcaaatttacaatgtatgcaagcaggagatgaagaggactaggggagggagggagcaattactaaggcatggaatgatggagaaaagcattttaaaaaggcagaatttaggctgagccctggagaataagcagtgttttctcaaaaaaaaaaaaaaaaaaaaaaaggcacagggttggtatacatgaaaataaatgggagatcataatattatataaacttcatgtaggcagggattttgtccgtcctgcttaccctgtattcctagcactaccacagtcccaggcacatggtaagcgctcaacattttttgttgttggaattaacaaatgaagaaagaatcaagctgcctgaagtgattccaaccagaatactgaaattacaagatgaaaaatatggatataaactgatggtcaaagggaaaccagttctaaacagaagagtgaaatctatccttaattttctttctccattctatattcttttttgtaccttgctattctccactcttgttattttccttctttttctcacttaacaatacagtttttcaagcattaccatgcacttcccctagttcccatagttcctccactaccacctcccagaacattcacgtttctctcagcttaatgaaatggaaaacagaggagagaggcagctgggataacacatggggagtaaattgagggaaacagaaagtaaagaatccaagagatgtcaagtagggcaatc

SEQ ID NO: 691878 - DNA, 1540 bp, Homo sapiens
ggtaccatctgcctctggggaggcctcagggaactcatgggggaaggcaaagtgggagcagatgtcttatgtggcagcagaaggaccaagggtcgggggaggagggaggtgctacacacttttaaacaaccaggtctcactcactatctcaacacagagccaaggggtaaagccatccctatgatccaatcacctcccatcaggccccacctccaacattgggaattacagtttgacatgagatttgggcggggacagaaatctaaaccatatcaccaaaggtgggagaagaccaatgtcccagccagaagacaggcagaaagagcaaattctctctcagtcttttccttctactcacatctccaatggcttggatgaggctcactcatgttaaggagggcaatcagtctacagattcagatgttaatctcatccagagatacccccacagacactcagaataatgtttagccaaatgtctgggcacactatggcccattcaagttaacatgtaaaatgaactatcacatatggattcttccaaatacagttcagggcattagttatttaaagattttctaggcactgaagggcatccacagtggttagattaggctagtgtcacttaaaaggatccatttcagatctgaatgtctgtcttggacaacttcacccccttatctttacatcctcagagagggatcttgtagaaatgagggagtaacagcaaacggaaagttggagaaggggacaggccacctgtgaaaggccaatcatgctgggagcagagaggggtaaatccagtccagactggaaagcttgagggaagacagaacagccatattctttgcaatttggagggaggtagaaatcccattgcctatccttttaccctcatcggagtcctacctggagaggctgtaaaaggcacatagtcattggtaggagtagagggatcacaaaatcagaggacctgagcttggagtgcctatggctttgacaggagctttagaatctgaaaggctaaaggggctgttatggccctagcaggaaaggaaaggaagtgggatactgggggatctgctttggtctttctgtagcctttctcaagggctagatgaaaatgaaaatctcaggttgttccgaattggtttctaggccagccctctattactaggctgatgatgctacaacgaatcaaaagatcattgacccctgatagaggtctttactagtgccaaaatctacccagctgcactttctgcatcccacccccaacacacacacacacacacacacacacacacacacacacacacacacacacacayacatgcacacacacacagactcaattttcaacagtatataattggcaatcacagaacatttcagttgaattaagatagagttcaaaccagaagagtgaggcaaagctagaatattagaaaaaaaataaagcatataaaaattacttgctatgtgtcagcccctttcacatggttaatttcatttactccttacatgaaccctttgagac

SEQ ID NO: 691879 - DNA, 1335 bp, Homo sapiens
ttggaaagaataaggggmagatttcttttaagcctcaggaaaaattttgagcaaaagagatagaagcctgggtgcaaactgacaaagaaagcagaaatgtgttagtgatgcagaagtcactgctggtgctttgaatggtgctgacacatcaaagggcactgtttgcaacaaagaggaagataatttctggagagtgacaaaaccatttgggagaatgcagctgatgccctcgattcactggttaattgtgcagatgggcaaccatattctgctgccccagagttcatgaacctggacatgctttatcccacctgtaggacaaacagtcaaacaaccccaaccaggctgccctaaggggctttgtcaagaaagcaactgcctggacaacttttaacctcggtagcattgagacaactttaacataaaaaatataaatattatattaccccaaactattaaataagagagaaaaaatgttaagttatctctcttgacttatttcctgaccagtagtttatagaatacctgaggcctacattgagcggcaagttaaaacaggcacaagaaaactagacctatggaatatataaaataattctgtgataaaaagacaagaagactgttaaccagaatgttaattttttgtttttgggtaatttgttatatttactttggttttttttttttcttttctatactttccaaatttattacagtaaatacatactagttatctaatgaagagaatataaatatttttctttcttttcttttttttcttcgagtcagtctcgctcttgttacccagtctggagtaaaatagcacgatctcagctcactgcaacatccacctcccgggttcaagtgattctcctgcctcagcctctcgagtagctgggattacaggtgcccaccaccatgcctggctaatttttgtatttttagtagagatggggttttaccatgttggccaggttggtctctaactcctgacctcaggtgatccacccaccttggcctcccaaagtgttgagattacaggcgtgagccaccacgcccggcctaaatatttttcttactgtgacagaacaactcagacaacagcaatgttttctaaacaaatactcaactactcaaaaaaaaccaaaaaacaaaacaaaaaaaaaactgaatctctgagagtttaggtagtcaaggttttattgtaatttagcatgtaatagaaaaagaaactcaagagacatagttaagacagttttactgagttcatccaatttcccattagtaattgaattagtaattgacttacacaagtcataaattgatgtgcatata

SEQ ID NO: 691880 - DNA, 1335 bp, Homo sapiens
ttggaaagaataaggggaagatttcttttaagcctcaggaaaaattttgagcaaaagagatagaagcctgggtgcaaactgacaaagaaagcagaaatgtgttagtgatgcagaagtcactgctggtgctttgaatggtgctgacacatcaaagggcactgtttgcaacaaagaggaagataatttctggagagtgacaaaaccatttgggagaatgcagctgatgccctcgattcactggttaattgtgcagatgggcaaccatattctgctgccccagagttcatgaacctggacatgctttatcccacctgtaggacaaacagtcaaacaaccccaaccaggctgccctaaggggctttgtcaagaaagcaactgcctggacaacttttaacctcggtagcattgagacaactttaacataaaaaatataaatattatattaccccaaactattaaataagagagaaaaaatgttaagttatctctcttgacttatttcctgaccagtagtttayagaatacctgaggcctacattgagcggcaagttaaaacaggcacaagaaaactagacctatggaatatataaaataattctgtgataaaaagacaagaagactgttaaccagaatgttaattttttgtttttgggtaatttgttatatttactttggttttttttttttcttttctatactttccaaatttattacagtaaatacatactagttatctaatgaagagaatataaatatttttctttcttttcttttttttcttcgagtcagtctcgctcttgttacccagtctggagtaaaatagcacgatctcagctcactgcaacatccacctcccgggttcaagtgattctcctgcctcagcctctcgagtagctgggattacaggtgcccaccaccatgcctggctaatttttgtatttttagtagagatggggttttaccatgttggccaggttggtctctaactcctgacctcaggtgatccacccaccttggcctcccaaagtgttgagattacaggcgtgagccaccacgcccggcctaaatatttttcttactgtgacagaacaactcagacaacagcaatgttttctaaacaaatactcaactactcaaaaaaaaccaaaaaacaaaacaaaaaaaaaactgaatctctgagagtttaggtagtcaaggttttattgtaatttagcatgtaatagaaaaagaaactcaagagacatagttaagacagttttactgagttcatccaatttcccattagtaattgaattagtaattgacttacacaagtcataaattgatgtgcatata

SEQ ID NO: 691881 - DNA, 621 bp, Homo sapiens
tgccactccatggcatyggcttctggcagatttcccaaatatcatacaactagcttattttatctttcactaatcaataactgagacaacctcttcaacttaggcactcagtatatagaaacacaaatggttaacaacattgtccatctgctaacaaagcagtaatacagattttctcactgaaaaactgaaatatattacctaaagacacagaaatagtgacaatgaaacagagtcaagaaggagctgaaggctgtcatggagttgaatggggggatgaagggtgaatgctgtaagacagaactgaactcggccttctgcccctctctctctgtagctatgtccccaactaaatacccatctattatgagacttcattgtagaaggttttactggtagaaacaaacatctaagaattgtccagatcatcagtcctcatcataaaattacccactaagtgcttttctctgcatttgccccaaaacaactggcaaaatacttccactgtgactttgttgttgttgttcagtagcctctttctctttccattttctgtggcttaatgtcattgattactttgtaaataatttacctagtaggtaatactgaatttctgtgaag

SEQ ID NO: 691882 - DNA, 1350 bp, Homo sapiens
ggagaatcacttgaatccgggaggcagaggctgcaatgagcggagattgtgccaccgcactccagtctgggtgatagagtgaaacttaactattgagaagaaattttaaatgatttatgtaaaaatagcaaccatacagaattacagtcatattggttgaaatatactatgtgagtgatcattttactataacttatggccaagagttgtgattctatctaatgacagattagtagtttattttgactaaaagaaccttcagaaacaaagattttttcccctcaatacacggtttagaaattggcaaactatggatctgtgggccaaatgcagtccactacctattttcataaagtattactggaacacatctatttacatattttctgtggctgttctcatgctacaaggtgcaacagaaatgtgtaggtgcaacagagatggtatgacctgcaaaatctgcagtatttactatctggtcctttacgcaaaaatgtctgaactggttttttaggatatttagcttatgtgaaacacagaaatatttgttcagttttccaggatcatgtcttgttaatttcacattatagtctacaaggcaataggtattttaaaaatgtaaattccttgacagaaataattttattttcatattttgtggtaatatgttcatattacaatagttgaatagagcagtaatttccattttacatgtgttttaaaatagatttagagaaaacttcaaaagatttacaaacttctatgacagaactgaatataacaatcacaaaattatttaaatagcctgaatactgcagtattacgtgttactgtcttcttttttttattttttgagacagagctttgctctgtacccaggctggagtgcagtggtgtgatctcggctcactacaacctccacctcctgggttcaagcaattctcctgcctcagcctcccaagtagctgggactacaggtgtgcaccaccacacacagcgaatatttttttttttttatttttaggggttttgccatgttggccaggctagtctcgaactcctggcctcaagtgatctgcccaccttggcctcccaaagtgctaggattacaggcatgagccatcacacccagcatgtgttatcttcttaagacccatacacacagtcttttcttttagcttctgattrctagattatgtaacaagtggccagtaaaacagaactcctattaggcagattccttaaaccagaccctgtggctggcttttgaaggaaaacttacaaaggaaacttcttttccctcaaaggaaattgggggaattgatgtctcatttgtctccatcaaaacca

SEQ ID NO: 691883 - DNA, 1350 bp, Homo sapiens
ggagaatcacttgaatccgggaggcagaggctgcaatgagcggagattgtgccaccgcactccagtctgggtgatagagtgaaacttaactattgagaagaaattttaaatgatttatgtaaaaatagcaaccatacagaattacagtcatattggttgaaatatactatgtgagtgatcattttactataacttatggccaagagttgtgattctatctaatgacagattagtagtttattttgactaaaagaaccttcagaaacaaagattttttcccctcaatacacggtttagaaattggcaaactatggatctgtgggccaaatgcagtccactacctattttcataaagtattactggaacacatctatttacatattttctgtggctgttctcatgctacaaggtgcaacagaaatgtgtaggtgcaacagagatggtatgacctgcaaaatctgcagtatttactatctggtcctttacgcaaaaatgtctgaactggttttttaggatatttagcttatgtgaaacacagaaatatttgttcagttttccaggatcatgtcttgttaatttcacattatagtctacaaggcaataggtattttaaaaatgtaaattccttgacagaaataattttattttcatattttgtggtaatatgttcatattacaatagttgaatagagcagtaatttccattttacatgtgttttaaaatagatttagagaaaacttcaaaagatttacaaacttctatgacagaactgaatataacaatcacaaaattatttaaatagcctgaatactgcagtattacgtgttactgtcttcttttttttattttttgagacagagctttgctctgtacccaggctggagtgcagtggtgtgatctcggctcactacaacctccacctcctgggttcaagcaattctcctgcctcagcctcccaagtagctgggactacaggtgtgcaccaccacacacagcgaatatttttttttttttatttttaggggttttgccatgttggccaggctagtctcgaactcctggcctcaagtgatctgcccaccttggcctcccaaagtgctaggattacaggcatgagccatcacacccagcatgtgttatcttcttaagacccatacacacagtcttttcttttagcttctgattgctagattatgtaacaagtggccagtaaaacagaactcctattaggcagattccttaaaccagaccctgtggctggcttttgaaggaaaacttacaaaggaaacytcttttccctcaaaggaaattgggggaattgatgtctcatttgtctccatcaaaacca

SEQ ID NO: 691884 - DNA, 543 bp, Homo sapiens
tcaatattattactgatattctttatttgatgaatcattgctgtcatactttatttaaactgattttagttctttaaacatttgtaatagctgctttgaagtctttgttaaatccaacatctgggttcctcagtttttattaactgtttttttcttcctgtatagcacatgagaaatatatatgatatatacagtgtctgtgtgtatttaaattggacattttagataatatattgtagcaattctggattcttacccctcccattgaggggtagttgttactttttttttgttttgtttgtttagtgacttgcctagacatagtctctggagtctgtttttcctggagtgtgyagcctctgatgtttctgctggcaaaatatatattgcatgtatgcatatatatgtatgtgggtatatgtgtgtgtgtgtgtgtgtgtgtgggtatatatatatgtatatatatatttatcacttgtttttatttttaagcctggttttgtaggggctgtcctggatcagcacagcttagtgatcagccag

SEQ ID NO: 691885 - DNA, 836 bp, Homo sapiens
atttttctcctctaacactgtccagtgtccctgaggctcaaggacttgctaaagtctagagctcagcagcaggccaggaaacaaacataaagggcccctgagtagccaaaaggaacaccactagtgtccatgtactcccaagctccgttgttaccagagttaagccccctaggtcatagctcattgcctccgcgtttacattatacagtgccttttagtgaatctggtgatgcggcctcctagtacattttggattgggcacgaaaaactcataggtgagtgagccaaacatgtggttgacagtaagtgaagagaaacgtatctaagccttcaatgagcccagaggatagagtatcatgcactagtgcaatcatcagtacaaatttgtgctggacagctcccatttgccactccagacctgctctccactcytctccactctgctgtgtcccaggaggctggtatcagttgtgggtctcaactgcatcaagggcttctgatgcgggttggaccaagataattgttttcctggagggagagaggagaatgaggttggtgttgcacctctcctaccagccctgtccctaggctcctgtaactgctccctgcctttactgctctaggactagggatgttcttattctagggcagtgcaccggctcctgtggtttccctactcccagctcaaacctttgcagatagtccctttattacaaccgcctctcaaattacccaatttgaatgtttcatctgtttcctgctggaccctaaacgatacagagctggtaggaaacttaggaataatttagccgaagttcctcatcttttgattggga

SEQ ID NO: 691886 - DNA, 836 bp, Homo sapiens
atttttctcctctaacactgtccagtgtccctgaggctcaaggacttgctaaagtctagagctcagcagcaggccaggaaacaaacataaagggcccctgagtagccaaaaggaacaccactagtgtccatgtactcccaagctccgttgttaccagagttaagccccctaggtcatagctcattgcctccgcgtttacattatacagtgccttttagtgaatctggtgatgcggcctcctagtacattttggattgggcacgaaaaactcataggtgagtgagccaaacatgtggttgacagtaagtgaagagaaacgtatctaagccttcaatgagcccagaggatagagtatcatgcactagtgcaatcatcagtacaaatttgtgctggacagctcccatttgccactccagacctgctctccactcttctccactctgctgtgtcccaggaggctggtatcagttgtgggtctcaactgcatcaagggcttctgatgcgggttggaccaagataattgttttcctggagggagagaggagaatgaggttggtgttgcacctctcctaccagccctgtccctaggctcctgtaactgctccctgcctttactgctctaggactagggatgttcttattctagggcagtgcaccggctcctgtggtttccctactcccagctcaaacctttgcagatagtccctttattacamccgcctctcaaattacccaatttgaatgtttcatctgtttcctgctggaccctaaacgatacagagctggtaggaaacttaggaataatttagccgaagttcctcatcttttgattggga

SEQ ID NO: 691887 - DNA, 970 bp, Homo sapiens
catcttctttatccattcatccattgatggacatttaggttgcttctcactcttggcttacaatttttatacctgtatttctttctcttattgtttagtgctctagaaaaactatcagataacagtggtgagagtgagcatccttatcttcttgattttaacagtattaataggttttcatcatgaagaatagtgcttacttttggtttaagatatgttttttgaaccaggcacggtggtgcatgcctgtagtcccagctgctcggaaggcctaggcaggagaatccctttatcccaggagggcagtgagctatgattgcaccactgaactacagcctgggtgagagagagagagagatcctgtctaaaaaaaaaaaaatatatatatatatatayacatacatatatatacacacacatatatatacacatatatatgtatatatacacacacgcacatatatatttgactacaagcacaattttgtatagcagtacaacatatatatatatattcttgttttattaagaaaatacctgttttgttatgagtttccctaattcatattttactaaacattaaacattttatttttattccatttattattccattttattcaatttattattattccatgtattattttattccgttatttattttttattccatttattttcatcagatttattattattccattaaacatttgtaatgtttaataaaatacgaatgatagcaaatgaagtgtaaaaaaattttctaatattgaaccatctgtaactcctggattgagccccatttggttataggcctttctctttcttttagcgtgctactggttttcattcactattattttattaggattttgtattgatcatcataagtgaagttcatcgctattattctcttttatgctttgctggatttgaaatccatatcacactggtttaaggcaaaact

SEQ ID NO: 691888 - DNA, 1339 bp, Homo sapiens
tttcctttggctatgcgcctacttttcttaaattgatttattaatgtccaaggttgctttgcagttttatccttttagcaataatagatgcaatagatcacaaaaacaaatttttaagagaacatcattagagtgatgtagcactggtaataaaccccttcacacttggatgaacttaaatcagtttctctttattgatttttggtcataacataattttaaagttcaactcagttaataaaaaaagatttgcgccggtgttatgggcaaaatacttgygttgtaagtttccacatcatttgtggaagaatgttatagttgtatcatatatggatcttcgatagatatagcaatgagcatattattttatgataatccttatgtttaatatctttccctctccttttattgatgtgaatctttcaacatccttatcataagatccaatgacaccattagtattcacttcctatttatgcatacgaatgtgtgtgaaagatgtaaaaaatgcaatatgtatcaaatatacacacagtaaatctatttaaaatatttatcttatgcatatcatggcaacattttaactatttttactaataatgtgataattttctttagaatgattttacatctttatgcaggattgtcactcccatgtagagagtgggttgattttttatcttgtagttcattcaaaaagtgtcaaaaatcaattaatgtaacctgtttttaacatgatgaattacagacttatgaagggtctatgccatcaggagaattaatatcttcatccagaattaagtaattgaatatacacaaaaaaagaaaaaaataggttaatatgaactcaaatatgagtgtcaaacttctattgattgctattcttcctgtgaagctgttatctactataattgttctcactttctcctcactacaacatagcagattatatacataacatgttgcccggggctcactcagatatggcccacagcatttataaaattctcagctctcaaccgtaattcctggccttcagtttttcacacaaggaaacctatcagaatgcaagagagcaagagtacactctaatataatcttatatccattctatagtttaaaaaataaattatgcacaaatttccccacttcatttttaaacattccttgcaatatccttcacatgtatgtgttaagattgcagatcaaggcatctggtctgtaatgccttgagcacacaataaagagaaaggtagcatcagacaattagcaaccaatggcttgaggagaattaaaagataattttattattagcttggatgctagaatataattttca

SEQ ID NO: 691889 - DNA, 1339 bp, Homo sapiens
tttcctttggctatgcgcctacttttcttaaattgatttattaatgtccaaggttgctttgcagttttatccttttagcaataatagatgcaatagatcacaaaaacaaatttttaagagaacatcattagagtgatgtagcactggtaataaaccccttcacacttggatgaacttaaatcagtttctctttattgatttttggtcataacataattttaaagttcaactcagttaataaaaaaagatttgcgccggtgttatgggcaaaatacttgcgttgyaagtttccacatcatttgtggaagaatgttatagttgtatcatatatggatcttcgatagatatagcaatgagcatattattttatgataatccttatgtttaatatctttccctctccttttattgatgtgaatctttcaacatccttatcataagatccaatgacaccattagtattcacttcctatttatgcatacgaatgtgtgtgaaagatgtaaaaaatgcaatatgtatcaaatatacacacagtaaatctatttaaaatatttatcttatgcatatcatggcaacattttaactatttttactaataatgtgataattttctttagaatgattttacatctttatgcaggattgtcactcccatgtagagagtgggttgattttttatcttgtagttcattcaaaaagtgtcaaaaatcaattaatgtaacctgtttttaacatgatgaattacagacttatgaagggtctatgccatcaggagaattaatatcttcatccagaattaagtaattgaatatacacaaaaaaagaaaaaaataggttaatatgaactcaaatatgagtgtcaaacttctattgattgctattcttcctgtgaagctgttatctactataattgttctcactttctcctcactacaacatagcagattatatacataacatgttgcccggggctcactcagatatggcccacagcatttataaaattctcagctctcaaccgtaattcctggccttcagtttttcacacaaggaaacctatcagaatgcaagagagcaagagtacactctaatataatcttatatccattctatagtttaaaaaataaattatgcacaaatttccccacttcatttttaaacattccttgcaatatccttcacatgtatgtgttaagattgcagatcaaggcatctggtctgtaatgccttgagcacacaataaagagaaaggtagcatcagacaattagcaaccaatggcttgaggagaattaaaagataattttattattagcttggatgctagaatataattttca

SEQ ID NO: 691890 - DNA, 1339 bp, Homo sapiens
tttcctttggctatgcgcctacttttcttaaattgatttattaatgtccaaggttgctttgcagttttatccttttagcaataatagatgcaatagatcacaaaaacaaatttttaagagaacatcattagagtgatgtagcactggtaataaaccccttcacacttggatgaacttaaatcagtttctctttattgatttttggtcataacataattttaaagttcaactcagttaataaaaaaagatttgcgccggtgttatgggcaaaatacttgcgttgtaagtttccacatcatttgtggaagaatgttatagttgtatcatatatggatcttcgatagatatagcaatgagcatattattttatgataatccttatgtttaatatctttccctctccttttattgatgtgaatctttcaacatccttatcataagatccaatgacaccattagtattcacttcctatttatgcatacgaatgtgtgtgaaagatgtaaaaaatgcaatatgtatcaaatatacacacagtaaatctatttaaaatatttatcttatgcatatcatggcaacattttaactatttttactaataatgtgataattttctttagaatgattttacatctttatgcaggattgtcactcccatgtagagagtgggttgattttttatcttgtagttcattcaaaaagtgtcaaaaatcaattaatgtaacctgtttttaacatgatgaattacagacttatgaagggtctatgccatcaggagaattaatatcttcatccagaattaagtaattgaatatacacaaaaaaagaaaaaaataggttaatatgaactcaaatatgagtgtcaaacttctattgattgctattcttcctgtgaagctgttatctactataattgttctcactttctcctcactacaacatagcagattatatacataacatgttgcccggggctcactcagatatggcccacagcatttataaaattctcagctctcaaccgtaattcctggccttcagtttttcacacaaggaaacctatcagaatgcaagagagcaagagtacactctaatataatcttatatccattctatagtttaaaaaataaattatgcacaaatttccccacttcatttttaaacattccttgcaatatccttcacatgtatgtgttaagattgcagatcaargcatctggtctgtaatgccttgagcacacaataaagagaaaggtagcatcagacaattagcaaccaatggcttgaggagaattaaaagataattttattattagcttggatgctagaatataattttca

SEQ ID NO: 691891 - DNA, 600 bp, Homo sapiens
attttttcacaatgaaaataaaatatttagatgaaataatgtaacctttgatattgatattaatattgatgaaataatgtaaccttttgatattgatattaatattgatgaaataatgtaaccttttgatattgagttaaactgaattggaaacactcttacagggttaataacaatttcttcattagaaggattttttccttacattttgttctttatgtaaaagacatattctttcaaatctttaataaagcactataattcattttaccaacatactgtaacatatgccataaaaatataatgtgccatagatcattctacagacttccgtaaaccaaggaattggtgaaaataaatcacattgtcttctattttgccttgaaagtaaacatcaatactcagggaaaagaaaaacaaaaccacaatttctggataaaatgtaaaatgtcactaaagactttaattaacaggaaacccttcatgtgaaaatagggtgcttcaaacttatttttattacccattaagggtttataggattaatttgcaattattacatattygtgcttcgcgacaatattcttaactatcttgagtcta

SEQ ID NO: 691892 - DNA, 2263 bp, Homo sapiens
cccctggctcaagcaattttcctgcctcagccttctgagtagctggtactacaggcatgcaccactatgcccagctaatttttgtatatttttgtagaaatggggtttcaccatgttgcccaggctggtcttgaactcctgggctcaagcaatccacctgccttggcctctgaaagtgcttgggatgacaggcgtgagtcactgcacctagccccaagtcattccttttgaaagacttgaccagggcagagcagttgaggtaaaaaattgactagactaggtggtggtagttgggggaaagaggtggtcaaagaaaaaaaattcttaaccatagaaaggaaacagtttagactaaagtcatttataaatgttcagctagcyacctgattgttacaacacgacagaaacaaatgctctgagaacttttacagcaagaggagccctcctgtcaatagcagaagaaagccaagaaccaagccacaggatctgattgacaagttatttggaacaaatgatgggacaataaatactaagcacagatcaggaaaccaacatggaacacgtggaaagccacgggtgagagcagcaaagatacaaggctgcattttaacaacacctaagattcagagtgcttccaaccttccaaaaacacctaaatacttccacttgaaaagcatactttatgttgtaaacagaaagaaaacattcttttttttttttttttgagacggagtcttgctcctgtcacccaggctggagtgcagtggcgagatctcagctcactgcaaccttgcctcttgagttcaaacagttctcctgcttcagcctcctgagtagctgggattacaggtgcctgccaccacgcccatctaatatttgtacttttaatagagatggggtttctccatgttggccaggctggtctcgaattcctgacctcaggtgatctgcctgccttggcctctcaaagtgctgggattacaggcatgagccaccacgcccagccaacattctttatcgtaaacatccttgtccctttgaagtagggaaaggttgagtctgtgccagctaaacatttgggaaaactaaagctgaattgttaaaatgcctgtggcctgtgctcagattttctttgtactcactagaataatggttctcaagatgcctggtcatagcagctatagttcaatcacaggcttgagtaaaacctatcctagtatttttgctggcaatatgaatatttcactaacaaagctaattgcctcagtgggaggcttccatttgcagatgaaaaggaatgtattctctaaagaatccaggtgaggttatatgctctctcccatccacccttctactcactcgcatacctgtgaggtagatggtttttgcaggctttggacacttctgaagcaatcaaagttagaatgccactgctttagtgacataccaacttttggaggctttaaagcttttgtcttgtattaacgtgtccaaaaaacacaacttcagttaaaagtaaacataaacagaaggagcaatcaatatagagtactcacaaaataaaaagatgcactgtgaccatgcttttttctcttgcaaattccaagaaaaatactacataatcacaaagtattgttttaaaattattatcctagattattactgtcttactttttaagcattaatcttccttatttggtagccagccatgaagaaattccaggaggaaaaaaaaatcacttttgaggtttctatcactaaatcaccatagctataaatacccataagattaaaaacgatcagcagtaattctcgaggacaaagttacaagagaatgtaatgattcatatttaataccaaatttttgaaagatctgcaggcacaaatattaaaggtcagcttggaggactctagaatatgtttcggagaaattctctaagcttattatgcatagggaaaaatcctgcaaaaggagttcaagaagttggtaactccatgaaaggacagcatcgctgttccatctaccacttatcacgtttctccctgaacagtgtgccatttaacagtattagaatttgtttctcttcgtctttttgttgacccataaaaattatacatatttatggggtacagagtgatattttggtacttgtttacaatatataatgatcaagtcagagtaattagcatatgtattactttgggtattgatcatttctttgtgttgtgaacattcaatatcctctcttctggctttttgaaa

SEQ ID NO: 691893 - DNA, 1021 bp, Homo sapiens
atggaatgaaaagattcttgaggcatctcagtcatcactgccccttcaatagcagtcaactgttcgagaattaaggcaaacgatggacgaatatgagggtcttgttgccagcattctaaaataaacaaaaatcacattaataccatctctcaaygcagtttagagttgctaagaaatgttttacactgaagtgtatttcaacttaacatttgtcattccaaactggaagcttccatttatagtatctgctcctgaagattttaagaatccattggtaatagtttgaatagtttattttacatagtgtccatgtcacaggcatgcataataatgaccattagagaaggctgttgctgtctatattataccgcatttaataaatggacgtgtgcttcccatgctttactatggataccatgtttcagggggttaagccaccataaccagatcatttactgatatggagtcatgtaactcaaacaaagcctctaaaatgttatatccacatgagaagttctaaaaatcaaaaatagcctaacaatgaaggaaggcaacttgcggcttacaaaaagagttagttaacaatttttaaagataaggataaaatagacatgatcctggcaaaatcacacctgttaagaccataaggcatttctgatcactaattcaaatttaaaatagcagatttggagccaattcaatactgtatttgaactctactcatgtacctagtgaaaatgttactacttttcagttgagttttatacataaataagtcactgataaaactggattgtaggtaagctacttagttcttcaaaactttaccagacattccagatcaaagactaggtttccaattcttaaaatactagggttacttaaaagtacttggaaattagagtcacagaaaatgctttttctgttttttaaaaaatgatattctaatgagaaattcttgcccccacaaagacacacacacacacacacaatacctttcatgagcttggcaaacggctca

SEQ ID NO: 691894 - DNA, 1021 bp, Homo sapiens
atggaatgaaaagattcttgaggcatctcagtcatcactgccccttcaatagcagtcaactgttcgagaattaaggcaaacgatggacgaatatgagggtcttgttgccagcattctaaaataaacaaaaatcacattaataccatctctcaacgcagtttagagttgctaagaaatgttttacactgaagtgtatttcaacttaacatttgtcattccaaactggaagcttccatttatagtatctgctcctgaagattttaagaatccattggtaatagtttgaatwgtttattttacatagtgtccatgtcacaggcatgcataataatgaccattagagaaggctgttgctgtctatattataccgcatttaataaatggacgtgtgcttcccatgctttactatggataccatgtttcagggggttaagccaccataaccagatcatttactgatatggagtcatgtaactcaaacaaagcctctaaaatgttatatccacatgagaagttctaaaaatcaaaaatagcctaacaatgaaggaaggcaacttgcggcttacaaaaagagttagttaacaatttttaaagataaggataaaatagacatgatcctggcaaaatcacacctgttaagaccataaggcatttctgatcactaattcaaatttaaaatagcagatttggagccaattcaatactgtatttgaactctactcatgtacctagtgaaaatgttactacttttcagttgagttttatacataaataagtcactgataaaactggattgtaggtaagctacttagttcttcaaaactttaccagacattccagatcaaagactaggtttccaattcttaaaatactagggttacttaaaagtacttggaaattagagtcacagaaaatgctttttctgttttttaaaaaatgatattctaatgagaaattcttgcccccacaaagacacacacacacacacacaatacctttcatgagcttggcaaacggctca

SEQ ID NO: 691895 - DNA, 1482 bp, Homo sapiens
tcatagtttcacatggctgggcaggcctcacaatcatggtgaaggcaaaaggcatgtcttacatggcggcaggcaaragagaatgagagccaagcaaaaggggaaaccccttataaaaccatcagatgtaatgacagttattcactaccctgagaacagtatggggaaaccgaccccatgattcaagtatctcccaccaggtccctttcacaatatgtggaaattatggtagctacaattcaagatgagatttgggtggggacacagccaaaccatatcacagatgaaatcccaaggcagtctgctggagaattccctcatgctctggagagagtagctttttgttctattctctcccctcccccaaaattcagagggttgtaatgaatttggaggggaacagagtggacagagaatatatctgacttggattattcttactgctttctaaaacattttattggatgaggcccactcacatcatgaagggcaatctactttactcagtccactggttcagatgttaatcttgttccaaaataccctcagaaaaacacccagaacaatgtttgaccaaatatctgggcaccatggatcagaaaagttgacacataaaattaatcatcacacctttgaacttaaaagcaaaaaatgctgatcttttcctactgttttcaagcttcagtgctaatgttatcccctggggctaatgataaatctatgcctaagagaagaaaaaaataatggccatggttgaggagggaggggagaagaaaggaaagtctgattaatattcattaaacaaatacttactgataacctaccatatagcaagcaatattctaggcactatgattataatgattattctgccacattcataagtagcattgttttttcttattaaattgtttgatctcaaatctggaagcacgcccaagatatatcattattttttaatccaaaattttctatctcacatcataggtttatgatataaatgatttcaagttctagatattgaaagaactttacacttcccagaatctatttaacttcattccagaacaggacctctagctacagagtattattatcaagctaaaattctgccataaaataaaaaaaaaaaattgaaaaacatctattaactatctggaactgtagtcacttacctggaaaaacaacttctggatgaaaatctgggtccctcatttgctttgcagtggcaaacactggcaacacttgataatgtcttccctaagaacactacacccggtctttaggctcaaatgcttccatagaaaactgtcccaaaatacatgaagagtcataatacagacctcccttgttctttttataagtaatttcaaaattcagtgtctgactatgactttatttgagagaaaatggactccacctaggataagtttttcctgtgagtctctcactgacacctttcactttggaaaggttctagcc

SEQ ID NO: 691896 - DNA, 1482 bp, Homo sapiens
tcatagtttcacatggctgggcaggcctcacaatcatggtgaaggcaaaaggcatgtcttacatggcggcaggcaagagagaatgagagccaagcaaaaggggaaaccccttataaaaccatcagatgtaatgacagttattcactaccctgagaacagtatggggaaaccgaccccatgattcaaktatctcccaccaggtccctttcacaatatgtggaaattatggtagctacaattcaagatgagatttgggtggggacacagccaaaccatatcacagatgaaatcccaaggcagtctgctggagaattccctcatgctctggagagagtagctttttgttctattctctcccctcccccaaaattcagagggttgtaatgaatttggaggggaacagagtggacagagaatatatctgacttggattattcttactgctttctaaaacattttattggatgaggcccactcacatcatgaagggcaatctactttactcagtccactggttcagatgttaatcttgttccaaaataccctcagaaaaacacccagaacaatgtttgaccaaatatctgggcaccatggatcagaaaagttgacacataaaattaatcatcacacctttgaacttaaaagcaaaaaatgctgatcttttcctactgttttcaagcttcagtgctaatgttatcccctggggctaatgataaatctatgcctaagagaagaaaaaaataatggccatggttgaggagggaggggagaagaaaggaaagtctgattaatattcattaaacaaatacttactgataacctaccatatagcaagcaatattctaggcactatgattataatgattattctgccacattcataagtagcattgttttttcttattaaattgtttgatctcaaatctggaagcacgcccaagatatatcattattttttaatccaaaattttctatctcacatcataggtttatgatataaatgatttcaagttctagatattgaaagaactttacacttcccagaatctatttaacttcattccagaacaggacctctagctacagagtattattatcaagctaaaattctgccataaaataaaaaaaaaaaattgaaaaacatctattaactatctggaactgtagtcacttacctggaaaaacaacttctggatgaaaatctgggtccctcatttgctttgcagtggcaaacactggcaacacttgataatgtcttccctaagaacactacacccggtctttaggctcaaatgcttccatagaaaactgtcccaaaatacatgaagagtcataatacagacctcccttgttctttttataagtaatttcaaaattcagtgtctgactatgactttatttgagagaaaatggactccacctaggataagtttttcctgtgagtctctcactgacacctttcactttggaaaggttctagcc

SEQ ID NO: 691897 - DNA, 1300 bp, Homo sapiens
tcactgaattcaatcctcctcagttcacagagtagaaaatggggcccaaaaaggaaatgtcagttaagtttgttgatctgaagatcaacttttgtaataactagataattttaaaagtgccaaatttacaacctcttagctttgtgatgttatttcacctctctgagcttcagtttcctcacctataaaatgagaagaacaatggcacttcatggtaattataataatcaagtgatactatatataaaagacacagaatatggtgtttatatatatatatatatatacacacacagacacacacacacatatgtatatatacacacacagacacacacacacacacacacacatatatatacacatagacacacatgtataaatctgtaattctccgtgggaaataatagtcaagattcttatgtccaaaaactgtttatatatatataaatatgcagcctcttagataagtggtcatttttgctgcggcaaaaacttgcttgaaagtgaaaacatttgtccatgattcatataattgtgcttgaggttacagtttgctaccatgaaggctacaggcttcattttaggtttgtgtctggcaagcccgagcccacaggaggttctaaacatcaggctggtttttgaaataattccagggtgacctaagccactaaaagaggactcagctggtgataaaaggatcttggtaaacatgatcatcaacttgacaaacacatttgtttggagatatataacccttagtctgtacccctataaactgaattttcagaatagcttagtatacccaagagaatacagatcttgttcaccatctggttattagataccctgtcttcctgtacttgcatagctgggttgatgatggcatggggaaataaatcagtcacactggtcaaaaagtagttagcaaagtcctgaactagtattcacaatgtcaggaaataggattctataaatcagactttcttttcatatcggtttttataagatactctgtgaaatagatccaaatacatacacattcccatgggtaaacatgtgtttcttcatatacacaggggtaagataaagtggggcagtgtaccccttagaaagtctctgtcttaccaagtcagaaatctgttcagtttaatctcttacttagaccgctrgccgttgcaaatacaatacctaaaataatgacattgtacaacggtatgtctcagttaaactgctgatgggtctggcattatgaaaacagaacctgcaggaatcggtacctagagacttccatgttgac

SEQ ID NO: 691898 - DNA, 551 bp, Homo sapiens
aactcactgatttaagtggctaaactcagggttcctttggaaatgttaatagcagtgcattgaaattttgttttgagaacatttagtagagaaaattttaaattatttcctgcaattaataaattttatgtgctaatactttaacattatcagtgaaaatcaaggtagaaaatagattatatgtgtatttcttccaaaattaaaataacaattaaatacagttttatgcttgaggaaaaaagagatattccaaattcctctgccacttacagtgcatagttacatwaaaaaacataatctaatcctatctcattctaaacaaaagctttagaaaaatattcttagcgaatacaaacacatacaggcttcatttatcatttggctctgtaactgcccaagagatgccatcatgaccatcattaggagacgcccttccacaatttcttctcattaaaatgttgggcttccagatggaagactaaaagataatacaggagtaatgatggatgaaggcagaataatggaaaagcaacaaaagcaatatatagctg

SEQ ID NO: 691899 - DNA, 1465 bp, Homo sapiens
  misc_feature 265, 295: n = A,T,C or G
ttttttattgatctgtccaattgaaaatcatgatgatgaaatcttgaattttataaagagcaatcaaacaaaagtgcttctatgaattgaatagcttaatctaaatgttaagtttattgatgcataggatgcattatacaacagagtctgagtaatgtatgtaggaaagcataacgtggcagatgataaagatgttgagatgtctgtctgagatttacagagtctttggattactgagtaatgacacaaatgacacttgggccanaccaaaattttgttattaaaggagtaaaanttaaacagaagaatataggagcaatacgttgccaagttcatagataaatatgaatattttatatatttcaagtgaagtgtgaggatgttacatagagctctttaaggtattttcttgtgtaaggtaatttagaatataattatttggtcattgcaatataagttaatttcctaaaatcaaaatgatctccatttattatttttgatttttaaccccagaaaattatcccttgggattctacaatcaacacactccatattgcactgaggttgggttgacactgtagaatacgtattgtgtagcctgggaatacatttttgtttgccagtttttaaatcttatttaaggctttagtttgcatatggctgttagcttcatatcatacaattttctacacagtgttgaatggttataattgtgatgacagaaataatatcaatcaagccattattaagttctttgctctaattcatttcaattttgtaaatgttaatatttttattgaaaaatatttctcaattaaaattctccttgtagttctaggctcttctatgtcatgaggaagtgattgtctgtttttgtgtggctatttgttttgctttgtgttatatttttacaaaaatataaggtacaaaattaaacaattaggcgttaacatatagacaaaacataatttttttcaaacagtatttccacagacacccatcatcattttaccttgataatctcagccttatacaattacagaaatgagggtagtagtaggtcaacagttatagaaaagagaaaattcagaaaaataagaaagatactaagggccaggacatatttgagggagacataatttcctaatttgagtaactattagaaatacattcatgaaatatttacatatgatattgctgtggttagatgaactgaccaatatgaagtaagacactctcaaagtaaattatttttgaataaaattctccaattgcttcaggggtaaagggaaaggtaagaataatttaataagaaagttctcttacaacttgccctgcagcttctttttwaaaaaaatcctgaactaaaatcctttcttgatgcttgaccttacaagttaattttttcccaaatactttactgtgagtaccattaggcttaattagtgtgataaaatctgaaaaa

SEQ ID NO: 691900 - DNA, 410 bp, Homo sapiens
taatttttgyatttttagtagacatgcggtttcaccatgttagccaggctggtctataactcctgacctcaggtgatcctcccacctcggcctcccaaagtgctgggattacaggcatgagcgtctgcacccggacatggaaggaaggtgtgtaattcttgaacccagggctatctctctccagtcatcctttgagttggaggatggtgtctgcaacttgaaatgaggtcatcctaccaatataatgctataagctctagatttttcttcaatgggtttatatttttctggcaccacaaattcaaccaaccccaccctgtagaccacagacagggtgtagacagaatctcagatccggtgccttaaaacaattttttttaaacctggaaatgtttctcttcaagcccctt

SEQ ID NO: 691901 - DNA, 591 bp, Homo sapiens
attttcaggtgattcaggtttacattaaagtatgaaaagatgttatagactatgtccctgaatttttccattttagaaaattactgacagcaacaccattcatgggtttgagtcatgaatacaaacatctagatccatcaacacctgcagctgtcatagtcactgtgttaaacataggtgcaagcaactggccaatgtgtctcctggtgatgtcacatccaaatatttacacattaaaatatatattattttatgctcagttattttatttttatttctcttttacattactgttcaggcattaattttattttcaagctgtgtaagtcagccaactatatttcctatggatttcattcggggagagtaaatgaaatattatagagtatttgttacaaaaagggagcattgggtctaagagaattgacaaccaacggttatgagaagccatccaacaagtttatascaggaaagtaacatggtcagatttgtttcaagtagattattctggtggctatttggaagatggatttaggatcacaaggctggtggtagagaagtcaatgtgggagaatactactatagtccaag

SEQ ID NO: 691902 - DNA, 714 bp, Homo sapiens
taaaacaagtgcaatctctgaattctacttagaggagataggstttttctattcagaacatggatcttaatgttaatgacaggtttagtttcactttgttgccctggctagtttcgaacttctggtttcaagtgatccgcccaccttggcctcccaaagtgctgggattacaggtgtgagccactgtgcccggcctgttgatttatttttgagtggctcccatgtaccaggaactgtgccagacacaaaggatacaaaggcagataacagccttatagaaggcagggtagggtacggcttaaaaggacactgaaataaaaggttacgattgtacccttgtacaaaacatagtgtgtctacaggtgttttatcttttgtttttttttcgtgtgcatgttgtttttggtcctgaaagaggagagctgacggggatatgaacaccatctgtgaaaccaccaaggaaacagatggcggtaaacacaggtttattcaaaccaaatcctagtaagctagaattacaggctactctttgaaatccaaaagagatacacttaggatacataagattaaatatgaatttatactgttgtaaacttatgaaacctgaactcaagagatagtataggttgaaacagaagtgaagaaagggatataacaccaatttaacaggatttttaggatactatcaaagttctaagccccacaaagcaacaa

SEQ ID NO: 691903 - DNA, 714 bp, Homo sapiens
taaaacaagtgcaatctctgaattctacttagaggagatagggtttttctattcagaacatggatcttaatgttaatgacaggttyagtttcactttgttgccctggctagtttcgaacttctggtttcaagtgatccgcccaccttggcctcccaaagtgctgggattacaggtgtgagccactgtgcccggcctgttgatttatttttgagtggctcccatgtaccaggaactgtgccagacacaaaggatacaaaggcagataacagccttatagaaggcagggtagggtacggcttaaaaggacactgaaataaaaggttacgattgtacccttgtacaaaacatagtgtgtctacaggtgttttatcttttgtttttttttcgtgtgcatgttgtttttggtcctgaaagaggagagctgacggggatatgaacaccatctgtgaaaccaccaaggaaacagatggcggtaaacacaggtttattcaaaccaaatcctagtaagctagaattacaggctactctttgaaatccaaaagagatacacttaggatacataagattaaatatgaatttatactgttgtaaacttatgaaacctgaactcaagagatagtataggttgaaacagaagtgaagaaagggatataacaccaatttaacaggatttttaggatactatcaaagttctaagccccacaaagcaacaa

SEQ ID NO: 691904 - DNA, 714 bp, Homo sapiens
taaaacaagtgcaatctctgaattctacttagaggagatagggtttttctattcagaacatggatcttaatgttaatgacaggtttagtttcactttgttgccctggctagtttcgaacttctggtttcaagtgatccgcccaccttggcctcccaaagtgctgggattacaggtrtgagccactgtgcccggcctgttgatttatttttgagtggctcccatgtaccaggaactgtgccagacacaaaggatacaaaggcagataacagccttatagaaggcagggtagggtacggcttaaaaggacactgaaataaaaggttacgattgtacccttgtacaaaacatagtgtgtctacaggtgttttatcttttgtttttttttcgtgtgcatgttgtttttggtcctgaaagaggagagctgacggggatatgaacaccatctgtgaaaccaccaaggaaacagatggcggtaaacacaggtttattcaaaccaaatcctagtaagctagaattacaggctactctttgaaatccaaaagagatacacttaggatacataagattaaatatgaatttatactgttgtaaacttatgaaacctgaactcaagagatagtataggttgaaacagaagtgaagaaagggatataacaccaatttaacaggatttttaggatactatcaaagttctaagccccacaaagcaacaa

SEQ ID NO: 691905 - DNA, 714 bp, Homo sapiens
taaaacaagtgcaatctctgaattctacttagaggagatagggtttttctattcagaacatggatcttaatgttaatgacaggtttagtttcactttgttgccctggctagtttcgaacttctggtttcaagtgatccgcccaccttggcctcccaaagtgctgggattacaggtgtgagccactgtgcccggcctgttgatttatttttgagtggctcccatgtaccaggaactgtgccagacacaaaggatacraaggcagataacagccttatagaaggcagggtagggtacggcttaaaaggacactgaaataaaaggttacgattgtacccttgtacaaaacatagtgtgtctacaggtgttttatcttttgtttttttttcgtgtgcatgttgtttttggtcctgaaagaggagagctgacggggatatgaacaccatctgtgaaaccaccaaggaaacagatggcggtaaacacaggtttattcaaaccaaatcctagtaagctagaattacaggctactctttgaaatccaaaagagatacacttaggatacataagattaaatatgaatttatactgttgtaaacttatgaaacctgaactcaagagatagtataggttgaaacagaagtgaagaaagggatataacaccaatttaacaggatttttaggatactatcaaagttctaagccccacaaagcaacaa

SEQ ID NO: 691906 - DNA, 714 bp, Homo sapiens
taaaacaagtgcaatctctgaattctacttagaggagatagggtttttctattcagaacatggatcttaatgttaatgacaggtttagtttcactttgttgccctggctagtttcgaacttctggtttcaagtgatccgcccaccttggcctcccaaagtgctgggattacaggtgtgagccactgtgcccggcctgttgatttatttttgagtggctcccatgtaccaggaactgtgccagacacaaaggatacaaaggcagataacagccttatagaaggcagggtagggtayggcttaaaaggacactgaaataaaaggttacgattgtacccttgtacaaaacatagtgtgtctacaggtgttttatcttttgtttttttttcgtgtgcatgttgtttttggtcctgaaagaggagagctgacggggatatgaacaccatctgtgaaaccaccaaggaaacagatggcggtaaacacaggtttattcaaaccaaatcctagtaagctagaattacaggctactctttgaaatccaaaagagatacacttaggatacataagattaaatatgaatttatactgttgtaaacttatgaaacctgaactcaagagatagtataggttgaaacagaagtgaagaaagggatataacaccaatttaacaggatttttaggatactatcaaagttctaagccccacaaagcaacaa

SEQ ID NO: 691907 - DNA, 1447 bp, Homo sapiens
ggccctgcatagtcccccacccccactcctagaaccatcttaggaggggaagagttagttgggttcagagaagttgggagggacataattagaccatctccacttcaaccagatagttctgcttttatctgttttatttactggtatcctcagaaagtctgattaaatgcttcttttgcttaaatactgatgacggtgatgcctaagttccctcttgactctagggttctctgaaacagaacaaatgcaagggaggtagaattcataacttcacaggttctgtaaaaaatgacataagtaccatcatcttaaaaaaaagaaataatacattcttcagtactttgtattgattttttcttcaaaaaatgaatagctagtggattcaaagcaagctattattcttttttttttttcctgagacggagtctcgctctgttgcccaggctggagtgcaatggcactatctyggctcactgcaatctctgcctcccaggttcaagtaattctcctgcctcagcctcccgagtagctgggattacaggcacccgccatcatgcctggctaatttttgtatttttagtagagtcagggtttcaacaactcctgacctcaggtgatccatcctcctcagcctcccaaagtggattacagtcatgagccatcgcgcctggccgcaagctattattcttgacatgtttcttcttcggaagccataaagtggtgatgatgccaccttttcagctacatatgaggtagggaagtctttatgtttctaggaatcacaagaggtttctgtcaaaggaaatgaaggagagtccctactgtgttttagtagctccctactggtggctatcaggacaccttccagagtgggctgtgaggccttactggtctcactacagtgagggaaagaacactgcttccttctgaaggctgggacaaatgcagctatcacagcctgcccttctacaatctctcaacactgtggtacgtgtgatagacctaacttagcgccatgccaagcctgatgggaatctcctgtaatttttgtaaggagagctttttagtcagggttcagcccagaacagaaactgcccaaatatttttaagaagaaacagagttactatacagtaactgcctcttatcatgctcagtcttcatgagctcagtgcccagagctttgatgcttctgcctcacttctgctctccaaatctcatgcaagcacatctaattggcagaaaataatttgcatccagctccctagctgcaaagattatctgggaaatgtagtttttagccttctagcctctgtagtacaggaacacccactggaaggaaatgctgggtgcccagagaccatatccagccacattttcctttactcaaacatttgaccagagatcactagtactggtaacacctgccaacattatttctcatgaggg

SEQ ID NO: 691908 - DNA, 1447 bp, Homo sapiens
ggccctgcatagtcccccacccccactcctagaaccatcttaggaggggaagagttagttgggttcagagaagttgggagggacataattagaccatctccacttcaaccagatagttctgcttttatctgttttatttactggtatcctcagaaagtctgattaaatgcttcttttgcttaaatactgatgacggtgatgcctaagttccctcttgactctagggttctctgaaacagaacaaatgcaagggaggtagaattcataacttcacaggttctgtaaaaaatgacataagtaccatcatcttaaaaaaaagaaataatacattcttcagtactttgtattgattttttcttcaaaaaatgaatagctagtggattcaaagcaagctattattcttttttttttttcctgagacggagtctcgctctgttgcccaggctggagtgcaatggcactatcttggctcactgcaatctctgcctcccaggttcaagtaattctcctgcctcagcctcccgagtagctgggattacaggcacccgccatcatgcctggctaatttttgtatttttagtagagtcagggtttcaacaactcctgacctcaggtgatccatcctcctcagcctcccaaagtggattacagtcatgagccatcgcgcctggccgcaagctattattcttgacatgtttcttcttcggaagccataaagtggtgatgatgccaccttttcagctacatatgaggtagggaagtctttatgtttctaggaatcacaagaggtttctgtcaaaggaaatgaaggagagtccctactgtgttttagtagctccctactggtggctatcaggacaccttccagagtgggctgtgaggccttactggtctcactacagtgagggaaagaacactgcttccttctgaaggctgggacaaatgcagctatcacagcctgcccttctacaatctctcaacactgtggtacgtgtgatagacctaacttagcgccatgccaagcctgatgggaatctcctgtaatttttgtaaggagagctttttagtcagggttcagcccagaacagaaactgcccaaatatttttaagaagaaacagagttactatacagtaactgcctcttatcatgctcagtcttcatgagctcagtgcccagagctttgatgcttctgcctcacttctgctctccaaatctcatgcaagcacatctaattggcagaaaataatttgcatccagctccctagctgcaaagattatctgggaaatgtagtttttagccttctagcctctgtagtacaggaacrcccactggaaggaaatgctgggtgcccagagaccatatccagccacattttcctttactcaaacatttgaccagagatcactagtactggtaacacctgccaacattatttctcatgaggg

SEQ ID NO: 691909 - DNA, 611 bp, Homo sapiens
tggagttggggctggggcagggaacaaagccccacctaaaatatccccactgcccacagagcccccctccatcagctcttctgcaacagagtgtacatgcctttggactgttgtaccaaaccagagtctacccgcctcgcacagcaaagcctaattctgacatcagggctgcagtgaagagaaaatgaggcgtttcgtgcaggactccaaacagggagaattgggcagctcagctcgtgcttaaaacccagactccctgacggcttcccaatggcttgtgggcaagggyttttaaaggtggggaggatctgggcacggcactgacgcctataatcccagcactttgggaggccgacgagggtggatcacttgaggccaggagttcgaggcgagcctgggcgacatggtgaaaccctctctttactgaaaatacaaaaaattagctgggtgtggatgtgcgcgcgcacctgtaatcccagctgctccagaggctgaggcaggaaaatcgcttgagcccaggaggtggaggttgcagggagccaagatcacaccattgcactccagcctgggagacagagcgagactccatctcaaaaataaataaataaata

SEQ ID NO: 691910 - DNA, 302 bp, Homo sapiens
tctgttccccatggcgagcaacgtaaatcggggactcgtcttggccaaggggaccatttgcagtgtttggctcttatgacgaaygtctttgtatataaaaacttttctgcatttagaaatatttcctcaggccagatttttctggaccaaaaggtaagcatgtcttttaagccagtttatgttccaaaagggttggtcccattttcactcccaccagcaacccagcaatggggagacctggaaaaaaaaaaaaagccttgtggcgggcgtggtggctcacgcctgtaatcccagcactttgg

SEQ ID NO: 691911 - DNA, 632 bp, Homo sapiens
taatgtaactttgtttaacctaacactttgaacttaatttgaccatggaacacaattcctcacgtcatcctactccaagaaataccaattaatattgcatagaatattaatgacctttggtagataatttggaaaccacaaattgagaggtcttcaaagcctgtttcagctctaggaatctggatcagaagctccaggagggtagggaactagatcccactgctttactttatccccagtgcttgacataaagtaaatgatcaataatatttgcaaaatcaatgaatgaactgtgatcgtttaggtctatttctcactccttgcaggaggcatgggctctgtctacccccttctgaagttatgtgcatatcaaatttaagcaactccagctacagaaaggagatagggaccttttgtagtgtaaaaacacaagggaattatgctgagtctttcttggcaatgtacgagtgtgtcgtcttgaagatatttgaccctaataggattgcttttccatttcctcctgttttcataagtcaaagtcttattcagattcatctgggaaaaaagaaraaaacaaaattagttggaaggaaatgactgacatccccattctgaagatcaaagagaaggaa

SEQ ID NO: 691912 - DNA, 654 bp, Homo sapiens
cccccacaaaagcattctccaaagaggctggctgactttttaaaactcaacacttatagctatctctgatttttcccttccccactctcttacccagactaacccctattgctctttcaagtttctgataagatattgtctcattccttattctcattgccttttaacccactaggttagaagctctgtgaaaggcaatgtattagttttttgtagctgctgtaacaaatcactacaaaattggtggcttacaacagtagaaatttattctttctcagttttggagaccaaaagttggctgttttggtgggctgaaatagagytgtgggaagggccccactccagatggaggctctgggggagaatcctttttgtggccttttccttcttctggaagctgtcctgcctccgaggcccacggctctgcacctccccttgctttatcatattgccttcttcctcttctctcacattccctctgcatccctcttagaaggacactgtgatttcattcagggcccacccagataatccagaatattctccccacaacaagatccttaatttcatcacatctgcaaagtctcttttattatatagggtaacatattcaccggttctgtggattaggacttggatcattatttgtggtca

SEQ ID NO: 691913 - DNA, 598 bp, Homo sapiens
tagttccttgatgctttcttccatagtgtatcagagtgctggtagaaaattagctcactttttgttggtgtgttctgtgatgaaattgtggacagaaattagatggagctttatagtttccatctgataatctgtatctgtaggtgaatgaaaatagtattttaaataacttaggcagaatgttattaaacagcgattgagagctaccattyagtagttttaatgttgttacctttctagaatattttctttattttacttctcggtgaggatctgttttcagcttgatccctattcagaaagtcttatcctaagggattttttttcaggctttgctgtaataatgctgttacttcctccatctcccacttatttctcactcactggtctaaaggtctagtggttctgatggaccctgctgtgctcagttgggcttagctgggattggctgagcttggatctaggctgcaggttgtatttacatttggtctaaaagcatccttattctggaaccagtgattccttaaggcatgctcttctaatggtgggtacaggagtgtaaggggctggtgaaacttgccaggcctcttaaaccctc

SEQ ID NO: 691914 - DNA, 2597 bp, Homo sapiens
aggttacaggaacacttgcatcttgctagttggtgcacagatctatgatgggtttcagcaacatctataaaaattacaaatgtacatgccctcttgccccacaattccaattttaggaacctattttacatataaatgcacacattctacatataaatacatacatattctacatatacatttatgcaaaatgacctacatacaaagttatatattttaatattatttcagatagcaatagattcaaaacaaaccaaatgtcactaatagggaattggttgaataaataaaagaatattctgaaactgttaagaatgcagtaaaacaattttttatctactgagacaaaacaatctcaatataagttaagtggtaaaacaagatacagcatagtgtgtatagtatgtttccattgtgtcaacaagagaggaaagaatataaatgtttgattgtactctccagaaagattcataagaacacaataacacaggttacctgtgggaagctggagacgggtagaaggagacttttcacactctactcttttgaatattttacattttgaattatgtgaatgcattacctgttccaaaaaataagtaagtagttacatttaacaaaaaatattgcaagaagaggaggctgctttctcattccctagttacatgttacattttctggtgtgctctttctgcctatctgaggaagatgaggaaagaaatggtaagagaagacccagcagggagcagtaggagcctggtagggctgggaagcttgagactctcaggggccagtgaactcggaagatgtcttgaacaagaggcagtagttgatggaagtcagaaagaggtggggtcggaggctgtctctgccttcagaagattgtgtcaagggagagcccaggccacccatggagaagcctttgcataccacaatatcagccaatccgtcttagcaggagacaaagacagccaagataaactaaatctgcagttaagtaacagatgcttttctttccatcatcttcctctgcaaggcaacactccaggagaaaaagggagccagaagatgggtgagagaaggagagagaggacagatgatgcccgtctacacatccggtcccttagtctagtccagagggcaaagaaagaagtagataagcagtaaagtgggcatgagatggagatgtggaccttttaatggacctttcacttattatctttttcaataccttgttcatctatgcaatamgtaagtaagatgttagtaataaagcttgataatgtaacaaatatccatgaggccactatccaacccaagaacaaaaacattacaatatcatttttaattgtactaaaatacacacaacataaaatgtatcattttaaccatttttgaatgtatagttcagtagcattaagtaaattcacattgttgtgcaaccatcaccaccatccgtctccagaattcttttcgtcttgtaaaactgaaaatttgtacccattaaacaataattccccattcctccctcgccactgccctggaaaccacaattctactttctgtctctataaatttgattactctaggtacctaaaaaaagtgtaatcctaaaatatttttctttttgtaactgtcctttttcacttactgtaattcaagtttcatccatattgcagcatgaccacaaagtttggaaaccagcccaaaatattaccaagccataggaaaaggaggatccacaaaatacagttgatttaaaaatgaatgcatttcatgtttgtgtctcaactaagtacagagtcttctcaacaaatcagttgctgctgatatttctcctgctgatacatttaatcctgtggaatatcagcagcaactggtttgttgagcaaactggtctgtctgctgaagtccaaaattaacaaatacccagtcctttacagaaatattgccatgttcttctagaatttctttctttaaaaataaagaaccctttctttcctaatttgaaatgtctatttatagtttgaaaatcaggcaaatacctatgcagatgataatgtcagaaactgttttcatctctgataagccgagtttaaacaactctgtctgagggaacattctttgagctcaagttcctcctccaattatctctaaatagacctcaaagcaaatgaagatactctcaccataggtaacttgcagaaaatttacagatgcaatcttttctcttttttgctttcctcaatcattgtcctactcataatgaaaatcttaagtgaaatagttaagtatcatatttcaatactctcctaaagtaaaaacatggagatggtagagtcagcaaaaacttttggagtcagcaaaaatttaatgtgcatgcgctctgacattgttcattaggtattctgattttatatttgcagtaggggtaaaattgctcaacaataaatatataagattatgtctagaaatttagtatgtccaaagagccaggcacagtggctctcacctgtaatcccagctacttggtaggctgtggagggaggatcactggagtccaggagtttgaaaccagcctgggcaacatagtgaga

SEQ ID NO: 691915 - DNA, 645 bp, Homo sapiens
ttgaacagactcatcacgtcccaggacataagcacatctctgtgggtttatttttatttttatttttttaaccaaaggtgcataaccagaatgtaascaaaaaggactaattgaagtatattctacacagtaaatgacatgtactctgcaaaaatgtcaaggtcatgaaggctgaagaatggttccaaattgaaggagactgaagaaagacattactaaatccgatgaatgattctgaattgtatctgggtcagctagttgcttggctgctctaataaggaaggctccactggtcttggttccaagttgtaggttgagtctggtaccacatgttcacattctcagcagctaactgaagcacatttttccacagtcaaaattcaagacaagttcaactgcacaaggatatttcaagtttctgctcacttcacatctaaagtatctcattggctaaagcaagtcacaagaacaacgccaatgtcaaggggttcatatggatgcataatactgtcaccacagggcagtgaagaattgagatcaataattcaagctaccacactagccaagtgccttacacgttccttggctcactacatggtataacacacagtggcaaattcccatctcaagtgacaattagtgcca

SEQ ID NO: 691916 - DNA, 615 bp, Homo sapiens
ataattattattaaaattagaaaaaatagatcttccacttttgattaggatgtagaagtataaaaagcaagcttgttctcatgtatatatttttaacagatagaataacaccatatatttctcactatgtcataaaaaaagggccaacatcacaaattcttatagagctgatttacacgaagaataagcccctcacagggaagtagaaagctgtttattcaataacaaagacaagtggataatgtatctgttacacagtatttcatgtatttacaattttcaactaggcgaatatttcctagatagggcaaaactattaattataaaggaaattgaatgacaratttaatcaaaataaaagcaaacatttatctaagacactattaaaaatgaaatgtcaagatacagaccaaaataatatttagaatgtttcagacatatttatccaataaaagacttgtgtcagaatgcataattactcctaaaaatgaaacaaacaattaaaaatgagtaagcatttacgaagacacttttctctctctttctctctcacacacacacacaatatacaatttactgataaatacaaaaaaattaataactttatttttattc

SEQ ID NO: 691917 - DNA, 601 bp, Homo sapiens
aggtgggaattgaacaatgagaacacatggacacaggaaggggaacatcacactccgggaactgttgtagagttgggggaggggggagggatagcattaggagacatacctaatgctaaatgacgagttaatgggtgcagcacaccaacatggcaaatgtatacatatgtaacaaacctgcacgttgtgcacatgtatcctaaaacttaaggtataataataatttwaaaaaaaagaaaaaaaaaagatccaaagaaagggtggtagacaaaggtctagctcctaggctgagggcctcagggcagaatgcggcttcatcctgagtcaatgatcttctcaggtagttgcttcatatatacccccttcccaacaccagagctgctcttagactgaggtcaagtgtgagccagagatggctggagatatgagaacaagagcaaagcggacaggaaagggctaggagggatcgcaccaacacactccagcctgggcgacagagcaagcctctgtctcaaaaaataaaaaataaataaataaatgatagtggatttctagtttgaatcgaaagttcaggaaaccaatcttcactatcaaaacggaa

SEQ ID NO: 691918 - DNA, 607 bp, Homo sapiens
tgaataaatgagtgaataaatactcaggatttttaacaaaagccaccaaagaaaacatgcttaatttattcaggaagtggaaatcttgggtgggatgaattccttatgagacctgcgagaagcgcaggtgatagtttgtgtgtgtgttcgttgtgcatttttattgatataaaacagaagcactggaaagtgtgggaagtgcgcatgtcatgaggatgcaggcccttggctggcttgtttatttcaggggtggttaggcattgtygccctgggtggaggggtcagcgacgagccctctgaggccatcctgtgacatcccctgggcacctcctagtgtttgtcattccccacgccccagggccagtgtccttggccttggagatctcaggctctgctggtttccccacctccctggctgtccctttttagtcctttgccacctcctgaccagacactgaacatccttggggctggtctccttcatttcttgctatattcttttttttttaaagacggaatctcgctctgtcacccaggctggagtgcagtggcatgatatcggctcactgcaacctccgcctcctgggttcaagtaagtctcctggct

SEQ ID NO: 691919 - DNA, 2389 bp, Homo sapiens
ctgtcacccccaacttccagatttctttaaaagtcaaagagaaaggaaattttcaggaaggagatcatgtctaagagctttttattagtctcatcttccaatttcctgtagactcaagcttctttctttctgtcgtgcggggtttaatatccagtggctgtttgacaacagcaccaggaaatggaatttccatcctgattctgcctggaaccttgggcaaagtgcccaaaccttctgcctcactctcctcctgggagtaacagtccccaccctacagccttctggggcaagcaacagagacctaatatgaaaatggaaccagagagttctgatggatgtaaagtcctcaataaatgcatgcaggtattatttgttaatttttgccataggcaggctgcagcccccaggcaaactctgagtagaaggagcctataaaaacaagcctcctgcttctctctctctctctcattttttttttttttaattttttttttagacgtcttcctctgtcgcccaggctggagtgcagtggtgcgatctcggctcactgcaaactccgcctcccgggttcatgccattctcctgcctcagtctcctgagtagctgggactacaggcgcccgccaccatgccygactaattttttgtatttttagtagagacggggtttcatcgtgttagccaggatggtcttgatctcctaacctcgtgatccgctctcctcagcctcccaaagtgctgggattacaggcatgagccaccacgcccagccgcctcctgcttctctcttgaagcctgggttctgctctggtgtctccccagctcattgccggttgatggcacattgggctccctgtcagtcaggttggccacgtgaggaggagtcaatgaggcactgcttcctgccaagctgaggctgcccttcttataataaggaggtgagcctgtctcagggaaggttcttttcctaaatttcaggtgggattctaaacaggacaccactgattttttaaaaaatgaacctatcaagacatgcattttcatgggtgtaatcctgtttgaagtggtcacatttggggtttttatgtacttgctcctattactggtgaaacttctgtgaatgggctacagaacatgaacagcctcagtggtggcagagtctcatgatttcaagttaccttatagttgagaaatagccccgcagggtaggtgatggcgtactccccacttgccattctatctggaacccggaaggtggacaatccatattcactgaaatgaaccaagaaatgagactgtggctataaggttgaggatgttcatttgcttgtgaagcttctaaacaagatcttccgaacagttaagagaacacttggatatcattatgatggtgtgtttgctttgaaaaataaacatgaaagagaaccattatgttatagctccgctttctagtgagtaccccgtcaaggcatcatatccctctgtgtagcaatggaaaggcatttaacccaatgattgaacctctctgtgcctcagtttcctcatctctaaaataataatagaacctagctcatataactgttaagggggatcaaaggaggtaaaatgttgtgacaaaagttgcataacacagtggagtgtatttcattcattcccaagtctgaacttacgtgtagaataatgccacaatctatggccctgtgtcctgaaatgccattcctccaggcccttttggagcaagagctccaaggggctgttccctcagataataacctaggtgattggaaaccttggctagggagcacagacctggaggtcggttccagtgtgggacagttggtcatatttcccagtcaccctctgccatgcaaagtgggtgaggcagtggctctggccagttcattggcaggtggcaaaaccttgtctagtctttggcattgggcatgtgataccatcgatggccagtaggtggcacaagttgtccatcactgccgccagctttgctccattgggtgctttctcagaaggggaagatctatttctaatccagtcctggctttatggcaatgcttaatcacatggaagggaacatgcaataactactggtatttctgtaaacatgcatgctaagaagcagctgccagttggaaatgaggatggagggaacactcagtgagaggtctcctgaggacaatctaaaaaaggaaaaccctgagggttttaaaattttagagccagttaacctttgtgactcatggagagaaacgtttagaacccagaaggacaatgagaatacatcctgtggattgtaacctggtccaaggtccaccttgccctctccaccttccttcagctgtgaagtttaggaaggagagacaagatccccttgc

SEQ ID NO: 691920 - DNA, 2389 bp, Homo sapiens
ctgtcacccccaacttccagatttctttaaaagtcaaagagaaaggaaattttcaggaaggagatcatgtctaagagctttttattagtctcatcttccaatttcctgtagactcaagcttctttctttctgtcgtgcggggtttaatatccagtggctgtttgacaacagcaccaggaaatggaatttccatcctgattctgcctggaaccttgggcaaagtgcccaaaccttctgcctcactctcctcctgggagtaacagtccccaccctacagccttctggggcaagcaacagagacctaatatgaaaatggaaccagagagttctgatggatgtaaagtcctcaataaatgcatgcaggtattatttgttaatttttgccataggcaggctgcagcccccaggcaaactctgagtagaaggagcctataaaaacaagcctcctgcttctctctctctctctcattttttttttttttaattttttttttagacgtcttcctctgtcgcccaggctggagtgcagtggtgcgatctcggctcactgcaaactccgcctcccgggttcatgccattctcctgcctcagtctcctgagtagctgggactacaggcgcccgccaccatgcccgactaattttttgtatttttagtagagacggggtttcatcgtgttagccaggatggtcttgatctcctaacctcgtgatccgctctcctcagcctcccaaagtgctgggattacaggcatgagccaccacgcccagccgcctcctgcttctctcttgaagcctgggttctgctctggtgtctccccagctcattgccggttgatggcacattgggctccctgtcagtcaggttggccacgtgaggaggagtcaatgaggcactgcttcctgccaagctgaggctgcccttcttataataaggaggtgagcctgtctcagggaaggttcttttcctaaatttcaggtgggattctaaacaggacaccactgattttttaaaaaatgaacctatcaagacatgcattttcatgggtgtaatcctgtttgaagtggtcacatttggggtttttatgtacttgctcctattactggtgaaacttctgtgaatgggctacagaacatgaacagcctcagtggtggcagagtctcatgatttcaagttaccttatagttgagaaatagccccgcagggtaggtgatggcgtactccccacttgccattctatctggaacccggaaggtggacaatccatattcactgaaatgaaccaagaaatgagactgtggctataaggttgaggatgttcatttgcttgtgaagcttctaaacaagatcttccgaacagttaagagaacacttggatatcattatgatggtgtgtttgctttgaaaaataaacatgaaagagaaccattatgttatagctccgctttctagtgagtaccccgtcaaggcatcatatccctctgtgtagcaatggaaaggcatttaacccaatgattgaacctctctgtgcctcagtttcctcatctctaaaataataatagaacctagctcatataactgttaagggggatcaaaggaggtaaaatgttgtgacaaaagttgcataacacagtggagtgtatttcattcattcccaagtctgaacttacgtgtagaataatgccacaatctatggccctgtgtcctgaaatgccattcctccaggcccttttggagcaagagctccaaggggctgttccctcagataataacctaggtgattggaaaccttgrctagggagcacagacctggaggtcggttccagtgtgggacagttggtcatatttcccagtcaccctctgccatgcaaagtgggtgaggcagtggctctggccagttcattggcaggtggcaaaaccttgtctagtctttggcattgggcatgtgataccatcgatggccagtaggtggcacaagttgtccatcactgccgccagctttgctccattgggtgctttctcagaaggggaagatctatttctaatccagtcctggctttatggcaatgcttaatcacatggaagggaacatgcaataactactggtatttctgtaaacatgcatgctaagaagcagctgccagttggaaatgaggatggagggaacactcagtgagaggtctcctgaggacaatctaaaaaaggaaaaccctgagggttttaaaattttagagccagttaacctttgtgactcatggagagaaacgtttagaacccagaaggacaatgagaatacatcctgtggattgtaacctggtccaaggtccaccttgccctctccaccttccttcagctgtgaagtttaggaaggagagacaagatccccttgc

SEQ ID NO: 691921 - DNA, 2389 bp, Homo sapiens
ctgtcacccccaacttccagatttctttaaaagtcaaagagaaaggaaattttcaggaaggagatcatgtctaagagctttttattagtctcatcttccaatttcctgtagactcaagcttctttctttctgtcgtgcggggtttaatatccagtggctgtttgacaacagcaccaggaaatggaatttccatcctgattctgcctggaaccttgggcaaagtgcccaaaccttctgcctcactctcctcctgggagtaacagtccccaccctacagccttctggggcaagcaacagagacctaatatgaaaatggaaccagagagttctgatggatgtaaagtcctcaataaatgcatgcaggtattatttgttaatttttgccataggcaggctgcagcccccaggcaaactctgagtagaaggagcctataaaaacaagcctcctgcttctctctctctctctcattttttttttttttaattttttttttagacgtcttcctctgtcgcccaggctggagtgcagtggtgcgatctcggctcactgcaaactccgcctcccgggttcatgccattctcctgcctcagtctcctgagtagctgggactacaggcgcccgccaccatgcccgactaattttttgtatttttagtagagacggggtttcatcgtgttagccaggatggtcttgatctcctaacctcgtgatccgctctcctcagcctcccaaagtgctgggattacaggcatgagccaccacgcccagccgcctcctgcttctctcttgaagcctgggttctgctctggtgtctccccagctcattgccggttgatggcacattgggctccctgtcagtcaggttggccacgtgaggaggagtcaatgaggcactgcttcctgccaagctgaggctgcccttcttataataaggaggtgagcctgtctcagggaaggttcttttcctaaatttcaggtgggattctaaacaggacaccactgattttttaaaaaatgaacctatcaagacatgcattttcatgggtgtaatcctgtttgaagtggtcacatttggggtttttatgtacttgctcctattactggtgaaacttctgtgaatgggctacagaacatgaacagcctcagtggtggcagagtctcatgatttcaagttaccttatagttgagaaatagccccgcagggtaggtgatggcgtactccccacttgccattctatctggaacccggaaggtggacaatccatattcactgaaatgaaccaagaaatgagactgtggctataaggttgaggatgttcatttgcttgtgaagcttctaaacaagatcttccgaacagttaagagaacacttggatatcattatgatggtgtgtttgctttgaaaaataaacatgaaagagaaccattatgttatagctccgctttctagtgagtaccccgtcaaggcatcatatccctctgtgtagcaatggaaaggcatttaacccaatgattgaacctctctgtgcctcagtttcctcatctctaaaataataatagaacctagctcatataactgttaagggggatcaaaggaggtaaaatgttgtgacaaaagttgcataacacagtggagtgtatttcattcattcccaagtctgaacttacgtgtagaataatgccacaatctatggccctgtgtcctgaaatgccattcctccaggcccttttggagcaagagctccaaggggctgttccctcagataataacctaggtgattggaaaccttggctagggagcacagacctggaggtcggttccagtgtgggacagttggtcatatttcccastcaccctctgccatgcaaagtgggtgaggcagtggctctggccagttcattggcaggtggcaaaaccttgtctagtctttggcattgggcatgtgataccatcgatggccagtaggtggcacaagttgtccatcactgccgccagctttgctccattgggtgctttctcagaaggggaagatctatttctaatccagtcctggctttatggcaatgcttaatcacatggaagggaacatgcaataactactggtatttctgtaaacatgcatgctaagaagcagctgccagttggaaatgaggatggagggaacactcagtgagaggtctcctgaggacaatctaaaaaaggaaaaccctgagggttttaaaattttagagccagttaacctttgtgactcatggagagaaacgtttagaacccagaaggacaatgagaatacatcctgtggattgtaacctggtccaaggtccaccttgccctctccaccttccttcagctgtgaagtttaggaaggagagacaagatccccttgc

SEQ ID NO: 691922 - DNA, 2389 bp, Homo sapiens
ctgtcacccccaacttccagatttctttaaaagtcaaagagaaaggaaattttcaggaaggagatcatgtctaagagctttttattagtctcatcttccaatttcctgtagactcaagcttctttctttctgtcgtgcggggtttaatatccagtggctgtttgacaacagcaccaggaaatggaatttccatcctgattctgcctggaaccttgggcaaagtgcccaaaccttctgcctcactctcctcctgggagtaacagtccccaccctacagccttctggggcaagcaacagagacctaatatgaaaatggaaccagagagttctgatggatgtaaagtcctcaataaatgcatgcaggtattatttgttaatttttgccataggcaggctgcagcccccaggcaaactctgagtagaaggagcctataaaaacaagcctcctgcttctctctctctctctcattttttttttttttaattttttttttagacgtcttcctctgtcgcccaggctggagtgcagtggtgcgatctcggctcactgcaaactccgcctcccgggttcatgccattctcctgcctcagtctcctgagtagctgggactacaggcgcccgccaccatgcccgactaattttttgtatttttagtagagacggggtttcatcgtgttagccaggatggtcttgatctcctaacctcgtgatccgctctcctcagcctcccaaagtgctgggattacaggcatgagccaccacgcccagccgcctcctgcttctctcttgaagcctgggttctgctctggtgtctccccagctcattgccggttgatggcacattgggctccctgtcagtcaggttggccacgtgaggaggagtcaatgaggcactgcttcctgccaagctgaggctgcccttcttataataaggaggtgagcctgtctcagggaaggttcttttcctaaatttcaggtgggattctaaacaggacaccactgattttttaaaaaatgaacctatcaagacatgcattttcatgggtgtaatcctgtttgaagtggtcacatttggggtttttatgtacttgctcctattactggtgaaacttctgtgaatgggctacagaacatgaacagcctcagtggtggcagagtctcatgatttcaagttaccttatagttgagaaatagccccgcagggtaggtgatggcgtactccccacttgccattctatctggaacccggaaggtggacaatccatattcactgaaatgaaccaagaaatgagactgtggctataaggttgaggatgttcatttgcttgtgaagcttctaaacaagatcttccgaacagttaagagaacacttggatatcattatgatggtgtgtttgctttgaaaaataaacatgaaagagaaccattatgttatagctccgctttctagtgagtaccccgtcaaggcatcatatccctctgtgtagcaatggaaaggcatttaacccaatgattgaacctctctgtgcctcagtttcctcatctctaaaataataatagaacctagctcatataactgttaagggggatcaaaggaggtaaaatgttgtgacaaaagttgcataacacagtggagtgtatttcattcattcccaagtctgaacttacgtgtagaataatgccacaatctatggccctgtgtcctgaaatgccattcctccaggcccttttggagcaagagctccaaggggctgttccctcagataataacctaggtgattggaaaccttggctagggagcacagacctggaggtcggttccagtgtgggacagttggtcatatttcccagtcaccctctgccatgcaaagtgggtgaggcagtggctctggccagttcattggcaggtggcaaaaccttgtctagtctttggcattgggcatgtgataccatcgatggccagtaggtggcacaagttgtccatcactgccgccagctttgctccattgggtgctttctcagaaggggaagatctatttctaatccagtcctggctttatggcaatgcttaatcacatggaagggaacatgcaataactactggtatttctgtaaacatgcatgctaagaakcagctgccagttggaaatgaggatggagggaacactcagtgagaggtctcctgaggacaatctaaaaaaggaaaaccctgagggttttaaaattttagagccagttaacctttgtgactcatggagagaaacgtttagaacccagaaggacaatgagaatacatcctgtggattgtaacctggtccaaggtccaccttgccctctccaccttccttcagctgtgaagtttaggaaggagagacaagatccccttgc

SEQ ID NO: 691923 - DNA, 2389 bp, Homo sapiens
ctgtcacccccaacttccagatttctttaaaagtcaaagagaaaggaaattttcaggaaggagatcatgtctaagagctttttattagtctcatcttccaatttcctgtagactcaagcttctttctttctgtcgtgcggggtttaatatccagtggctgtttgacaacagcaccaggaaatggaatttccatcctgattctgcctggaaccttgggcaaagtgcccaaaccttctgcctcactctcctcctgggagtaacagtccccaccctacagccttctggggcaagcaacagagacctaatatgaaaatggaaccagagagttctgatggatgtaaagtcctcaataaatgcatgcaggtattatttgttaatttttgccataggcaggctgcagcccccaggcaaactctgagtagaaggagcctataaaaacaagcctcctgcttctctctctctctctcattttttttttttttaattttttttttagacgtcttcctctgtcgcccaggctggagtgcagtggtgcgatctcggctcactgcaaactccgcctcccgggttcatgccattctcctgcctcagtctcctgagtagctgggactacaggcgcccgccaccatgcccgactaattttttgtatttttagtagagacggggtttcatcgtgttagccaggatggtcttgatctcctaacctcgtgatccgctctcctcagcctcccaaagtgctgggattacaggcatgagccaccacgcccagccgcctcctgcttctctcttgaagcctgggttctgctctggtgtctccccagctcattgccggttgatggcacattgggctccctgtcagtcaggttggccacgtgaggaggagtcaatgaggcactgcttcctgccaagctgaggctgcccttcttataataaggaggtgagcctgtctcagggaaggttcttttcctaaatttcaggtgggattctaaacaggacaccactgattttttaaaaaatgaacctatcaagacatgcattttcatgggtgtaatcctgtttgaagtggtcacatttggggtttttatgtacttgctcctattactggtgaaacttctgtgaatgggctacagaacatgaacagcctcagtggtggcagagtctcatgatttcaagttaccttatagttgagaaatagccccgcagggtaggtgatggcgtactccccacttgccattctatctggaacccggaaggtggacaatccatattcactgaaatgaaccaagaaatgagactgtggctataaggttgaggatgttcatttgcttgtgaagcttctaaacaagatcttccgaacagttaagagaacacttggatatcattatgatggtgtgtttgctttgaaaaataaacatgaaagagaaccattatgttatagctccgctttctagtgagtaccccgtcaaggcatcatatccctctgtgtagcaatggaaaggcatttaacccaatgattgaacctctctgtgcctcagtttcctcatctctaaaataataatagaacctagctcatataactgttaagggggatcaaaggaggtaaaatgttgtgacaaaagttgcataacacagtggagtgtatttcattcattcccaagtctgaacttacgtgtagaataatgccacaatctatggccctgtgtcctgaaatgccattcctccaggcccttttggagcaagagctccaaggggctgttccctcagataataacctaggtgattggaaaccttggctagggagcacagacctggaggtcggttccagtgtgggacagttggtcatatttcccagtcaccctctgccatgcaaagtgggtgaggcagtggctctggccagttcattggcaggtggcaaaaccttgtctagtctttggcattgggcatgtgataccatcgatggccagtaggtggcacaagttgtccatcactgccgccagctttgctccattgggtgctttctcagaaggggaagatctatttctaatccagtcctggctttatggcaatgcttaatcacatggaagggaacatgcaataactactggtatttctgtaaacatgcatgctaagaagcagctgccakttggaaatgaggatggagggaacactcagtgagaggtctcctgaggacaatctaaaaaaggaaaaccctgagggttttaaaattttagagccagttaacctttgtgactcatggagagaaacgtttagaacccagaaggacaatgagaatacatcctgtggattgtaacctggtccaaggtccaccttgccctctccaccttccttcagctgtgaagtttaggaaggagagacaagatccccttgc

SEQ ID NO: 691924 - DNA, 2389 bp, Homo sapiens
ctgtcacccccaacttccagatttctttaaaagtcaaagagaaaggaaattttcaggaaggagatcatgtctaagagctttttattagtctcatcttccaatttcctgtagactcaagcttctttctttctgtcgtgcggggtttaatatccagtggctgtttgacaacagcaccaggaaatggaatttccatcctgattctgcctggaaccttgggcaaagtgcccaaaccttctgcctcactctcctcctgggagtaacagtccccaccctacagccttctggggcaagcaacagagacctaatatgaaaatggaaccagagagttctgatggatgtaaagtcctcaataaatgcatgcaggtattatttgttaatttttgccataggcaggctgcagcccccaggcaaactctgagtagaaggagcctataaaaacaagcctcctgcttctctctctctctctcattttttttttttttaattttttttttagacgtcttcctctgtcgcccaggctggagtgcagtggtgcgatctcggctcactgcaaactccgcctcccgggttcatgccattctcctgcctcagtctcctgagtagctgggactacaggcgcccgccaccatgcccgactaattttttgtatttttagtagagacggggtttcatcgtgttagccaggatggtcttgatctcctaacctcgtgatccgctctcctcagcctcccaaagtgctgggattacaggcatgagccaccacgcccagccgcctcctgcttctctcttgaagcctgggttctgctctggtgtctccccagctcattgccggttgatggcacattgggctccctgtcagtcaggttggccacgtgaggaggagtcaatgaggcactgcttcctgccaagctgaggctgcccttcttataataaggaggtgagcctgtctcagggaaggttcttttcctaaatttcaggtgggattctaaacaggacaccactgattttttaaaaaatgaacctatcaagacatgcattttcatgggtgtaatcctgtttgaagtggtcacatttggggtttttatgtacttgctcctattactggtgaaacttctgtgaatgggctacagaacatgaacagcctcagtggtggcagagtctcatgatttcaagttaccttatagttgagaaatagccccgcagggtaggtgatggcgtactccccacttgccattctatctggaacccggaaggtggacaatccatattcactgaaatgaaccaagaaatgagactgtggctataaggttgaggatgttcatttgcttgtgaagcttctaaacaagatcttccgaacagttaagagaacacttggatatcattatgatggtgtgtttgctttgaaaaataaacatgaaagagaaccattatgttatagctccgctttctagtgagtaccccgtcaaggcatcatatccctctgtgtagcaatggaaaggcatttaacccaatgattgaacctctctgtgcctcagtttcctcatctctaaaataataatagaacctagctcatataactgttaagggggatcaaaggaggtaaaatgttgtgacaaaagttgcataacacagtggagtgtatttcattcattcccaagtctgaacttacgtgtagaataatgccacaatctatggccctgtgtcctgaaatgccattcctccaggcccttttggagcaagagctccaaggggctgttccctcagataataacctaggtgattggaaaccttggctagggagcacagacctggaggtcggttccagtgtgggacagttggtcatatttcccagtcaccctctgccatgcaaagtgggtgaggcagtggctctggccagttcattggcaggtggcaaaaccttgtctagtctttggcattgggcatgtgataccatcgatggccagtaggtggcacaagttgtccatcactgccgccagctttgctccattgggtgctttctcagaaggggaagatctatttctaatccagtcctggctttatggcaatgcttaatcacatggaagggaacatgcaataactactggtatttctgtaaacatgcatgctaagaagcagctgccagttggaaatgaggatggagggaacactcagtgagaggtctcctgaggacaatctaaaaaaggaaaaccytgagggttttaaaattttagagccagttaacctttgtgactcatggagagaaacgtttagaacccagaaggacaatgagaatacatcctgtggattgtaacctggtccaaggtccaccttgccctctccaccttccttcagctgtgaagtttaggaaggagagacaagatccccttgc

SEQ ID NO: 691925 - DNA, 716 bp, Homo sapiens
gacagggacaacctcagactgcaacaaggacagcatagcaaaatgagtccacaactatcaaacactcgcatcccaggaaagacatttaggcaagtttcctcatcactaaaacaggaaacttaccttgtttgagactttayatgtaaactatgattttgtcaactataaagcactatttgaatgtggatattacaaaacagcagatgttattctagaactcccaccgcagtatagccagtcagtcatcctgtcaaaatgaaaatctgagcaggtcatctccattttttcgtgaccttccactaatctcaggacaaagactaaaaatccctgcatggctcacaggcccttacaaaaccagtatcttcaaacaactctgtggtttacagagatgccctagttttctgagaaagtagatttcagaaacttatttacaaggtccctatatgatacaaggttcctatatggaaaagacagtcatctcaggacttcctggcagtttctaacctacaaacaaatttaccttgccaactgaacgagaagttcaacaagtgaacaaattccttctcccattagagtattcaacttaagctcctcatacacaaggtgaagaacgaaaaaaattgcaggtatgtgagtaaagagaagtgtagaagaatccagactgagattctgtgaaaaatcctcatccttcatctgtgaagcttctgaaggactca

SEQ ID NO: 691926 - DNA, 716 bp, Homo sapiens
gacagggacaacctcagactgcaacaaggacagcatagcaaaatgagtccacaactatcaaacactcgcatcccaggaaagacatttaggcaagtttcctcatcactaaaacaggaaacttaccttgtttgagactttacatgtaaactatgattttgtcaactataaagcactatttgaatgtggatattacaaaacagcagatgttattctagaactcccaccrcagtatagccagtcagtcatcctgtcaaaatgaaaatctgagcaggtcatctccattttttcgtgaccttccactaatctcaggacaaagactaaaaatccctgcatggctcacaggcccttacaaaaccagtatcttcaaacaactctgtggtttacagagatgccctagttttctgagaaagtagatttcagaaacttatttacaaggtccctatatgatacaaggttcctatatggaaaagacagtcatctcaggacttcctggcagtttctaacctacaaacaaatttaccttgccaactgaacgagaagttcaacaagtgaacaaattccttctcccattagagtattcaacttaagctcctcatacacaaggtgaagaacgaaaaaaattgcaggtatgtgagtaaagagaagtgtagaagaatccagactgagattctgtgaaaaatcctcatccttcatctgtgaagcttctgaaggactca

SEQ ID NO: 691927 - DNA, 716 bp, Homo sapiens
gacagggacaacctcagactgcaacaaggacagcatagcaaaatgagtccacaactatcaaacactcgcatcccaggaaagacatttaggcaagtttcctcatcactaaaacaggaaacttaccttgtttgagactttacatgtaaactatgattttgtcaactataaagcactatttgaatgtggatattacaaaacagcagatgttattctagaactcccaccgcagtatagccagtcagtcatcctgtcaaaatgaaaatctgagcaggtcatctccattttttcgtgaccttccactaatctcaggacaaagactaaaaatccctgcatggctcacaggcccttacaaaaccagtatcttcaaacaactctgtggtttacagagatgycctagttttctgagaaagtagatttcagaaacttatttacaaggtccctatatgatacaaggttcctatatggaaaagacagtcatctcaggacttcctggcagtttctaacctacaaacaaatttaccttgccaactgaacgagaagttcaacaagtgaacaaattccttctcccattagagtattcaacttaagctcctcatacacaaggtgaagaacgaaaaaaattgcaggtatgtgagtaaagagaagtgtagaagaatccagactgagattctgtgaaaaatcctcatccttcatctgtgaagcttctgaaggactca

SEQ ID NO: 691928 - DNA, 716 bp, Homo sapiens
gacagggacaacctcagactgcaacaaggacagcatagcaaaatgagtccacaactatcaaacactcgcatcccaggaaagacatttaggcaagtttcctcatcactaaaacaggaaacttaccttgtttgagactttacatgtaaactatgattttgtcaactataaagcactatttgaatgtggatattacaaaacagcagatgttattctagaactcccaccgcagtatagccagtcagtcatcctgtcaaaatgaaaatctgagcaggtcatctccattttttcgtgaccttccactaatctcaggacaaagactaaaaatccctgcatggctcacaggcccttacaaaaccagtatcttcaaacaactctgtggtttacagagatgccctagttttctgagaaagtagatttcagaaacttatttacaaggtccctatatgatacaaggttcctatatggaaaagacagtcatctcaggacttcctggcagtttctaacctacaaacaaatttaccttgccaactgaacgagaagttcaacaagtgaacaaattccttctcccattagagtattcaacttaagctcctcatacacaaggtgaagaacraaaaaaattgcaggtatgtgagtaaagagaagtgtagaagaatccagactgagattctgtgaaaaatcctcatccttcatctgtgaagcttctgaaggactca

SEQ ID NO: 691929 - DNA, 635 bp, Homo sapiens
aaaattcacaatgttcaatatacagttaaaaaaaaaagtactagccatgtcaataaacataaagatgtgactcataaccaagagaaaaatcattagaaacagaccaaaacatatggagatgatggaattagaaaataaggactttatagcagatataactatattcaactacttaaaacaagggttagcacactataccccagactaaatctggcttatagactttttttttgttttgcctgtgatctagtaatgatttttatatttttaaaggattgtaaaaacaaacraaccaaaatcaaagatgaatacatgttagagaatatataaccacagcaaagcctaaaatatttactatttagcccttttcagaaaaactgaactcagtgaccacagtgaggaaagaaagggaagatatgaaaagatgaccacatgaaacgttaagagacacaaaatatattactagaaattaaaaaaaaaatactcaatgggcctcatagaagagtagacagtacaaaagaaaacacagtggacttaaacacatggcaatagaaactattcagaatgcagctaagagaaaagcaagatttctttttaaagaacagatatcccctataggaaaataccaaacagtt

SEQ ID NO: 691930 - DNA, 635 bp, Homo sapiens
aaaattcacaatgttcaatatacagttaaaaaaaaaagtactagccatgtcaataaacataaagatgtgactcataaccaagagaaaaatcattagaaacagaccaaaacatatggagatgatggaattagaaaataaggactttatagcagatataactatattcaactacttaaaacaagggttagcacactataccccagactaaatctggcttatagactttttttttgttttgcctgtgatctagtaatgatttttatatttttaaaggattgtaaaaacaaacgaaccaaaatcaaagatgaatacatgttagagawtatataaccacagcaaagcctaaaatatttactatttagcccttttcagaaaaactgaactcagtgaccacagtgaggaaagaaagggaagatatgaaaagatgaccacatgaaacgttaagagacacaaaatatattactagaaattaaaaaaaaaatactcaatgggcctcatagaagagtagacagtacaaaagaaaacacagtggacttaaacacatggcaatagaaactattcagaatgcagctaagagaaaagcaagatttctttttaaagaacagatatcccctataggaaaataccaaacagtt

SEQ ID NO: 691931 - DNA, 635 bp, Homo sapiens
aaaattcacaatgttcaatatacagttaaaaaaaaaagtactagccatgtcaataaacataaagatgtgactcataaccaagagaaaaatcattagaaacagaccaaaacatatggagatgatggaattagaaaataaggactttatagcagatataactatattcaactacttaaaacaagggttagcacactataccccagactaaatctggcttatagactttttttttgttttgcctgtgatctagtaatgatttttatatttttaaaggattgtaaaaacaaacgaaccaaaatcaaagatgaatacatgttagagaatatataaccacagcaaagcctaaaatatttactatttagcccttttcagaaaaactgaactcagtgaccacagtgaggaaagaaagggaagatatgaaaagatgaccacatgaaacgttaagagacacaaaatatattactagaaattwaaaaaaaaatactcaatgggcctcatagaagagtagacagtacaaaagaaaacacagtggacttaaacacatggcaatagaaactattcagaatgcagctaagagaaaagcaagatttctttttaaagaacagatatcccctataggaaaataccaaacagtt

SEQ ID NO: 691932 - DNA, 307 bp, Homo sapiens
cttcctatgtctgttatttaacaattagggtatgaycttaaagtgtttaaacacctatgatctcagatattcaacctctattttaaaaataaaaaaatgcacagcttcatttacttgacaaaagtttgtctttttaaatacacttatttgaaatttaatttatgtataaatcaatacacagattttaaaggcacagtttgatgaatttcacaaatacatgtactcatgaaatcagcacctcaatgatgctattatctcaaaacattccatcttattcctttgcagacaaacccctgaccctcaccct

SEQ ID NO: 691933 - DNA, 1355 bp, Homo sapiens
ataatatctttttgtgaattaattttctaagaactaattgaaaaaacgaagatgttgtggataacatctttacttccttgattacataaattttttgcataagtaaattgatatgaaaaatatgaatttcaatattcaaaaccataataaagtcaaggtagttatcattactaggtaaggtaaggtattagtctatatttgactttttcaaactaagcaaatgaaggctaatgtgtgtccaagcattgtgtaaaattttccttttgaagattagctgtcttttatctgatacatgtttataaactaaaagaattgttttccatgaygtaacttatttattcagttgtggttacctgtaatttggggattaggaaaatggggagtcatatggacatggattctgaggcaaagtcagaaattgggtcggggatggaagcaggagtgggattgctataattaaagaacagtatcagtgattttagaaatgggagagaaccaggaatagtggctcctgcttgtaatctcagctactctggaggctgaggcaggaggatcacttgagcccaggagatggaagccacagtgagctaccatcacaccactgcattccagcctggatgacagagtgatacactatctcattctattctgtttgtgtgctgaagtgacgatgtgcaaattgagttccctaacaggtagggttagggtagtctcatggttccagcaagacactggagccttctcatccagtaagcatgtttgccatctagctctaacacacttgaagaggtcagtaacaactaccaaatagcttcaaatgcttggcccaggagtacttctgtgcaaaaagaaacatcaatttttgctattcaaatgatagctaaaattactcagttgttctttatccatataattttaattcttatttgttcacatcagagtttatttaactgctgttagtttaaaaatggtaaaatttaaaatgaaagtgcctttgaattttctctgcataattatgttgcctgtttgtcccttaccaaggtcagtatatactggtagttcttaaactttattgtgcacaggaatcacctgtttgttatatatggctgattcttctgcctcacctataattactgattagaataacagaggtataatctaggtatctgctttgtgataaggtccataggacattccaattcaggttattgggagaacacaccaggctggttattaaaatcacctctatttgtgctcttaattgaaatccacccatttagaagtctcatgagtcacacaaagaaaaaatatcttcagcatgaatcatcttgtgcattaaagattttaaatttaaa

SEQ ID NO: 691934 - DNA, 514 bp, Homo sapiens
ttttttaatttgtgtataaaacacttttaatttaaacatacctttatgacaagggttcttaacktggatcttatgaatagatttcatagggtctatgaacacttcagttacctaaaaaatgtttgtgtaagaatatgtggacactgtttggaaagacagaccataacatttatcagattctcaaggaagtttgagactcagaaaacgtttttaaaatactgcttatggctatttaattttgaaaatagcactcaaatgaaatgacaaagtatgtatagtgcagcatttgttttaattctgtcattggggtaattaaaataagtttcaaatttaagaaatggtctgctatggcttgaatatccttccaaaattcatgttgaaatttaattgcattgtgacagtgttaagaagtgagacctacaagaggtaattaggtcatgagggctgcaccttcatgaatggatcagtgctgttattgcagtaatggtaagttattgctaaagtgggttcctca

SEQ ID NO: 691935 - DNA, 514 bp, Homo sapiens
ttttttaatttgtgtataaaacacttttaatttaaacatacctttatgacaagggttcttaacttggatcttatgaatagatttcatagggtctatgaacacttcagttacctaaaaaatgtttgtgtaagaatatgtggacactgtttggaaagacagaccataacatttatcagattctcaaggaagtttgagactcagaaaacgtttttaaaatactgcttatggctatttaattttgaaaatagcactcaaatgaaatgacaaagtatgtatagtgcagcatttgttttaattctgtcattggggtaattaaaataagtttcaaatttaagaaatggtctgctatggcttgaatatccttccaaaattcatgttgaaatttaattgcattgtgacagtgttaagaagtgagacctacaagaggtaattaggtcatgagggctgcascttcatgaatggatcagtgctgttattgcagtaatggtaagttattgctaaagtgggttcctca

SEQ ID NO: 691936 - DNA, 1256 bp, Homo sapiens
  misc_feature 10, 11, 12, 13, 14, 15, 16, 17, 18, 19, 20, 21, 22, 23, 24,25, 26, 27, 28, 29, 30, 31, 32, 33, 34, 35, 36, 37, 38,39, 40, 41, 42, 43, 44, 45, 46, 47, 48, 49, 50, 51, 52,53, 54, 55, 56, 57, 58, 59, 60, 61, 62, 63, 64, 65, 66,67: n = A,T,C or G
  misc_feature 68, 69, 70, 71, 72, 73, 74, 75, 76, 77, 78, 79, 80, 81, 82,83, 84, 85, 86, 87, 88, 89, 90, 91, 92, 93, 94, 95, 96,97, 98, 99, 100, 101, 102, 103, 104, 105, 106, 107, 108,109: n = A,T,C or G
gacaaatagnnnnnnnnnnnnnnnnnnnnnnnnnnnnnnnnnnnnnnnnnnnnnnnnnnnnnnnnnnnnnnnnnnnnnnnnnnnnnnnnnnnnnnnnnnnnnnnnnnnnagtagtttcatttacatatttattgggaatatttagacagaccaacagtttaaattcccattaattaaattaaaccataagtataattaaaccataactataaaccagaagacagattgatatcaaaagcaaacaaacaaaacaaaacaaggaaacaaacaaaaaacgcctcatgttcacactgaatgacattttgtaactctaataattatgtgtccttcatcaaagaacttctggtattttgtgcctgagctcctaagaatattttctgtaagtatacttaggagcttaggcacaaaataccaaaagtgaaataccaaaatacaaatgtgaaacttgctgatttggaatagaatgttgcaattctttaagatgatattggtcaagtgggttaggccaggatatttatgcaatttagtaagataattcattttcgtctggtaagactacaaaaatttctttgctatcaccatacctacttcacgatttagtcaaatttaataaagtaaaatgtcatcttagcctgttaatgccttctcttaaaatttatcttgtataggaggagccaagatggccgaataggaacagctccggtctacagctcccagcgtgagcgacgcagaagacgggtgatttctgcaattccatctgaggtaccaggttcatctcactagggagtgccagacagtgggcrcaggccagtgtgtgtgcaccgtgcgcgagccgaagcagggcgagcattgcctcacctgggaagcgcaaggggtcagggagttccctttccgagtcaaagaaaggggtgacggacgcacctggaaaatcgggtcactcccacccgaatattgcgcttttcagaccggcttaagaaacggcgcaccacgagactatatcccacacctggctcagagggtcctacgcccacggaatctcgctgattgctagcacagcagtctgagatcaaactgcaaggcggcaacgaagctgggcggaggggcgcccgcacctgcccaggcttgcttagcgtaaacaaagcagccgggaagctccaactgggtggacccaccacagctcaaggaggcctgcctgcctctcgtaggctccacctctgggggcagggcacagacaaacaaaaagacagcagtaacct

SEQ ID NO: 691937 - DNA, 1256 bp, Homo sapiens
  misc_feature 10, 11, 12, 13, 14, 15, 16, 17, 18, 19, 20, 21, 22, 23, 24,25, 26, 27, 28, 29, 30, 31, 32, 33, 34, 35, 36, 37, 38,39, 40, 41, 42, 43, 44, 45, 46, 47, 48, 49, 50, 51, 52,53, 54, 55, 56, 57, 58, 59, 60, 61, 62, 63, 64, 65, 66,67: n = A,T,C or G
  misc_feature 68, 69, 70, 71, 72, 73, 74, 75, 76, 77, 78, 79, 80, 81, 82,83, 84, 85, 86, 87, 88, 89, 90, 91, 92, 93, 94, 95, 96,97, 98, 99, 100, 101, 102, 103, 104, 105, 106, 107, 108,109: n = A,T,C or G
gacaaatagnnnnnnnnnnnnnnnnnnnnnnnnnnnnnnnnnnnnnnnnnnnnnnnnnnnnnnnnnnnnnnnnnnnnnnnnnnnnnnnnnnnnnnnnnnnnnnnnnnnnagtagtttcatttacatatttattgggaatatttagacagaccaacagtttaaattcccattaattaaattaaaccataagtataattaaaccataactataaaccagaagacagattgatatcaaaagcaaacaaacaaaacaaaacaaggaaacaaacaaaaaacgcctcatgttcacactgaatgacattttgtaactctaataattatgtgtccttcatcaaagaacttctggtattttgtgcctgagctcctaagaatattttctgtaagtatacttaggagcttaggcacaaaataccaaaagtgaaataccaaaatacaaatgtgaaacttgctgatttggaatagaatgttgcaattctttaagatgatattggtcaagtgggttaggccaggatatttatgcaatttagtaagataattcattttcgtctggtaagactacaaaaatttctttgctatcaccatacctacttcacgatttagtcaaatttaataaagtaaaatgtcatcttagcctgttaatgccttctcttaaaatttatcttgtataggaggagccaagatggccgaataggaacagctccggtctacagctcccagcgtgagcgacgcagaagacgggtgatttctgcaattccatctgaggtaccaggttcatctcactagggagtgccagacagtgggcacaggccagtgtgtgtgcaccgtgcgcgagccgaagcagggcgagcattgcctcacctgggaagcgcaaggggtcagggagttccctttccgagtcaaagaaaggggtgacggacgcacctggaaaatcgggtcactcccacccgaatattgcgcttttcagaccggcttaagaaacggcgcaccacgagactatatcccacacctggctcagagggtcctacgcccacggaatctcrctgattgctagcacagcagtctgagatcaaactgcaaggcggcaacgaagctgggcggaggggcgcccgcacctgcccaggcttgcttagcgtaaacaaagcagccgggaagctccaactgggtggacccaccacagctcaaggaggcctgcctgcctctcgtaggctccacctctgggggcagggcacagacaaacaaaaagacagcagtaacct

SEQ ID NO: 691938 - DNA, 2786 bp, Homo sapiens
ctcagtcctaccccaactcaggaaactcaattttgccaaaacctgagtaggcttcacagcaagttctttccagagagccttctaataagaacccagttgttggcactttgattttggccttgtgaaacttggaatagagaaaccagcccaatgaagtggggaaggccacagagcaaggtgtaggaaaaggaagaagtgcgtatgaaaattaactatgtctcttgctattccaagagaactattttccctttaaatttaaattcatctttcagagttttgtctataggtgtacattgttttttctacatgcataccatatgtcgacaccaatgtacactattatatgatttttacatgtaacgttatatgataaacattattctgtgtctgttaaatagtttttacaattaccacttggtgaattcctttccaaactagcatatgcttcatgttaggaatgaagatatctgagcttcattgtcttatacaataatcttatacaactgtcttacagccttcattgtcttattacaaagtgaaggtaattgattattagctatatacctgtgtattcgtctgttctcacactgctataaagagctgcccgagactgggtaatttacaagaaaagaggtttaattgactcacagttccatatggctggggaagctcaggaaacttacaatcatggcagaaggcgacggggaagcaaggcacattcttcacaaggcagcaggagggagaatgaatacaggaggacctaccaaacacttgtaaaaccataagatctcgtgagaactcactcactggcacaagaacagcatgggggaaaccacgcccatgactcaattacttccacctggtctctcggttgacgtggggattatggggattacaattcaaaatgaaatttcgggtgtgggcagactaaaccatattaacaggcaataagtgcacggtaagtgtgtctgttcttgtgctgctaataaaggcatacccgatacctttataaaggaaagaagtttaatggactcacagttccacgtggctcaggaggcctcacaatcatggcagaggacaaaggaaaagcaagggatatcttacatggtggcaggcaaaagagtctgtgccaggggaactccatttataaaaccatcggatctcatgagatgtattcaaccaccacgagaagagtatgaggaaaaccacctccgtgattcaattatctacacctgaccccgcccttgacatgtggggattattacaattcgaggtgaaatttgaatggggacacaggtcaaatcatatcagtaagagcttgggttttggaatcagacaaatttggctttgagtctaggctccaccattcagcagctatatgactttgggcactttgtttaacctttctaatgtagtatcatctgcaattttggaggaaaaactggtatttaagtcatagaaaaattgtaggaatgagtaagatcatgcatataaagcacttgagcacagtgtctgtagtatttaataaacagtagtctaagataagtaatatctattctacttaagcactatgcaccctccaaatcccatacttaaagcatttcataacttaaaaagtaaaaattgaaggggggaagaccaagttaaatcccattcttttcataagccattcccggccacattgagcctgaggtaacacacctgtttcctgcctttcattggcctagcctctgctatttggcattatyattcatcctcatctgaataggtcagacctctgcagaaaaatgtcagctacctaagtccagaatactattttgcctctttgtggctcaatacaggaagatgtcatcactgttggtctgttacatctcaaagcgatatcttctttctctagtgtttctatgctgatctggctgctggcattgcttccaactcagctcatcctccttagactttctaactgggttttatagactttctcatcttccttggcctgtacatcatctttacacatcttctaaatttaatgttaagaacacttgggtttaaaaaaagaaagattgtggtggaagaaaatgtagctttgagtggaggatacagtatttcaaacactaagtggataaataaagttaaaacctttgtttaaatttattttccattgtatttatttagttacaaatcctttgctgaaggagttttaaacacaagcatatttgaaacaaaggctttttaaacatatgtgcaggcattatccaaatctatgcaataagccctagccccagaatcagccaatttctctaagtttggcagctttagatactgatttttatgacagggcccaatggaataacaaactttgttgtgtttgacaggtttaccactcaagtcccacgcaaatcaacctccactgacacaaagattgaaagaaacccattttgacgaccacaggaaattcaaatgaaattcaggcagaacagcacctctgtacattactataggcaacctgaaagtaccatttttcatatgtcaagcttcatgctggcaatggtttcagttagccatattttattgtgctgttgccaaatcaaaagttattactttttaacttgctgggtccttaacacaccacagcttctaatagggaaatattcagctgaccagtatttagggaatagaggcatagaacatataatcataagtgttgaacagggatagtgtgaaatctcagcatcattttaaacctaattacacttatgagttatagatggtttctaaactggtga

SEQ ID NO: 691939 - DNA, 2786 bp, Homo sapiens
ctcagtcctaccccaactcaggaaactcaattttgccaaaacctgagtaggcttcacagcaagttctttccagagagccttctaataagaacccagttgttggcactttgattttggccttgtgaaacttggaatagagaaaccagcccaatgaagtggggaaggccacagagcaaggtgtaggaaaaggaagaagtgcgtatgaaaattaactatgtctcttgctattccaagagaactattttccctttaaatttaaattcatctttcagagttttgtctataggtgtacattgttttttctacatgcataccatatgtcgacaccaatgtacactattatatgatttttacatgtaacgttatatgataaacattattctgtgtctgttaaatagtttttacaattaccacttggtgaattcctttccaaactagcatatgcttcatgttaggaatgaagatatctgagcttcattgtcttatacaataatcttatacaactgtcttacagccttcattgtcttattacaaagtgaaggtaattgattattagctatatacctgtgtattcgtctgttctcacactgctataaagagctgcccgagactgggtaatttacaagaaaagaggtttaattgactcacagttccatatggctggggaagctcaggaaacttacaatcatggcagaaggcgacggggaagcaaggcacattcttcacaaggcagcaggagggagaatgaatacaggaggacctaccaaacacttgtaaaaccataagatctcgtgagaactcactcactggcacaagaacagcatgggggaaaccacgcccatgactcaattacttccacctggtctctcggttgacgtggggattatggggattacaattcaaaatgaaatttcgggtgtgggcagactaaaccatattaacaggcaataagtgcacggtaagtgtgtctgttcttgtgctgctaataaaggcatacccgatacctttataaaggaaagaagtttaatggactcacagttccacgtggctcaggaggcctcacaatcatggcagaggacaaaggaaaagcaagggatatcttacatggtggcaggcaaaagagtctgtgccaggggaactccatttataaaaccatcggatctcatgagatgtattcaaccaccacgagaagagtatgaggaaaaccacctccgtgattcaattatctacacctgaccccgcccttgacatgtggggattattacaattcgaggtgaaatttgaatggggacacaggtcaaatcatatcagtaagagcttgggttttggaatcagacaaatttggctttgagtctaggctccaccattcagcagctatatgactttgggcactttgtttaacctttctaatgtagtatcatctgcaattttggaggaaaaactggtatttaagtcatagaaaaattgtaggaatgagtaagatcatgcatataaagcacttgagcacagtgtctgtagtatttaataaacagtagtctaagataagtaatatctattctacttaagcactatgcaccctccaaatcccatacttaaagcatttcataacttaaaaagtaaaaattgaaggggggaagaccaagttaaatcccattcttttcataagccattcccggccacattgagcctgaggtaacacacctgtttcctgcctttcattggcctagcctctgctatttggcattattattcatcctcatctgaataggtcagacctctgcagaaaaatgtcagctacctaagtccagaatactattttgcctctttgtggctcaatacaggaagatgtcatcactgttggtctgttacatctcaaagcgatatcttctttctctagtgtttctatgctgatctggctgctggcattgcttccaactcagctcatcctccttagactttctaactgggttttatagactttctcatcttccttggcctgtacatcatctttacacatcttctaaatttaatgttaagaacacttgggtttaaaaaaagaaagattgtggtggaagaaaatgtagctttgagtggaggatacagtatttcaaacactaagtggataaataaagttaaaacctttgtttaaatttattttccattgtatttatttagttacaaatcctttgctgaaggagttttaaacacaagcatatttgaaacaaaggctttttaaacatatgtgcaggcattatccaaatctatgcaataagccctagccccagaatcagccaatttctctaagtttggcagctttagatactgatttttatgacagggcccaatggaataacaaactttgttgtgtttgacaggtttaccactcaagtcccacgcaaatcaacctccactgacacaaagattgaaagaaacccattttgacgaccacaggaaattcaaatgaaattcaggcagaacagcacctctgtacattactataggcaacctgaaagtaccatttttcatatgtcaagcttcatgctggcaatggtttcagttagccatattttattgtgctgttgccaaatcaaaagttattactttttaacttgctgggtccttaacacaccacagcttctaatagggaaatattcagctgaccagtatttagggaatagaggcatagaacatawaatcataagtgttgaacagggatagtgtgaaatctcagcatcattttaaacctaattacacttatgagttatagatggtttctaaactggtga

SEQ ID NO: 691940 - DNA, 678 bp, Homo sapiens
cagaaaatgctgtcattagaaataatatggccaggtgtggtggctcacgcccgtaatcttaacattttggtaagttgagccgggcccttgagcacaggagttcgagactagcctaggcaacatggcaacactccgtctctacaaaaaatacaaaaaagttatctgagagtggtgacatgtgccttcagtcttagctatttgtgaggctgaggtgggaaaatcacttcagtccaggaagcggagattgtagtgagctgaggtcgtgccactgtactccagcctgggcaacagagtgagagtccatctcaaaaaaagaaaagaaaaataatatataaagactactacattgatatttatggtttaaaagtgatrtgcatttttcttaaaatgaaagtaatatgtgttcattaaagaaatgtagctgaaacatacaattgagaagaataaattttgaaatcagctataatcctatatagtgtaggtaaagcattttagtgttatctatacactcttgttctatgcatgcatgtgcacatatgtactcattcaaccaatatttcttgaatatttcctatgactctggtgtggtttctcatgtcattataaaattatttttcagtaaaattaatattgcatcatacacgaccaccacaatttatctaaccagagtcttatatt

SEQ ID NO: 691941 - DNA, 670 bp, Homo sapiens
ttcagaatagttgaactactttattcctcagtgtggcccaaataagattttcaaatgcctctaaacagagctctccttctgtgcctctgctgaggtttgctcctgtaggaagttatctggaccaaacagcccgagcactgaatttagctgtattgctgttacatttcctgtgtgttgagggtttggctgccaggaggtgaattgtagatagaatctttcattctggtttcagtttctggaagtagctattgagctcaaggcaaatcatatatttaaagatatatacatgatttaaggataatctggcatttatctctgctctctttttgaagacttcattatcatggttgcctgacccaacacaacatatttggaggaggagaggggacacttttattgtaccccatcacrtggctgagtcatttggctctccattcactggaacagacgactatggacaccaccattgggtttcccaccaaggacagagttccaaagcaacagtggcttccatggttggctcacccagcctgcctgagtcatcagctaggtccacagagtagagaagtgggtagtgcccccgcctaacatctggaaaaattcccaaaagttgtgacttcatgaccactgagtcagcagcaactcttttcttgccaagaatagcacattg

SEQ ID NO: 691942 - DNA, 670 bp, Homo sapiens
ttcagaatagttgaactactttattcctcagtgtggcccaaataagattttcaaatgcctctaaacagagctctccttctgtgcctctgctgaggtttgctcctgtaggaagttatctggaccaaacagcccgagcactgaatttagctgtattgctgttacatttcctgtgtgttgagggtttggctgccaggaggtgaattgtagatagaatctttcattctggtttcagtttctggaagtagctattgagctcaaggcaaatcatatatttaaagatatatacatgatttaaggataatctggcatttatctctgctctctttttgaagacttcattatcatggttgcctgacccaacacaacatatttggaggaggagaggggacacttttattgtaccccatcacgtggctgagtcatttggctctccattcactggaacagacgactatggacaccaccattgggtttcccaccaaggacagagttccaaagcarcagtggcttccatggttggctcacccagcctgcctgagtcatcagctaggtccacagagtagagaagtgggtagtgcccccgcctaacatctggaaaaattcccaaaagttgtgacttcatgaccactgagtcagcagcaactcttttcttgccaagaatagcacattg

SEQ ID NO: 691943 - DNA, 666 bp, Homo sapiens
tgaggcaaataaaagaacatctgagaatcctctgaattttgtctttaaactcagtttcatctttcctcaaatagatgtccctagaaattaagcagtttctcttaaaaataaggaacgttttttaaaacattagtgcttgagtgataatccatcctaagtcatgagtcagtcayaggtaacctccattatctctcaaactctacaatgtactcctaagatttagcaatttctattgcttttaactgtattatttatcttggaacaggctatttcctacatataaaataatccttgtagcacactctttttgagaaagatacagaaaataattacatatctaaatgtaacttaaaattcagccatgtgtaatgttgtcagtgcaaataactttaatctgatgataaatggttgaaaagacacctccatgcatggcaaagtttatatatatgcaggcaatgacatctgcgacagcacttggtgaatttcttttgacattaagaactacaaaggaccatcaaaaatatttaatggtgtagctgggcgcggtggctcacgcctgtaatcccagcactttggaaggccgaggtgggtggatcacaaggtcaggagatcgagaccatcctggctaacatggtgaaactttgtctccactaaaatacaaaaaac

SEQ ID NO: 691944 - DNA, 666 bp, Homo sapiens
tgaggcaaataaaagaacatctgagaatcctctgaattttgtctttaaactcagtttcatctttcctcaaatagatgtccctagaaattaagcagtttctcttaaaaataaggaacgttttttaaaacattagtgcttgagtgataatccatcctaagtcatgagtcagtcataggtaacctccattatctctcaaactctacaatgtactcctaagatttagcaatttctattgcttttaactgtattatttatcttggaacaggctatttcctacatataaaataatccttgtagcacactctttttgagaaagatacagaaaataattacatatctaaatgtaacttaaaattcagccatgtgtaatgttgtcagtgcaaataactttaatctgatgataaatggttgaaaagacacctccatgcatggcaaagtttatatatatgcaggcaatgacatctgygacagcacttggtgaatttcttttgacattaagaactacaaaggaccatcaaaaatatttaatggtgtagctgggcgcggtggctcacgcctgtaatcccagcactttggaaggccgaggtgggtggatcacaaggtcaggagatcgagaccatcctggctaacatggtgaaactttgtctccactaaaatacaaaaaac

SEQ ID NO: 691945 - DNA, 566 bp, Homo sapiens
ttaatatttaccaagaatccaaaatgtacaactgagacggtgttatggagaatataaaagtgagcacaacacttgctttgcagaacaatcaagtgacagggagaaaaaaatctaacagaacgcctgctaggtgttgaagtagagccaccagccctctgggtggccttaggcaggtcatgtctcctctgggagccttcctttcacatctgtcatagagcttgtaggcaactgactttgtgaagttcctkccaggttaaacagactctgctccatttttcagactgttattagaaaatgctcaaatacatctgagtttgtgtaggattggaggcagttaatatatttaaggagtcagacatataattaagattttgttgttggggtgggatttctcccccttttaagtctcacttttgagaaactggaacctgaattgagctgttcagagatgaagactaatatatcataatgtgcacttactaattcactaaatgtctagatgttgatgttggggatttaaggaggggtgtttactaagaccaggcacgggactaggtcccaggaat

SEQ ID NO: 691946 - DNA, 566 bp, Homo sapiens
ttaatatttaccaagaatccaaaatgtacaactgagacggtgttatggagaatataaaagtgagcacaacacttgctttgcagaacaatcaagtgacagggagaaaaaaatctaacagaacgcctgctaggtgttgaagtagagccaccagccctctgggtggccttaggcaggtcatgtctcctctgggagccttcctttcacatctgtcatagagcttgtaggcaactgactttgtgaagttcctgccaggttaaacagactctgctccatttttcagactgttattagaaaatgctcaaatacatctgagtttgtgtaggattggaggcagttaatatatttaaggagtcagacatataattaagattttgttgttggggtgggatttctcccccttttaagtctcacttttgagaaactggaacctgaattgagctgttcagagatgaagactaatatatcataatgtgcacttactaattcactaaaygtctagatgttgatgttggggatttaaggaggggtgtttactaagaccaggcacgggactaggtcccaggaat

SEQ ID NO: 691947 - DNA, 668 bp, Homo sapiens
aaatcttattccctgtatgggggtgaggctcacctgaagttaaagcagcagcttttatcttcctcaggcaaatatgggctcagtcatgccatactaggtttatcttctcccaggttcagccactgcctcaaatcagatcatttcaccattaccccctgcgtttcctctttctctaaagcaagcttgtccaaccctctacccgtgggccacatgcagcccaggacagctttgaatgaggcctaagcacaaatttgtaaactttcttagaacattctgagattttcttgcgattttttttaagctcaccagctatcatgttagcgtattttatgtgtggcccaagacaattcttcttcatccaatgtrgcccagggaagccaaaagattggacaccctgttataaagtgaagataacaatcttgctctcagagggcgttgtttggattaatcagtccattaagaacttcgtgctttacaatgaagacaaaagaggctaagtgttttagaagttacaaatgatacttccttgctgcttggagccgttaaaggagtaataataaaaatatgcaaatcaaactacaaagtgaacatcttttcctctcataccaaatgcttttcggtgaatattcttgcctaaaatttcatgttatttgcgtatgactggaagc

SEQ ID NO: 691948 - DNA, 668 bp, Homo sapiens
aaatcttattccctgtatgggggtgaggctcacctgaagttaaagcagcagcttttatcttcctcaggcaaatatgggctcagtcatgccatactaggtttatcttctcccaggttcagccactgcctcaaatcagatcatttcaccattaccccctgcgtttcctctttctctaaagcaagcttgtccaaccctctacccgtgggccacatgcagcccaggacagctttgaatgaggcctaagcacaaatttgtaaactttcttagaacattctgagattttcttgcgattttttttaagctcaccagctatcatgttagcgtattttatgtgtggcccaagacaattcttcttcatccaatgtggcccagggaagccaaaagattggacaccctgttataaagtgaagataacaatcttgctctcagagggcgttgtttgkattaatcagtccattaagaacttcgtgctttacaatgaagacaaaagaggctaagtgttttagaagttacaaatgatacttccttgctgcttggagccgttaaaggagtaataataaaaatatgcaaatcaaactacaaagtgaacatcttttcctctcataccaaatgcttttcggtgaatattcttgcctaaaatttcatgttatttgcgtatgactggaagc

SEQ ID NO: 691949 - DNA, 1627 bp, Homo sapiens
tgccacatttactgtgtgccaggccctggctaggctctggggacaaaagacaagtaagacacagtctgtgtcctcatggtatgtagtgcagtcatccagacacaatatgttgttaaaatattgtcacagaagagagtgcccttcttggttggaggtagtagaggaacccaaaagattttcccaaaggggcataatccaaagactcatgaatagccaggctctttccattctatgtggctttccggcatgacaatagtttcctggacaggattttcttgcctatttctgctgtttctttcccactagtaggaaagacaaagaaaggcacagtgctgcccagcctcagcacctcagagggtgtgtgaatatctttcctctgcttctccagatcctctttccacccccatttctcctgctctgtgccccagaaggctaatcaatgtgaaccacctctatctctctcttgcacaatgacttccagttccattcggacaatattgggggtgagaaggcatgagcaagagaggaaggagcattagatcataatatttatgcccagattccctcccatgtacgccatcaggggcctactgcatccctcaatatgaggcctcaggttatcccttcccttgttttttcagacccagaggtggtaatagtgcccagctgatgctggccatagggtgctacactaatccttgtggtcttatattctgctcatgcctttgtaaataatccgttcaaatcatctaaatttgagtgtgccattggtttcttgcttcctgactgatatggaagaaacaaatgaataaataattgaatacatgtattctatgtaaataaatgattgaattatttttaatgcctttttaattcttattttatatttttgtggatacatagtaagtgtatatatttatggagtatatgagatgttttgatataggcatgcaatgtgaaataagcacgtcatggagaatggggtatgaatggttgagttaaataactgrgtgaattaaagcatgaatgaatgaatgggtatggagatgaatgtatgaaaacagaatgcaggcacatataacatatatctatttcatgcatgaataattgcataataactaagcaaatgaatgacacccatgtaaaaaactgaatggaagcatgaatgaagaatgaattcataaaaatgtgatttaagaccagttttaatcaatttcaatgcctgactttaccgcctcccaggcaccacatgcaaagaaaaggaatggatgagcttctccctaaaacagagctgttacgtgaaaatctagtccagagaggcgctgagaagttaacttaggaaaaatgttttgggaaaagactaagttaaattttaaagagaaggacagagagtcatggtagagctttctatagaggagcagaacatagagatggaatatagggagtggaaggaatgaagcttcctttctctagagggaaattaacaatagttcacaggctcagagaaaggcgccgtggaacaggaacccagccggcaaatactgccatgaggatcaattgtcatggatgggagaactgggaagcatctaaatgctacatctgggtgccaaagtggaatgaatcaatg

SEQ ID NO: 691950 - DNA, 622 bp, Homo sapiens
gaaagttctgtttatacttttttttttaatcaacactacctcacctgccatgaasctccctttattgtactctcaagacaactgcaaatctgccactctgatcttatgtgcttagaacatctgtggcatttaccttcacttgtgcatgtctctctattttccactaatgggttcatttcacattgtgtttgtttttaaagtttcactccaagcttttttgttttttttttgggacggagtctcactctgcctgtcaggctggagtgcagtggtgcgatctccactcactgcactccgcctcctgggttcaatgattctcccgcctcagcctcccaagtagctgggattacaggcatgtgccaccatgcctggctaatttttgtatttttagtagaatggggtttcaccatgttggccaggctgtcctcaaactcctggcctcaggtgatcccccgcctcagcctcccaaagttctgggattacaggcgtgagccaccgcgcccggccttattgcaagctttgtgttctccccttgtctctgactccttcagccttgtggctgattggtgaatttgtcaaagtcaagcaccaggacttcagctacccatctttaattacagaa

SEQ ID NO: 691951 - DNA, 1337 bp, Homo sapiens
gaaaagttttaaacccaaaattttatatcagtgaaaagatccttcacttaaaggcaaaagaaagacatattaaattaaatgaaaagaaagtagaaaaaagtatcaccagcagacctttcctaaaggaagcattaaaggaagttcttcgaagggaagtaacacgagatgggaattcagatacgtaagaaagaataaaaaaatacagattgtagatatgtaaaatattttaaaagacaactaacagtttaatatatatgctttatatgcatatatatgtaaaacacagttgatctttataatatatgcagataaaacagatgtgacaataatagcaacaaagatagaggaagttaaatgggattatgcttcaaaaatcttagatttttaacatgagtagaytgttttgagttcttattgtaatccttatagcaaccacagtaaacgaacacaaagaggtatagttaaaaggccagtagaggtattaaaatgtaatactaaaacttaattaagtaattcaaaagaaggcaggatggaaggacagaagattcctagaaaacagatagggaggtggtcttacatataattgataattatcagagataatgagagatattttgtaattacaaaggtttcatatataaggaagttataacaattgtaagtatatgcacctaataaaagtataaagtaaaaactgacagaactgaagggagaaataaataaatgtacaatctttattgaatgattcgatatcactttctcaataattggtaagacaattgtaccaacatttaatatgtatgatcctgatgaagtaaatagtacagttgtcccttggtatcagcagtggactggttccaggacctctcttgaataccaaaatccacatatgttccagttgcttcactgggctagctctcttgccataaacatgtatttttaagaaaaagaataaaagaacaagtattttctgtcattggacaacaggtagcaaagtactctgatctgtgtgatttctaagggaaaagccactagttgcacttgatgacaatccaggctttgtgcctggaagtattttctggtggtgccaaaaataaggacccaagcagaaaagagttttcactgagttgagaaggcagaaatcatacttggctggaaggagatgatgaaaattgcaggaaagaggtagagttatgcaaagaaaagcgcatgagaaatttacataagcattcctttgattccttcttcaagtactaatttggatacatccatcataatctagtttaaaaccaagctccaaaaaaagttaagctgatccataagtaacttggctacct

SEQ ID NO: 691952 - DNA, 629 bp, Homo sapiens
acagactgggtttgagtgctaagtagggttgaacctgaaaaatgttggcaaaattatacaggcagaaaagtacacagcatttacgtttagtgtgcttggagggcgaataacagaaagtagcaagcaaaagaactaaaaggtgggttgaaaccaaagcacagacagctcagcagccacagttgagtttaaatttattcttcaggcattaaggaaccactgaaagtttattttggaaacagggttttaacagatacctggcaggacacttttaaatgatccatctgcaggagcagctctggtccccaccaaggggtatgtggaaaaggggaagaggggcatattggttgccccaacrtctgggacaattattagaatttaggaccggaggatagaatattcaacacatgtaatgcaaaggtcagccccgcacaacaaagaaatgcccatcaacttgtatgttgagctgataccatgttggaccttcatgaaaagcttgcttaaactaggagggggggggaaacaatcagccccagcccagatgctgctctgatcagattgcatataatatttgaagagaggaaatgtctcctctgtcagggtaagccaatcacctctccagtcagcctgcc

SEQ ID NO: 691953 - DNA, 1175 bp, Homo sapiens
  misc_feature 868, 869, 870, 871, 872, 873, 874, 875, 876, 877, 878, 879,880, 881, 882, 883, 884, 885, 886, 887, 888, 889, 890, 891,892, 893, 894, 895, 896, 897, 898, 899, 900, 901, 902, 903,904, 905, 906, 907, 908, 909, 910, 911, 912, 913, 914: n = A,T,C or G
  misc_feature 915, 916, 917, 918, 919, 920, 921, 922, 923, 924, 925, 926,927, 928, 929, 930, 931, 932, 933, 934, 935, 936, 937, 938,939, 940, 941, 942, 943, 944, 945, 946, 947, 948, 949, 950,951, 952, 953, 954, 955, 956, 957, 958, 959, 960, 961: n = A,T,C or G
  misc_feature 962, 963, 964, 965, 966, 967: n = A,T,C or G
tgatgcaaataatcagatataaagtagatacttcattgaagtatttctctaaagcagatgccaaaatcaatagattttaaaaagaagctcttaaaaatcagctgcaaaaacaaaagaagagagaatactgaaaatttaatggtttgacaaagaaagctacatgtcaatatacatttgtccaaacccatagaaggtacatcaccagagtgaacccgaatgtgaactatggccttggagtgttgatgtgtcagtgtaggtttatcarttgtaacaaatgcaccattctggtggggattttttttttttttttttttttttgagacggagtctcgctctgttgcccaggctggagtgcagtgatgcgatctctgctcactgccacctccgcctcccgggttcaagtgattctcctgcttcagcctcccaagtagctacgactacaggtgcacacaaccacgcctggctaattttttgtattttagtacagacggtgggtgtttctccgcgctgtccaggctggtcgcgaacttctgcgctcaggcaatctgcctgccttggccccccaaagtgctgggatgacaggcgtgagctaccgcgcccagccggagaatgttgataataaggtggctgtgcatgtgtgggggcaggagtatatgcgatatctctgcaccttctgcccaattttgcagtgaacctaaaactactctaaaaacaatgaagtccttaaatattggagaagaaggaggaggaggaggaggaggagaaagaggaagagaaggaggggaggagaaaggggaggtgaaaggggaggcgaaaggggaggcgaaaggaaaggagaaggggaaaggaagggaaggaaatgtggttnnnnnnnnnnnnnnnnnnnnnnnnnnnnnnnnnnnnnnnnnnnnnnnnnnnnnnnnnnnnnnnnnnnnnnnnnnnnnnnnnnnnnnnnnnnnnnnnnnnntccattatttaggtgaattttggaggaaatgcctctaaacttatttagtgttgacatagaaaagttacatcatcagtgttttggcaccttgaatacactggttatcatggttatcagaattaacacatattagagactaataatccaaaatactagaaaagagcctagaggtccaaaaaaatccaggttccaaaaattcccttttcaa

SEQ ID NO: 691954 - DNA, 1421 bp, Homo sapiens
attcccaaatgctaatgtgtcttaaacctaccacttaaactttgtaaatccgatcatgttagttacagaagctaatgattttccctatctctcaaatggaaatttaaagtcatatcatggcctgcaaggcctgctatgattgggccctgagcctctggttttagctcttatcactcagcctggttcattctattttggtggctttgagcatgccaagcagtctcctgaatcaggagctttgcacttgctattttctatgctggaaatcctttctttctagatctaaacatgggttctgcccctcatttcattctggcttctggcaggatgctgccaaataagagaggccttcctcgactaccytgtctatgcccttcttgcttatttgtcaccagacttaccacagacttgttactttacttattgcctcctattcctgactaaaatacaaatatctatgactgtttggtttattccttatgaaggatgaccatagcagtgcctggaaaagagaggtgtaaatatttgtagaattcatgaatctgccaacattctctccccaggatgaaatagtaaaaggggtaataaaagatgactcttataaccattgagtgtccaggcaggcctgtcactcagaataagaaaaaaatggagcaggagactgaaaaaacagttgattacatctcaatcacaagacgttgaggctagtgactcaggaacctcagtatgattctctccaccaataggtcttgggtatattaataataaagtcaagaaaatgcatttatcttgacatcaacagtagcactaggtggttgtgagcataagcagtcctgtggcaggagatgccagtgaatcccagcttcatcaggaatgaagacactgaaatagatttgcgggaaccttgtaaactcatgcagtcctctgatcgattgctttttggttggtctgtgttttcaatgcactgtgcctggcagatagtaaatgctcaatagtggctgaatgaatagggcctggactttggagaacctgaaactggatggttattgttcaggctgacgaatactgaaattctctctggatactgtagaattgttcaaagagcaagggccttgaagagaggatttgaatcccacatacagcatcaaattactttgaggtcagtctcagaactagacagaactgggttgaaatcacaaatgtcagcctcccctagcctctgttacctcatctatacaatgagcttggttgtgtccaccacctacctggttcttgggcagattaaagggattcatactggggtcaggcttttggagctattttcacaataacatttgggtttggatgactgcatttcaaagggtttcaagttagaatcttgatttcatacagagtaacagagaataaagagtatgtaatgc

SEQ ID NO: 691955 - DNA, 1421 bp, Homo sapiens
attcccaaatgctaatgtgtcttaaacctaccacttaaactttgtaaatccgatcatgttagttacagaagctaatgattttccctatctctcaaatggaaatttaaagtcatatcatggcctgcaaggcctgctatgattgggccctgagcctctggttttagctcttatcactcagcctggttcattctattttggtggctttgagcatgccaagcagtctcctgaatcaggagctttgcacttgctattttctatgctggaaatcctttctttctagatctaaacatgggttctgcccctcatttcattctggcttctggcaggatgctgccaaataagagaggccttcctcgactaccctgtctatgcccttcttgcttatttgtcaccagacttaccacagacttgttactttacttattgcctcctattcctgactaaaatacaaatatctatgactgtttggtttattccttatgaaggatgaccatagcagtgcctggaaaagagaggtgtaaatatttgtagaattcatgaatctgccaacattctctccccaggatgaaatagtaaaaggggtaataaaagatgactcttataaccattgagtgtccaggcaggcctgtcactcagaataagaaaaaaatggagcaggagactgaaaaaacagttgattacatctcaatcacaagacgttgaggctagtgactcaggaacctcagtatgattctctccaccaataggtcttgggtatattaataataaagtcaagaaaatgcatttatcttgacatcaacagtagcactaggtggttgtgagcataagcagtcctgtggcaggagatgccagtgaatcccagcttcatcaggaatgaagacactgaaatagatttgcgggaaccttgtaaactcatgcagtcctctgatygattgctttttggttggtctgtgttttcaatgcactgtgcctggcagatagtaaatgctcaatagtggctgaatgaatagggcctggactttggagaacctgaaactggatggttattgttcaggctgacgaatactgaaattctctctggatactgtagaattgttcaaagagcaagggccttgaagagaggatttgaatcccacatacagcatcaaattactttgaggtcagtctcagaactagacagaactgggttgaaatcacaaatgtcagcctcccctagcctctgttacctcatctatacaatgagcttggttgtgtccaccacctacctggttcttgggcagattaaagggattcatactggggtcaggcttttggagctattttcacaataacatttgggtttggatgactgcatttcaaagggtttcaagttagaatcttgatttcatacagagtaacagagaataaagagtatgtaatgc

SEQ ID NO: 691956 - DNA, 1421 bp, Homo sapiens
attcccaaatgctaatgtgtcttaaacctaccacttaaactttgtaaatccgatcatgttagttacagaagctaatgattttccctatctctcaaatggaaatttaaagtcatatcatggcctgcaaggcctgctatgattgggccctgagcctctggttttagctcttatcactcagcctggttcattctattttggtggctttgagcatgccaagcagtctcctgaatcaggagctttgcacttgctattttctatgctggaaatcctttctttctagatctaaacatgggttctgcccctcatttcattctggcttctggcaggatgctgccaaataagagaggccttcctcgactaccctgtctatgcccttcttgcttatttgtcaccagacttaccacagacttgttactttacttattgcctcctattcctgactaaaatacaaatatctatgactgtttggtttattccttatgaaggatgaccatagcagtgcctggaaaagagaggtgtaaatatttgtagaattcatgaatctgccaacattctctccccaggatgaaatagtaaaaggggtaataaaagatgactcttataaccattgagtgtccaggcaggcctgtcactcagaataagaaaaaaatggagcaggagactgaaaaaacagttgattacatctcaatcacaagacgttgaggctagtgactcaggaacctcagtatgattctctccaccaataggtcttgggtatattaataataaagtcaagaaaatgcatttatcttgacatcaacagtagcactaggtggttgtgagcataagcagtcctgtggcaggagatgccagtgaatcccagcttcatcaggaatgaagacactgaaatagatttgcgggaaccttgtaaactcatgcagtcctctgatcgattgctttttggttggtctgtgttttcaatgcactgtgcctggcagatagtaaatgctcaatagtggctgaatgaatagggcctggactttggagaacctgaaactggatggttattgttcaggctgacgaatactgaaattctcyctggatactgtagaattgttcaaagagcaagggccttgaagagaggatttgaatcccacatacagcatcaaattactttgaggtcagtctcagaactagacagaactgggttgaaatcacaaatgtcagcctcccctagcctctgttacctcatctatacaatgagcttggttgtgtccaccacctacctggttcttgggcagattaaagggattcatactggggtcaggcttttggagctattttcacaataacatttgggtttggatgactgcatttcaaagggtttcaagttagaatcttgatttcatacagagtaacagagaataaagagtatgtaatgc

SEQ ID NO: 691957 - DNA, 1421 bp, Homo sapiens
attcccaaatgctaatgtgtcttaaacctaccacttaaactttgtaaatccgatcatgttagttacagaagctaatgattttccctatctctcaaatggaaatttaaagtcatatcatggcctgcaaggcctgctatgattgggccctgagcctctggttttagctcttatcactcagcctggttcattctattttggtggctttgagcatgccaagcagtctcctgaatcaggagctttgcacttgctattttctatgctggaaatcctttctttctagatctaaacatgggttctgcccctcatttcattctggcttctggcaggatgctgccaaataagagaggccttcctcgactaccctgtctatgcccttcttgcttatttgtcaccagacttaccacagacttgttactttacttattgcctcctattcctgactaaaatacaaatatctatgactgtttggtttattccttatgaaggatgaccatagcagtgcctggaaaagagaggtgtaaatatttgtagaattcatgaatctgccaacattctctccccaggatgaaatagtaaaaggggtaataaaagatgactcttataaccattgagtgtccaggcaggcctgtcactcagaataagaaaaaaatggagcaggagactgaaaaaacagttgattacatctcaatcacaagacgttgaggctagtgactcaggaacctcagtatgattctctccaccaataggtcttgggtatattaataataaagtcaagaaaatgcatttatcttgacatcaacagtagcactaggtggttgtgagcataagcagtcctgtggcaggagatgccagtgaatcccagcttcatcaggaatgaagacactgaaatagatttgcgggaaccttgtaaactcatgcagtcctctgatcgattgctttttggttggtctgtgttttcaatgcactgtgcctggcagatagtaaatgctcaatagtggctgaatgaatagggcctggactttggagaacctgaaactggatggttattgttcaggctgacgaatactgaaattctctctggatactgtagaattgttcaaagagcaagggccttgaagagaggatttgaatcccacatacagcatcaaattactttgaggtcagtctcagaactagacagaactgggttgaaatcacaaatgtcagcctcccctagcctctgttacctcatctatacaatgagcttggttgtgtccaccacctacctggttcttgggcagattaaagggattcatrctggggtcaggcttttggagctattttcacaataacatttgggtttggatgactgcatttcaaagggtttcaagttagaatcttgatttcatacagagtaacagagaataaagagtatgtaatgc

SEQ ID NO: 691958 - DNA, 1735 bp, Homo sapiens
tttgagacatttacttcctttgccatttgctcatttcaaattctactattactctatctgtccctccacctacaacaccctctttcaaaggaataaaatatgtgtggctaatactgcacctgcataacatcaacctttgccctttataaacagatgtttataaaaacaaagggccagtccttgaagaaaactggtaggtatatcagattgtaaatcacatctctgttagaataaaggaagtcttgtctgaactaccaggctaccattgccacccagcatagcctggatagccctaacataactgataaaccccttctagatctagacaccttttctcggatgaactgtgtttcttcacgtatttacaatccagttgattgttacaactttattttatctcatctttcactctttgtttcctagaaccgctctcagaactctagtaaaattgattttatttcagtcaaagcctgatcttgagatcggcataactgctgagtatttctgactttggggaatttctattctcatttttaatgtgctctctttcctccctccttccctccctttctcctttccttcctctttcccttccttctgccattctttctgtcttccttatttactctcagagtgtaacaattgcaaattggtgcagattcttaatataggctgcaaatgatgggtttgacattccagctatgccacttattaattgtctgattttgggggcaagttattcaaccattctgtgctgtacttttccaatctattaaatgggaattaataataacatccatctcatagtattattgtaggagtaaatgaatactaaatgttaagtggttaaaacaattgctaggacaaagtaaatatttaagtgtgggcagttattattgttgttgtgcagccttctttcccagtctgtggcagtgaactttcattttgacttaacagctctgaggtccatagccctcggcatgaatttcagtccagtggccatctcttatattctgagcagacacttggaatagctaaagaatattacgagagtttttatccttccatgtaggcttcctccctttttccccaaattttgaatatatttttctctcttatatgattacctttcctttatttttgttattcaattaccccataaatagatattctatggacatgagaattacatgatgatagcaagacagtcatggataaggttttatgcctttcaggcatcattgtacatatttgatgatgatggtgatgataatgataatatatatatattttttgagacagagtcacgctttgtcactcatgctggagtgcagtggtgcaatcttgtttcactgcagtctctgccttctgggtttaagarattctgctgcctaagcctcctgagtagctaggctgacaggcatgtgccaccacacctggctaatctttgattttcagtagagatggggtttcgccatgttgaccaggctggtctcgaactcttcacctcaagtgatccaaccactttggcctcccagagtgctgggattacaggagtgagccactgtgtccagctggatgatgataataattaatactaatattcacatctatcaaatatgttatgaggaacttctgcttctagacacaatggagtaagaagaaccgatttgcttttccaccataaacaacttaaaacaaacaagcatacaaacaaacatataatccacagtaa

SEQ ID NO: 691959 - DNA, 1735 bp, Homo sapiens
tttgagacatttacttcctttgccatttgctcatttcaaattctactattactctatctgtccctccacctacaacaccctctttcaaaggaataaaatatgtgtggctaatactgcacctgcataacatcaacctttgccctttataaacagatgtttataaaaacaaagggccagtccttgaagaaaactggtaggtatatcagattgtaaatcacatctctgttagaataaaggaagtcttgtctgaactaccaggctaccattgccacccagcatagcctggatagccctaacataactgataaaccccttctagatctagacaccttttctcggatgaactgtgtttcttcacgtatttacaatccagttgattgttacaactttattttatctcatctttcactctttgtttcctagaaccgctctcagaactctagtaaaattgattttatttcagtcaaagcctgatcttgagatcggcataactgctgagtatttctgactttggggaatttctattctcatttttaatgtgctctctttcctccctccttccctccctttctcctttccttcctctttcccttccttctgccattctttctgtcttccttatttactctcagagtgtaacaattgcaaattggtgcagattcttaatataggctgcaaatgatgggtttgacattccagctatgccacttattaattgtctgattttgggggcaagttattcaaccattctgtgctgtacttttccaatctattaaatgggaattaataataacatccatctcatagtattattgtaggagtaaatgaatactaaatgttaagtggttaaaacaattgctaggacaaagtaaatatttaagtgtgggcagttattattgttgttgtgcagccttctttcccagtctgtggcagtgaactttcattttgacttaacagctctgaggtccatagccctcggcatgaatttcagtccagtggccatctcttatattctgagcagacacttggaatagctaaagaatattacgagagtttttatccttccatgtaggcttcctccctttttccccaaattttgaatatatttttctctcttatatgattacctttcctttatttttgttattcaattaccccataaatagatattctatggacatgagaattacatgatgatagcaagacagtcatggataaggttttatgcctttcaggcatcattgtacatatttgatgatgatggtgatgataatgataatatatatatattttttgagacagagtcacgctttgtcactcatgctggagtgcagtggtgcaatcttgtttcactgcagtctctgccttctgggtttaagaaattctgctgcctaagcctcctgagtagctaggctgacaggcatgtgccaccacacctggctaatctttgattttcagtagagatggggtttcgccatgttgaccaggctrgtctcgaactcttcacctcaagtgatccaaccactttggcctcccagagtgctgggattacaggagtgagccactgtgtccagctggatgatgataataattaatactaatattcacatctatcaaatatgttatgaggaacttctgcttctagacacaatggagtaagaagaaccgatttgcttttccaccataaacaacttaaaacaaacaagcatacaaacaaacatataatccacagtaa

SEQ ID NO: 691960 - DNA, 1050 bp, Homo sapiens
tggttagactcatggtctgggcttctttattttggataaattttattaaaatggactacctcaggtaaatgaaagaacgatagaaacacacatttatttaacagtgtccttacaagaacagagcagatttttagaacttgaattgataacctcttgtacttatatgtgtgacccatcttacactcaacttattatcctcaagcaaacggctcactttcagactatctgtccaagaacaatgttgcccagttttgctcgtccacaattttctcgttttctctattgctcctgcatgatctccacacccattgaaaaactggagggggaaaggaaaaaaaagaaaaaacactctgcaaaaagaaaaccataaagtcaccacacactgaacagaaccatttctgccaccattacttgcttaccttatcttccctagtcttagctccctcacctaaaagaaatagtataaaataaccttttagccctaaaaattctgtacctctataagacctcacagccacctctgaaagctattaatcagataaacaaaaactcacatacaaaaagcattttcattacaaatayacaacagaataagaatttagctcagtgcaaactagagctctgtaggggagcaagtagaagtttaccaagcaagcaatagcatcaatgtaattgttcagttccttttagcggatttaattataactattttagagcatggtaacatggcaaaataataggtacatctaattagttttttaaaaaacttaaaaatgatattttaaaataatttaaataatatacattatgaaacttattttcatgtaatttcgaatcaaattagaactagaatgagcataatactttatacatgaagatactgagactcaggctgattcagagctctttccatgctatctcttgtctgtaatgccaccttctataatttcaaattagtttctacatggtagaaatgcaaattaagtaaggagtgattatgatcaagcttacagctcaatctatacgttgaaaatgagtaagactgcatgc

SEQ ID NO: 691961 - DNA, 810 bp, Homo sapiens
  misc_feature 516: n = A,T,C or G
ggatggctggggtagtgtggggctagaggatgggattagggagtgagacaaggctaaacccatctcactgtgccactaatctcaggagttatcatgttatccagaaattcctaaccccacttgattctatgagcagctctctggtgaacagagttcatggtatgaaagagataatcaactcagtgtgcagatccattgttttgtcactgatacaatggcagacattccaaaaatgaatcttcaccttgcctgtcaaagcctatctattctaattccccaccctgatcttggaaaactacaaaaagaaccaattaccctctgagttagtcagagccttatttgtactcaatgaggaatcacatacaggyacacaacccttccaacagcataactggtactgactattaacctagatcaatagtctcaacagaaaaggtcaaaggtccaatgggctctgggaaccccagaccacattactctccaccttgaccaacttgacagacaagctcaattgcncaggctgttccctttcagtcagtgcattagcaaagaacttcagagcttgaaactaacagtccttttctttatattaaataccaaaaaaggtaaataataataagcagaagatgacaaagaaggaataagaacaaagagaataaaacaagacaaagatttccattgccgactcactttttataaaagaatatacataattttgcagatttcctctataggaggcttcattttataatgagagatttgtgggaattctgctatatggcatgtagaaatctgtatggctgagtaaca

SEQ ID NO: 691962 - DNA, 1432 bp, Homo sapiens
  misc_feature 259, 283, 402, 666, 705, 706, 707, 708, 709, 710, 711, 712,713, 714, 715, 716, 717, 718, 719, 720, 721, 722, 723, 724,725, 726, 727, 728, 729, 730, 731, 732, 733, 734, 735, 736,737, 738, 739, 740, 741, 742, 743, 744, 745, 746, 747: n = A,T,C or G
  misc_feature 748, 749, 750, 751, 752, 753, 754, 755, 756, 757, 758, 759,760, 761, 762, 763, 764, 765, 766, 767, 768, 769, 770, 771,772, 773, 774, 775, 776, 777, 778, 779, 780, 781, 782, 783,784, 785, 786, 787, 788, 789, 790, 791, 792, 793, 794: n = A,T,C or G
  misc_feature 795, 796, 797, 798, 799, 800, 801, 802, 803, 804, 1199: n = A,T,C or G
gggttgaataaacgaaccagagttgctacccagggtaagatgatggcttaccttcatrtatgtctactggtataatgtaagattttatattaagccatttttaaatctgtaaatattgggtgattaaaagaggaaaataccaattttagtcacctggaaacagggtcatctgtggcagtgcctctttggctatgtcaatgatgggcaacatgaaagatggaaagagtatttctggtaatatttctgtttttgaaagcanaacaatataaaaatacagactttntaaacttttttgagacagggtctcgctgtgtcacccaggctgaagtacagtggcacgatcatggctcattgcaacctgaaacttgtgggctcaaaggatcctcctgcctcagcctcccnagtagctggaactacaggcgcgccccaccgtgcctggctgatttttttttttttaataaaaaatagagtcacatctcatttgttgcccaggctggtcttgaactcctgggctcaagtaatcctcccacctcggactcctagagtgtcaaaattacaggcatgagccaccacacccagccaaaacctagacccttgaaaaataaaaattaatttggccttcaagtttatctgggcccaaagaggattttataggtaatagaaagntataaaggattgtgataactactagtagcctttaaaacnnnnnnnnnnnnnnnnnnnnnnnnnnnnnnnnnnnnnnnnnnnnnnnnnnnnnnnnnnnnnnnnnnnnnnnnnnnnnnnnnnnnnnnnnnnnnnnnnnnntcaccatggttaagggtgaagcagagtggtggcctctacaggttaatgctggtctccggtctagtccattcctgaacccaggagatgaaagatttgtaaaatgaatcagagggctgggcacggtggctcatgcctgtaatcccagcacttttggaggccgaggtaggcggatcccctgaggtcaggagttcaagaccagcctgaccaacatggagaaaccctgtctctactaaaaatacaaaattagcccagcgtggtggcgcatgcctgtaatcccagctactcggaaggctgaggcaggagaattgcttgaacccgggaggcggaggttgtagtgagccgagattgtgccattgcactccagcctgggcaacaagagtgaaactccgtctcanaaaaaaaaaaaaaaaaaaaaaaaaaaggaatcagagaacaagcattctaatgtgaataggagttagtaccctccagtgtccagtgaggatattttctccaggtctaagctgtacatgagtacaacataagagaagactttttcagcatcaaacatctctgcttttgacaagcccaagagcgactgggcaaccaggctgagtaggggttcacccccagagactctaaaaccctg

SEQ ID NO: 691963 - DNA, 1384 bp, Homo sapiens
cattcatggagtgcaataatactgtatagctttccccacctcccacaaaatcacccagttaatgtgtgtgtgtgttttttttttaaggtaaacattactacttgtaactttttttcttagtcatatttgaaaaagtagaaaattgagttacaatttgattttttttccaaagatgtctgttaaatctgttgtgcttttatatgaatatttgttttttatagtttaaaattgatcctttgggaatccagttgaagttcccaaatactttataagagtttatcagacatctctaatttggccatgtccagtttatacagtttacaaaatatagcagatgcaagattatgggggaaatcctatattcagagtactctataaatttttgtgtatgtgtgtatgtgcgtgtgattaccagagaactactaaaaaaaccaactgctttttaaatcctattgtgtagttaaagtgtcatgccttgaccaatctaatgaattgattaattaactgggcctttatacttaactaaataaaaaactaagcagatatgagttaaatttaaaagtttcaatttattgctcagtgtacctgttaacattatatttaacaattgcttaaatttttgtttttgatttatggataatttcttaagagtacacactttagatacacaaataatcgttcatttaccatctttaggatcattgaaactcatctcactaaagaaagttcacttgaacctctttatagcattgatactaggtgaacagaaattacctgactaataatttgtctaacatcatatatcagaattttattgtatatgatgaacaaaacttaaaattttttaaatttaattyttaaatactgtttcagagttctaaaaaggcagttttttaaaaaacttaagttgataaaaactgtaagaataatttagcagaaatagaaccagaatgtagaagagtagtcatgtaacagcagtaataacatacttcagcttccatataggaatagaagtggtagagccaaaagtgatttaggaaaagttataaggtacaggttgagtatcccttttccaaaaatgcttgggacaagaagtatttcagatttcataatttttttcaaagtttggaatatttgcattatacttaccagttgggcatcccaaatctgaaatctgaaatgttccatgagcatttcctttgagtgtcatgttggcactcaaaaaggttcaacattgagtccacttaacacttaggtgttagaagacctaactttctgtaacaattaaccttatactttgtttgtcatcgaatatttgttgaatgcatgtcaggtaatggtcttgattgtgatagcttcaaggtggaacatactgtaatctcca

SEQ ID NO: 691964 - DNA, 451 bp, Homo sapiens
  misc_feature 447: n = A,T,C or G
acttcctttcacataataattatttaaaagtcttgattttaaaagtcattattattcttaatcttcagaaatctctatccagcagttatttacttcctgaattttcccttgagctttttcttttcctttagctcataatggctctttacattaacttaccatataccttgaaattactttcaatacattgtttatttggagagtacaagattcactgtagatcataaatattcacaaacactatttactatcataaagactaattactttcttatgaggttataaactttataactttttcccccccactaaacgtaattgatcgtgtcagagtatttttacactgagaaaatacttactastgtaaggctgccacgttgccaggacagtattttgggtgagaattcaaggcaaactgcctcaggaggtcgaagggagtgcagtagnccct

SEQ ID NO: 691965 - DNA, 644 bp, Homo sapiens
ttgtatgcttagacgcaataggctataccatctaagtttatgtaagtacactgtatgttcacacagtgaggaaatcgcctagtgacacatttctcagaacctatccctgttaagtgacacacggctgttcttgagctgctgcttcataggccactccctccctctgtaatgctctgttttgttcttggaatctctcgagtacttcacatctccaaacttcatttcaccgckggtatattgtggaaattataggtaaaccaattagtatgaatccatctactttctgttttctagagtttttaatacagtttctgacccactggtccttctttcctggaggtattgcagtttctggaccactggtccttctttcttttcagtgttgccacaaaattattgcttgtaccactttcctgtcatgtcactcagatcctaagaagggggaggcagatgcatgtgcttagtctgttgtcttaaattggaagtcagacaagcacacttctaaaggttttttgtatttgataatatatgtatacattttgagactgttttctgttcttgttgcctaagctgtagtgcagggacatgatcacgggtcactgcttaagggatcccccaccttaggcttcccagtagctgggact

SEQ ID NO: 691966 - DNA, 873 bp, Homo sapiens
  misc_feature 652, 656: n = A,T,C or G
tttctgtggcttctcattctcttgaaaatttaagtgattttcaacttttttttttttttaatgagcctatacccagtttttgcatttaaggttttcaccaatgctcacctcaacaccaatgacaatttataatattctttcaatgggaaaacatagtcctctctgcaaatggttgacttctaaacaaactgttggaatatgattcatttgcaccaataagagaccactattacagaacaagtttagcaggagggtgggaataagtctgatggcaaaagtctaaagagggttaagtttgacaatgagaaaagacagactagacagcagagtaagaccctgtctccaaataaataaataaatagcagtaatccaggctactaaaatggcaagttttaagtgagtgaacatattttccagttatgtcctaaaattttgaattcctcattaatttccccatactccagatccttagaaccctctagtgtccgtatgaggaattggtttaggtgaaccaagtaaaatgcttttaatttttacattcatgtttttaatatatatatatatatatatatatatatatayacacacacatatacatacacatatatatacacatatatatacatatacatatatatacacacatatacgngtgnatatatatatgctggatgtagtgagttatgcctgtaatcccagcactttgggaggctgtgacgggagcattacttgagcccaggagtgtgagaccagcttgggcaacatagtgagacccgatctctatgaaagtcgttttttaaattctccagacatggtggcgcatgcctgtggtctcagctatctgggaggctgaggtgaaaggataacttgagc

SEQ ID NO: 691967 - DNA, 642 bp, Homo sapiens
tatgttgtcaagcaagaggcaagtaattctagaatgaggttggtttttaaaaacactattaatagcttctctgataaaataaatgtaaactgtttattaaaatgttttttctctcacctagtggttctggggaagcattcaaatggatgcccgagctggagaaactatgtatttatatgaaaaggtatgcttttaaccccttacttatttgttctgtgagcttgattgtttgaaaataacacttttctgtccagaaggtttagaagcatgtttaggaatttcagaatgattaaaacaattgggatatcaagttatcttagtctatgtagatttaagtggaactattcaatgtaatgtgtattattttaacctaatatatgttgttctgtgcgaattcttggtgataacattacgaacaagaacatctctatcttcagaaacttwgacttttaatggaaagatagatttgtacgtagttaacgatggggaatgatgtgtgccacaactgagtaatgtattttaggtagcctcgctctgagagactcaggagggaataaaaaggtgaaataaatgttgacccaacttactaggccaactaggtaaggacattcgttagaaccccaattgggagagggtatgaaa

SEQ ID NO: 691968 - DNA, 401 bp, Homo sapiens
gagacggagcctcactctgtcaccagtctggagtgcagtggcgtgatctcggctcactgcaacctccaactccctggttcaagcgattctcctgcctcagcctcccgagtagctgggattacaagcacatgccaccacacccagcaatttttgtatttttaggagagatggggtttcaccatgttggccaggatggtctcgatctcctgacctcgtgatccgcgcaccttggcctccccaagtgctggaattacaccatgcctggtgctggtgagccaccgtgcctggccaaaagtgtccatttttattgagtaaaactgaagaatgtttccagcatgaaaacagatgaggggaggggttaggccatggatctttatggcaccaggarcactcttgcatca

SEQ ID NO: 691969 - DNA, 657 bp, Homo sapiens
tcaaatttaactgcttgataggctggcatatagcagttaagaattttcaagaagaatacatctaatgtaaagactcttagcttctttgtaggttttgaactgcctgtgacccagtgatctggtaaagaaatataagcataaggttatttaccacagtagtgttacttaatattatcaaacattttcctcctctcataccatgaattcagttaacaaagtgactaaacatattttctttctggcaaagccttgctgaaagttrccattttatcatcctttataacttctaatgaataagattattaaataaaaatgaatgagggagtgactatttacatggtcaattgttctttctttgaagctaggcacccattcacgtaggtcatgaggaaaactatgtattcgttcactgcttcaccctaacacttacaacccctcgcatacagtgtgttcaacacatgcttgtggaacaatgaatatggaataaaggaatgtccgtaatcacttttaaaaatatacatatatagtgcttgagaaagaaatacactggtgcttcccaaatatctgaaactatttactaagacatgcattagtatgtcttagagttaagagattactaaaactgattttactttagcaaatacccaagaagaaaac

SEQ ID NO: 691970 - DNA, 1326 bp, Homo sapiens
gagtccagtggtggtgggctggacagaagaaccactttatatatagaaaaggggcattggcaggaggctggacaacatatctgtctttctacagtccagtggtggcaggcagggcaggaaaatcacaactgcctacaaacatgtagtttacatagcattgtcacttgacgtcttccccctaatgacttccacctggcaaccttcatttaacccaaaactcagggcctcaatyccctgtacatcccatgttacatgatgggcggtgctcacatgtttatcatagataaagaacaaatcactgggttgggcacttggggactccttaactcagaacacacatttaggtgtgtctgccatacagggtcattctcagaatgtgcttaggttattgctatcagctgagtttacagaggctgaggtgcaaggatcacttgaggtcgggagttcgagagcagcctgggcaacatagtgaaactatgccaccctccccatctctacaaaaaatatctttcaaaacaaaaagtaacttttccccccagggataatttttctatttctaaagtggaactgatgtgcatatgcatatcaatatatattttagtatttgctttatgagaaaaatcgaatttcttttaaaaagactttctggatcccctgatatagctatcatagtgccatgctttgtgctcagttacctagacttaacatggattgaaatcctgtgtgaagctatggagagtcactaaagtgacctagaagaaaccacagtctagtaggatggagaagtcatgttaatatatagctattaaaaagctggaagctgataggtgtagaacaggtgtagttacaaagtctcataggagggagagtctatgtatagtttagaagagtgatcctcccgctttggcttcccaaagtgctgggatcacaggcataagccaacgtgcctacctgtaattgaattttcaagtgaaaaacctgactatattgcctgcctaatctaagatgtgtcatattatgaaattttaacaagctctctttcagtgtttaataaaattaaaaccctggaagtgatcacttattaaatgaacaccaaggcaaggagctggtctggcaaaacagaaatgtgtaaggcagaaacctaaacttgagaagcttacagtccagtggaggatgataaacccactgccaccgataggggaagtgctttgaatgatggaagggaaaatggggtaaagggaataaagggggcccaagagaagctggaagcatgaaccccgggctggcttggattatttttctaaacttacatactggcttacacta

SEQ ID NO: 691971 - DNA, 628 bp, Homo sapiens
aagatatggacagaaatcaaactactaaaaaatctggttattttcccttctttcctcttttccataatttttttttttttgagatggggtcgtgctctgctgcccaggctagagtgtagtggcttgatctcagctcactgcaacctctgcctcctgggctcaagagaccttcccaccccatccccccactctgagcagctgggaccacagaagtgcatcactatgcccagctaattttttgtagttttggtagtgatggggtttctccatgttgccacaggctggtctcaaactcctgagctcaaatgatccgcccacctcagcccccaagtactgggattacaggggtgagccaccgtgcccagcctccatagatattttttgagagcacaagtgccagggtacaaasatggaaaggatatggttcttttccctattcttgagtagctcatattttaatagaggagacagccatgttaaccaatatttccaatacaaggtgacaggagccatactgaggtataaacagtattaagctcatacaaatcagaagaagcagtttactctccatgggatagtcaaagaaggcttcattgaggtgatgcttgagtggggtcctgaatgaata

SEQ ID NO: 691972 - DNA, 653 bp, Homo sapiens
gcacaggtttggagtaggtcttgagtgcactgtgctgaagaacgctgatcctctcgagacaagcagaggcaggcttcaccagagtcccagcccacggtggggagaggaggcaggagaaggattcagcagccatatgtgtaattgatctcttggaaaacattaataccaactgatcagtatctggaaggagaagctaagcctcctctgagcaaggtttctaagaaacaggaggcaggrtgaggacagaaggaggagggaagaaatgctcatagcctggtcgatgggcctggagatccctggcccccatcgggggcagagggaggaagcttggctgttctgtgaattcataatcatggagcaatggcctctctggtcttctgcggccctgcacccccatctctgctcagcacttaagaacctaagttgtaaccattgacttccaggcctgtcttcctataggacacagctctttgggggcaggaactctgtgattgttgtctcccagctcccagatcatgaagaagtgctcattaagtgaatggtcaaacgtgaggacgggggcctctggctttgtattcctggcatttggtgtggatgaggccagagtcggggactaggagtgaatgtgttcagtttttctgctagctgtggca

SEQ ID NO: 691973 - DNA, 873 bp, Homo sapiens
tgcaactttgttctggccaaaggggttaaggtgaaatgatgtgtcctcagaggaaaagggtccctccgtcctcagtgcactggaatggcacagccgtctggcatcactccacagtggtcgcatgctaggcatggcagaggaacacagcagaaagctgggcctcgctcaccayggtgctgtgccttctacctccttcagtgggagagaagcaagcattgtttaattatttaattaaacaatgtttaatcattattacttgctgcaacacccggaacctattttcttttttttttttttgagacagagtctcgttctgtcatcagactggagtgcagtggtgagatctcagctcactgcaacctccgcctcctaggctcaagcgattctcctgcctcagcctcccgagtagctgggactacaggtgtgcaccaccatgcccggctaatttttgtacttttagtagagatggggtttcaccatgttggccaggatggtcttgatctcttgaccttgtgatccatccgcctcggcctcccaaagtgctgggattataggcgtgagccactgcatccatccttaatacactttttgatttgagcaaagttcttcccctcctctgtgcctcagtttttacatctgtgtatcaaagaggttggactagatgatgccaaatgtctacttcaggtctcacattttctaagacagaatggcatgccataaggaaaagacagcagtgagaaaaatagtacaaaggacttccttgctccagcatcttgacacgctgccctgctattgactggcccatcaaaatcagcaagagtgcgacatgaatatcagtgggatctgcatcagcaagagtgcgacatcagtatc

SEQ ID NO: 691974 - DNA, 672 bp, Homo sapiens
gttcttgagttaatgctgcagagaggttagaccgaatcaaatccttaagtgtctccaaaactagaggaaaggttatgaaaccagctgttaatccttgccgctccatgtatgtgtggaggggaatagagtataatataatatagtatactagatacagatacagtgtgaaatgctttacataaatctccttattcaacccccccatgacaaytttacaacaaaaataccattttattctgattttacagatgaagaaataaattacaagttcagaatcaaataggccaaagttcaaatcctgattgccccacttacttgttttctgccctagggaagaatacatagcccctgagccttcattttctcacttaaaataataacacctacttccaaagcactatgaacagttgtgaaacttgtgtattgcacgaaaatatgatttggggctaaaatccagcctgcattccctcaccaacccatgtgccttacgactttttctttccagattcaacagctttttctaacttgcacagagaaattctataggctagtggcagccagtgctgcaacccagtagagttcatagttttgtaaagattaagggagataaattaatagtgccttgtgtatagaaagcttataattaatatctgctctctttattccctttaa

SEQ ID NO: 691975 - DNA, 672 bp, Homo sapiens
gttcttgagttaatgctgcagagaggttagaccgaatcaaatccttaagtgtctccaaaactagaggaaaggttatgaaaccagctgttaatccttgccgctccatgtatgtgtggaggggaatagagtataatataatatagtatactagatacagatacagtgtgaaatgctttacataaatctccttattcaacccccccatgacaactttacaacaaaaataccattttattctgattttacagatgaagaaataaattacaagttcagaatcaaataggccaaagttcaaatcctgattgccccacttacttgttttctgccctagggaagaatacatagcccctgwgccttcattttctcacttaaaataataacacctacttccaaagcactatgaacagttgtgaaacttgtgtattgcacgaaaatatgatttggggctaaaatccagcctgcattccctcaccaacccatgtgccttacgactttttctttccagattcaacagctttttctaacttgcacagagaaattctataggctagtggcagccagtgctgcaacccagtagagttcatagttttgtaaagattaagggagataaattaatagtgccttgtgtatagaaagcttataattaatatctgctctctttattccctttaa

SEQ ID NO: 691976 - DNA, 567 bp, Homo sapiens
ctctatgacgttctctcccctctggtacactgtcccgtgaattctagttaccttggcctgcccagcatctcaactttatctcctcaactcaaaaagtccactaggctctgcttgagtttctcctccctgcattaagcctgaaaatattctcaaggaaataagctggatgacagtagggctcaccttacttacttcccttctctcggatatctctgcccttcaktgcctgatattcaatgacttttttcattatttcatatattttgtctatttcttgcttgtttcaagtaagagactaaatttgttacctgttctccacttgaccagaagcagaagcattaatactacatactttgagtaaaacttatggtttcaaaaactgtttccattttgacccacaaaacagcaattttatacgtttcaatctaatattatactgctttcaaagaatctaagagacttctgatgaaaaaatatgtttaataaccctacctaaaaaagtgaaatgaggtttatttgatctgccttatccttggtgaacctacttaaggcttgcatttattttca

SEQ ID NO: 691977 - DNA, 567 bp, Homo sapiens
ctctatgacgttctctcccctctggtacactgtcccgtgaattctagttaccttggcctgcccagcatctcaactttatctcctcaactcaaaaagtccactaggctctgcttgagtttctcctccctgcattaagcctgaaaatattctcaaggaaataagctggatgacagtagggctcaccttacttacttcccttctctcggatatctctgcccttcattgcctgatattcaatgacttttttcattatttcatatattttgtctatttcttgcttgtttcaagtaagagactaaatttgttacctgttctccacttgaccagaagcagaagcattaatactacatactttgagtaaaacttayggtttcaaaaactgtttccattttgacccacaaaacagcaattttatacgtttcaatctaatattatactgctttcaaagaatctaagagacttctgatgaaaaaatatgtttaataaccctacctaaaaaagtgaaatgaggtttatttgatctgccttatccttggtgaacctacttaaggcttgcatttattttca

SEQ ID NO: 691978 - DNA, 567 bp, Homo sapiens
ctctatgacgttctctcccctctggtacactgtcccgtgaattctagttaccttggcctgcccagcatctcaactttatctcctcaactcaaaaagtccactaggctctgcttgagtttctcctccctgcattaagcctgaaaatattctcaaggaaataagctggatgacagtagggctcaccttacttacttcccttctctcggatatctctgcccttcattgcctgatattcaatgacttttttcattatttcatatattttgtctatttcttgcttgtttcaagtaagagactaaatttgttacctgttctccacttgaccagaagcagaagcattaatactacatactttgagtaaaacttatggtttcaaaaactgtttccattttgacccacaaaacagcaattttatacgtttcaatctaatattatactgctttcaaagaatctaagagacttctgatgaaaaaatatgtttaataaccctacctaaaaaagtgaaatgargtttatttgatctgccttatccttggtgaacctacttaaggcttgcatttattttca

SEQ ID NO: 691979 - DNA, 621 bp, Homo sapiens
tctccagttccatccatgttgtcacaaataacagaatttcttcyctttttacaggtgtatagtattccattgtgtgtacataccacattttctttatgcattcatctgttgatggacacagcaataaagtttaatgggcttggagaactgaaattattttctcatggtcatacagaggaacagagttaggattcagatcaagagttgaccgagtcttcctgttccaaaatatgaagcctgaccacatatacccagtgttaccataagaggaataaaaggacacaaggccgtggtggctgctgatgtctgttccacatgccaagctggagaaaagcttgtgaaaaatttgacatgttcacagcatatgatttggttagtgggaggtgatgattcctcaacttatgtcactaaaaatcaatccatcttcttccatttttgatcagattatccaacaatgattttagtcaaattagagcacctaatgcccttgaaagttattttgaactttttttttttttttttttttgagatggagtcttgctctgtcgcccaggctggagtgcagtggcgcgatctcggctcactgcaagctccgcctcccgggttcacaccattctcctg

SEQ ID NO: 691980 - DNA, 663 bp, Homo sapiens
agcagggctttgtcccctggtgtctacataagtggaaaacaaaacaaaaggaaaagatggagctgacgcatctttatttgtaccaacacaggctatgttgaaggacatgacctaaggttttttagaaactgaaattcctcactaacaccaagaactgggcagacacagcttccttcccagacacaggctgcactgaactggtcacccctagccccactcaggggaggccacgccaaacgtccagcacagagctgcagacgggaactcaggctctgtgaccaacgaactcccaagaccaagcagggcccagccaagtcaaatccagcacccggttatcgggaccaacagcaatcagataagtmactctgcctctccacatttacctagccaaactcccttcttacaaaagaggcttgagggtttgtgaagagtattattctccattaacaaatacggtgtcattgttatccccattttattactggcatacttgaggcctagggagaggaagtgattagcccaaagtcagaaaaccagtcatctgtgaagctggatctcaaagtcaggccctctacaaaccctacatctcacgatctttctacactaaccttgtacatccaatagcatcccactgtcatgaaaaggttactatcccattaagtg

SEQ ID NO: 691981 - DNA, 646 bp, Homo sapiens
gcctcagcctcccagatagctgggattacaggcaagttccaccatgcccagctaatttttgtatttttagtagagacagggtttcaccatgttcgtcaggctggtctcaaactcctgacctcaggtgatccttccgmttcagcctcccaaagtgctgggattacaggcataagctaccgtgcccagccttaatggtctttttaaaggatacctgatttcagaaggaacctttgaagaaatggctagaacttctgtgtttctttggatattgcctgacatctaagccaaattagttgaccttttaatgttaaataaaatattcaataacttttactaatgggtgggctttaggaacccctttattttactatgttgccaaaagtaggttcattataacattggaaacatcctgatgtaatttattgaatgtaaaattattcctcaatacatttgaggatgatttccataaagggaaacaaattcctttcttccaaatatactgtgacagcctattttgaaatatttaaaatatgtccctaaagatgaaaattaaagagcggacacaaagttgttatgctctaaggagtcattcttttgatttaaaattcattataattccctggttgtctagtggttaggattcagc

SEQ ID NO: 691982 - DNA, 646 bp, Homo sapiens
gcctcagcctcccagatagctgggattacaggcaagttccaccatgcccagctaatttttgtatttttagtagagacagggtttcaccatgttcgtcaggctggtctcaaactcctgacctcaggtgatccttccgcttcagcctcccaaagtgctgggattacaggcataagctaccgtgcccagccttaatggtctttttaaaggatacctgatttcagaaggaacctttgaagaaatggctagaacttctgtgtttctttggatattgcctgacatctaagccaaattagttgaccttttaatgttaaataaaatattcaataacttttamtaatgggtgggctttaggaacccctttattttactatgttgccaaaagtaggttcattataacattggaaacatcctgatgtaatttattgaatgtaaaattattcctcaatacatttgaggatgatttccataaagggaaacaaattcctttcttccaaatatactgtgacagcctattttgaaatatttaaaatatgtccctaaagatgaaaattaaagagcggacacaaagttgttatgctctaaggagtcattcttttgatttaaaattcattataattccctggttgtctagtggttaggattcagc

SEQ ID NO: 691983 - DNA, 580 bp, Homo sapiens
tgcctgcctcagcctccaaagtgctaggattacaggtgtgagccaccaagcccggccaaagaaagcacttttaaagaaagtgaggacatgccagccttcaagtgactgtgaatgggaggagggctttgaagtccctagtccctacataacacaagtgatgtctcacacacctcacaacccactgcaaacggaacctcaaatggtaaggggtttgttccagaactatctgccggtctaaatcatgcccaaaaagtcagatgagaagacycgaccactgaggtgagaacagcacgtggtcagcatcactgccctagccatgtgtcgtcttaagaataagcggattgggaggccgagccgggcagatcacctgaggccaggagttggagaccagcctggccaacatggtgaaaccccatctctactaaaaatacaaaaattagccaggcatggtggtggatgcctgtaatcccagctactcgggaggctgaggcaggaggatcgcttgaacccaggaggcaaaggttgcagtgagctgagatcgtgccgctgcattccagcctgggtgacagagcaagactct

SEQ ID NO: 691984 - DNA, 618 bp, Homo sapiens
aaaatgctcttattttggatacatcttatgcatattttaaaaaacactctttatgaaaaacatctttgcatcttaagtttatttgctttgaaagctttaagtcttttttttttttttttttttttyttttttttttttttttttttgagatggagtctcgctctgttgcccagactggagtgcagtagtgtgatcctggctcatggcaccatccacctcccgggttcatgcaattctcctgcctcagcctcctgagtagctggcactacagatgcatgccaccatgcccagctaatttttgtggtttttttagtagagatggagtttcaccatgtgggctaggttggccttgagctcccgatctcaggtgatccgcctgcctcggccttccagagtgctgggattacaggcgtgagtcaccatacctggcctggcagctttcagtcataatatatacatctcaattatttttatactaacttattggtttcttatataaattccaaggcatgtctaatagtctgtcattgcaatctgaatcagctttttttttcctgagcaaacacaattagaagggctttaggattaattacatgattaaacatttagtgactccca

SEQ ID NO: 691985 - DNA, 1932 bp, Homo sapiens
catatcatttctaaaagtggtaaaatgataagattaaggatgactttctttagtttttttcctattttccaatattttacagggaacattatacttttataatcggggaaaaataccttcactagaatttttttccaccaggaaatggattagaattgagctgtgctgttataatagattcaattagcctttcaactgtcaccaagttattattgcagtgggctagccttctgagggataaaatgatcaactaagtttattttatacataaaaagattttaggtgatagcctcagagatgtaaaatactcagaaaataagaattgtgtctgaagatcattggatatagaaaaattggcagttaatttttttttcttcagttaccactctggtttgaagaataatatgaaatagcacctccccagaatagttattatgttctggggaggtctttaccaggtccattcctcaaccagggctttcctagatatgggtgggctggaggtggaagcagtggggacaagttacgtatcatccttcctcctgatatttttctacagataaaaatgaatgtgcaattaatgtctatgataaatagttcctataatgtgaatgctgattcaatttaggagtaaatgtactaagagcttttagaagaaagtcatatttttttggatgcttccctcatttaatcctcaaatatgcaacaaattagccattattatagattcaaaggttaaatctgtaaaccaaggccttgtctactggagtccatgttccaaaccacccctcctgatggactgactcctgcacttctctacctttatgaataactgtaataagctaatttatttaaaacattgaatattgctagcttagatctttaaattgtacttctaaactattccacatttttcaaacctaaattttccccatcatgattaaaaggtgaagcatcttggaaatcaattttcactaattctatgttttcttcaatgtatcaaatgtttgaaaataccatgcatgtactcccagcaaatggttaacatcttaactattctgtttctttttcaatgctgagattcagatatcatttatttgtggcagtctctgtgggttttcaaacttttatattgcatcataagacaattaacttttcctaataagggctgtcaccctaactataagtaaaaagtcacatgcaatattaaagtccacagaaagattgtgattcagtcacaagctcaagactgcacattgatgrtatggacatctctattaagtcaggtgctgggcagacttgtcccttgctcctcatttgttgattcatttgtgaattcactgaactgcactgcactgtgttgagcacttgctttgtgcctagtgctgtgccagacactaggcatcaagaaggttcagagcctacagtgatattgcaaggatattgactcagaaccttggtgctgactgcttctattctcagttattgtggttagggttctccactctagttctggccctgggactccaacccaccctctgcacactctgagtaggtatcccatgaggtatgtgagataactgggttatttaagccagactcctaaaagtggaggttattggaaaaccaaacaaggcatctcaaattcaggctccaagggctgtttctgtcccacctggacctgagacccccacggcctgagaatattgttctagtgccctgggcttctgcttgtctagcattttaggggacaaggaaatattctgcaaaggtcatttatctgtgaaagcagtgacttatgacatgggaaggcctctgctggctgcaggggttggccctggccagatttgttgctgcatggatttctgtgccctggtcagccatccaccaaaggtggcaatcctgttcctcaccctgtgctgttgttgccaa

SEQ ID NO: 691986 - DNA, 675 bp, Homo sapiens
aaatacaaaaattagctggcatggtggcaggcaccggtaatcccagctactcaggaggctgaggcaggagaatcgcttgaatctgggagkcagaggttgcagtaagccaagatcatgccactgcactgtagcctgggtgacagagcaagactctgtctcaaaaaaaaaaaaaaaaaaaaaaaaaaagggagaaagcattctaacacaatttaattaatactaattgtgaagcacccctgcaaggtaaccccagcccccaaaacacagcctgagccaattattctaataaaaatttgtagaatgaatgaatgaatggttatatagccactgtcaaacaggataaaataaaccccacaggaaaatgggaatatttccacatttcctgctggagactcagttctgtacctcaaaacagaatggcttggagagtcagacagtcagaggttgactttcttccactgagctcaggggctgaaaatcttgactgtgcataggatatgatgtgcagggctgtacatatgcgatcagacgtgccgtgcgtgtggggagttttcaaggagaatgttgactatacgagattttggttttaaatgctacctctagaacctacactctgcacaagatggacttccattttatctcatttttaatgtcaattcttgatttgttttagtc

SEQ ID NO: 691987 - DNA, 675 bp, Homo sapiens
aaatacaaaaattagctggcatggtggcaggcaccggtaatcccagctactcaggaggctgaggcaggagaatcgcttgaatctgggaggcagaggttgcagtaagccaagatcatgccactgcactgtagcctgggtgacagagcaagactctgtctcaaaaaaaaaaaaaaaaaaaaaaaaaaagggagaaagcattctaacacaatttaattaatactaattgtgaagcacccctgcaaggtaaccccagcccccaaaacacagcctgagccaattattctaataaaaatttgtagaatgaatgaatgaatggttatatagccactgtcaaacaggataaaataaaccccacaggaaaatgggaatatttccacatttcctgctggagaytcagttctgtacctcaaaacagaatggcttggagagtcagacagtcagaggttgactttcttccactgagctcaggggctgaaaatcttgactgtgcataggatatgatgtgcagggctgtacatatgcgatcagacgtgccgtgcgtgtggggagttttcaaggagaatgttgactatacgagattttggttttaaatgctacctctagaacctacactctgcacaagatggacttccattttatctcatttttaatgtcaattcttgatttgttttagtc

SEQ ID NO: 691988 - DNA, 675 bp, Homo sapiens
aaatacaaaaattagctggcatggtggcaggcaccggtaatcccagctactcaggaggctgaggcaggagaatcgcttgaatctgggaggcagaggttgcagtaagccaagatcatgccactgcactgtagcctgggtgacagagcaagactctgtctcaaaaaaaaaaaaaaaaaaaaaaaaaaagggagaaagcattctaacacaatttaattaatactaattgtgaagcacccctgcaaggtaaccccagcccccaaaacacagcctgagccaattattctaataaaaatttgtagaatgaatgaatgaatggttatatagccactgtcaaacaggataaaataaaccccacaggaaaatgggaatatttccacatttcctgctggagactcagttctgtacctcaaaacagaatggcttggagagtcagacagtcagaggttgactttcttccactgagctyaggggctgaaaatcttgactgtgcataggatatgatgtgcagggctgtacatatgcgatcagacgtgccgtgcgtgtggggagttttcaaggagaatgttgactatacgagattttggttttaaatgctacctctagaacctacactctgcacaagatggacttccattttatctcatttttaatgtcaattcttgatttgttttagtc

SEQ ID NO: 691989 - DNA, 542 bp, Homo sapiens
gatagatgccccgaagaccctgacctcaccaccgtgcaatatatcaacagagcacaactgcatgtgtgccccatgaatatatacaaataaaaataaatacatgtttaggctgggcgtggtggctcacacatgtaatctcagcattttgggaggccaaggcgggtggaccacttgaggtcaggagttcgagaccagcctggccgacatggtgaaactccatctctactaaaaatacaaataaaaatacaaatactatatataaataaaaataaataaatgtttaggccatgtgtggtggcaggcgcctgtaatcccaactactcaggaggctgaggcaggagaatcacttgaacccaggaagcagaggctgcagtgagctgagatcgcaccactgcactccggcctrggtgacagagcgagactctgtctcaaaaataataataaaaataaataaatgtttaaacataaagtgaaccaagtatgaaactaacacctgtagaaccctcatggaaaagccctggttttacatctatacttgggta

SEQ ID NO: 691990 - DNA, 630 bp, Homo sapiens
agtctctcttttcacatttttctgcctgcttatattctagccttactggcagctaattagattgtgcctgcccaaattaagggtgggtctgcctttctcaacccactgactcaaatgttaatctcctttggcaacaccctcacagacacacccaggatcaatactttgtattcttcattccgatcaagttgacacccaatattaaccaccacaacaccctgtgaggttgggaatacaatttgctttgtaaccaaccactttcaggatgaaatcctgggtttggtttttagccatttcagctctctaggttggtatcactacatttttgtagctttacagtaattttattgtttgaacatcactgtgggctcatagccttttatacatccaacttgtttcaattagttattatttgcttaaatagacacaacctggtcagtgagagacctcttaaatgggctcctttgtcctctggaatccttggaagcaatctttactttttggtcacagtagatttctaaccctattgtaattttgttcttcttcrcgatgtggaatcatttaccctcttttaagtatcagtgacttacctcagggaagaatattagagatttaagtttgagtacacat

SEQ ID NO: 691991 - DNA, 1300 bp, Homo sapiens
tttttgacagagccttgctccgtcccccatgctggagtgcagtggcacgatgctcggctcactgcaacctccacctcccgggttcaagcgattctcctgcctcaggctcccgagtagctgggattacaggcgcgcgccaccatgcccagctaattttttgtatttttggtagagacggcatttcaccatgttggccaggctggtctcgaactcctgaccttaggtgatctgcctgcctcggcttcccaaagtgttaggattacaggcgtcacgactgtgcctggcccagatgtctctaattctaacatgagatgtattgcaggatcatagcagagtgagttgctgatgtatccagaaggaaacgagcatggaacactcacgacagctgtcctgagaagtgtgtgtgtgctgtgcttgaatatctcactgctcatttatacacaggctttctggtgactgagttaacagtatctgtttcataaataatgtagccctctttctttctttctctctctctctctcttttttttttttttttttttttttgagacagggtcttgctctgctacccaggctggagtgcaatggtgcagtctcagctcactgcaacttcaccatgcctggctaattttttcttttttttttttttgagacggagtttcgctgtttttgcccaggctggagtgcaatggcacaatctcggctcaccacaatctttgccttttgggttcaagggattctcctgcctcagcctcccgagtagctgggattacaggcatgtgccaccacacccggctaatgttgtagttttagtagagacggggtttccctatgttggttaggctggtctcaaactcctgacctcaggtgatctacccgcctcggcctctcaaagtgctgggatcacaggcatgagccatcactcctggcctaatttttgtatttttagtagagagagggtttcactctgttggccaggctggtctcgaattcctgacctcaagttatctgcctgcctcggcctcccaaactgttggarttacaggcgtgaaccaccatgcctggccagctctatttctttaagcctacatgttttgcacttgttaaaagtatttgaacatacaattactcagcttcccttgtttacgcgtgaattttgtagaatcttaaatattttttccaatctaagctttattttatcccgtttcttctatatttgtataactttaggcggctatcttcattgaaagttttttctcaaaagccttaagatagaacatagttcttggcagcaatttga

SEQ ID NO: 691992 - DNA, 1135 bp, Homo sapiens
aaagccaaaggtccggtgatgatcccatacccttttttccagtctcatgttgaagatttttatgtagaaggccttcccaaaggaatttttttttttttttttttgagatggagttttcactcttactcgcccaggctggggtgcaatggcgcaaccttgctggtcactgcaacctctgcctcctgggttcaagaaattctcctgccttagcctcccaagtcactgggattacaggtgcccaccaccayaccaggctaatttttgtatttttagtggagatgcggtttcaccatgttggccgggccagtctcgaactcctgacgtcaagtgatcttcccgcctcgactcctgatatcaagtgatcttcccgcctcggcctcccagagtgctgagattacagacgtgaacccatgcctggccaggaattttgttttttaggaaggctttctactaatggaattcctggccttgagaggatgttactttagaaggaaaggatttttttgttattaaaaggtaagattcctggattcttattggactgttgtctctgttatgagtaatccatctttagtcattcaccactagggttgtatttaagtctgagttattttatggtggttttgttttgtttttaccgaattttgttctcattgccgtggcttgagggcaatgacgtgatctcaggtcaccacattctctgccttccaggttcaagcaattctcctgcctcagcctccttagtagctggatttacaggcatgcgccaccatgcctggctaattttttgtatttttagtagagatggtgtttcaccatgttgaccaggctggtctagaactcctgaccttgggtgatccacccgcctcggcctcccaaagtgctgggattacaggcatgagcactgcgccagcctgggcctgcttctttctctttttctttttttttcattagcagcttaaaattggtgccttattcagacacaagcaataggacattagcccagctttggaaataggtgagagcccatatatgattttcctagtttctcctccccttttgctttttgctctcttgttagtatattaattgttttcactctctgaatcttttttccccatttctttggcagaca

SEQ ID NO: 691993 - DNA, 1135 bp, Homo sapiens
aaagccaaaggtccggtgatgatcccatacccttttttccagtctcatgttgaagatttttatgtagaaggccttcccaaaggaatttttttttttttttttttgagatggagttttcactcttactcgcccaggctggggtgcaatggcgcaaccttgctggtcactgcaacctctgcctcctgggttcaagaaattctcctgccttagcctcccaagtcactgggattacaggtgcccaccaccataccaggctaatttttgtatttttagtggagatgcggtttcaccatgttggccgggccagtctcgaactcctgacgtcaagtgatcttcccgcctcgactcctgatatcaagtgatcttcccgcctcggcctcccagagtgctgagattacagacgtgaacccatgcctggccaggaattttgttttttaggaaggctttctactaatggaattcctggccttgagaggatgttactttagaaggaaaggatttttttgttattaaaaggtaagattcctggattcttattggacygttgtctctgttatgagtaatccatctttagtcattcaccactagggttgtatttaagtctgagttattttatggtggttttgttttgtttttaccgaattttgttctcattgccgtggcttgagggcaatgacgtgatctcaggtcaccacattctctgccttccaggttcaagcaattctcctgcctcagcctccttagtagctggatttacaggcatgcgccaccatgcctggctaattttttgtatttttagtagagatggtgtttcaccatgttgaccaggctggtctagaactcctgaccttgggtgatccacccgcctcggcctcccaaagtgctgggattacaggcatgagcactgcgccagcctgggcctgcttctttctctttttctttttttttcattagcagcttaaaattggtgccttattcagacacaagcaataggacattagcccagctttggaaataggtgagagcccatatatgattttcctagtttctcctccccttttgctttttgctctcttgttagtatattaattgttttcactctctgaatcttttttccccatttctttggcagaca

SEQ ID NO: 691994 - DNA, 1135 bp, Homo sapiens
aaagccaaaggtccggtgatgatcccatacccttttttccagtctcatgttgaagatttttatgtagaaggccttcccaaaggaatttttttttttttttttttgagatggagttttcactcttactcgcccaggctggggtgcaatggcgcaaccttgctggtcactgcaacctctgcctcctgggttcaagaaattctcctgccttagcctcccaagtcactgggattacaggtgcccaccaccataccaggctaatttttgtatttttagtggagatgcggtttcaccatgttggccgggccagtctcgaactcctgacgtcaagtgatcttcccgcctcgactcctgatatcaagtgatcttcccgcctcggcctcccagagtgctgagattacagacgtgaacccatgcctggccaggaattttgttttttaggaaggctttctactaatggaattcctggccttgagaggatgttactttagaaggaaaggatttttttgttattaaaaggtaagattcctggattcttattggactgttrtctctgttatgagtaatccatctttagtcattcaccactagggttgtatttaagtctgagttattttatggtggttttgttttgtttttaccgaattttgttctcattgccgtggcttgagggcaatgacgtgatctcaggtcaccacattctctgccttccaggttcaagcaattctcctgcctcagcctccttagtagctggatttacaggcatgcgccaccatgcctggctaattttttgtatttttagtagagatggtgtttcaccatgttgaccaggctggtctagaactcctgaccttgggtgatccacccgcctcggcctcccaaagtgctgggattacaggcatgagcactgcgccagcctgggcctgcttctttctctttttctttttttttcattagcagcttaaaattggtgccttattcagacacaagcaataggacattagcccagctttggaaataggtgagagcccatatatgattttcctagtttctcctccccttttgctttttgctctcttgttagtatattaattgttttcactctctgaatcttttttccccatttctttggcagaca

SEQ ID NO: 691995 - DNA, 1135 bp, Homo sapiens
aaagccaaaggtccggtgatgatcccatacccttttttccagtctcatgttgaagatttttatgtagaaggccttcccaaaggaatttttttttttttttttttgagatggagttttcactcttactcgcccaggctggggtgcaatggcgcaaccttgctggtcactgcaacctctgcctcctgggttcaagaaattctcctgccttagcctcccaagtcactgggattacaggtgcccaccaccataccaggctaatttttgtatttttagtggagatgcggtttcaccatgttggccgggccagtctcgaactcctgacgtcaagtgatcttcccgcctcgactcctgatatcaagtgatcttcccgcctcggcctcccagagtgctgagattacagacgtgaacccatgcctggccaggaattttgttttttaggaaggctttctactaatggaattcctggccttgagaggatgttactttagaaggaaaggatttttttgttattaaaaggtaagattcctggattcttattggactgttgtctctgttatgagtaatccatctttagtcattcaccactagggttgtatttaagtctgagttattttatggtggttttgttttgtttttaccgaattttgttctcattgccgtggcttgagggcaatgacgtgatctcaggtcaccacattctctgccttccaggttcaagcaattctcctgcctcagcctccttagtagctggatttacaggcatgcgccaccatgcctggctaattttttgtatttttagtagagatggtgtttcaccatgttgaccaggctggtctagaactcctgaccttgggtgatccacccgcctcggcctcccaaagtgctgggattacaggcatgagcactgcgccagcctgggcctgcttctttctctttttctttttttttcattagcagcttaaaattggtgccttattcagacacaagcaataggacattagcccagctttggaaataggtgagagcccatatatgattttcctagtttctcctccccytttgctttttgctctcttgttagtatattaattgttttcactctctgaatcttttttccccatttctttggcagaca

SEQ ID NO: 691996 - DNA, 1246 bp, Homo sapiens
gtaaatctgtggattaagtaatgtcttagtaggtattgggaaaatttgaaactagtaacatggaggactattgtcattgtttatttcaaagccagttaaaattctgcaaagcagtgtacataaaaataatttcaagaaatttataaaataccgagattatggtgtataaacaactttagattctttgtttaagaaattctgccagtttgtaatatatgcttcattcaaagtagctaagggctgtacctggctaatagtaggcacctaatatttgttgaaaaggaatactgagtagctgggacctcctgagtagctgggaccacamacatttaacctgtatttataaaattactgtttagagaataacatttgatggaatcatgcttttactttctgcttacgactcaattgtttgtactgacattaacatcccaaatccttagcatggcctacaaggccctgagcaatgtggcacctgctgaagcctgctgcctcatttaataactctttgtctctttcccagatccagccactctaacattttttagctcctggaccaagacaagctcttcccagaacctgacctttgtacctgttctttattcctggagtatttttcccctgacaaattacttatcatctatcataattcaggttaaatggcactaactcagggaaggcttccctaactgcctcccttctccaaccaaattaggaacaattatatggccacatagtatcgaatcaagtttataattttaaaataattgggagattttgttgtttaacacttgttttcactataagactgtaattacatgcaagtaagaaccatgcctgtttgttcactcctgccacagtcagaatagtgcctggaatatgcagtaagggctgaacaatcactaaataaatgaacaagtgaataaatggatattgtctcatttttagaacagagtactgaatggatcatgaacactatctggtatgtcacgtaggtaatttacaagggctacaatttcagctcagatttaccttttcctggatacaggtcttgataggtctcttgatgtcatttcacttcagattcttctttagaaaacttggacaatagcatttgctgtcttgtccaaattgttactaagaatcaagagagatatctgacatgaaatgacattggaaaacattaaacacgattgaaataatgctagccaatatggttattattagaaaccaattacattttcaa

SEQ ID NO: 691997 - DNA, 1138 bp, Homo sapiens
cacacacacagggagattaaaagtgattatatgattaaagtttgttatataaaatgatgtaacaaattttaatcatttaataaattttttataaaaaatagctgtcggaaaatggcctttataatcattatctaccacttttaaataaaaaaatgcatgtctaaccatctctgttcttgttaaagcagaatttgacatcaattaatgaagaagtgtgaaataactcaggaagtttagaaaaaatgtatggtatttataatcaagagtagaaaattgttgaatgtaagcaagtcaacaagtaactgtcatagatgaacttatcttaagattctggcttgcatattgttaagcattgtagattttaaactatttaaatactttgccataatcctttcccatctttcaattgcattttaaaatatgtaataattcatctgacatgtgtttcagctttttaaaactgagacattatgaaagaatcttagagaatatttgaaattaactagtaagaataatctttcaagtccctccatatttccactaggaagttgccttttgaacttcgttaccaataaaaaagaagttttctagtattccaactgttataagttttcctactgaattttaaagattaagcaatttcatagaaggatcagtttgaaaggatattcatctttgtgaacaataacaacagaatttttgcagaagaataagaattcatggctaagactaaattgatcatagatttttgcagtcttgagtttaccatcaaasaaaaccacacaagtttcccagtatttaggtattaaaataagattgcaacaaaccaaatacctgaattattagcactatacttcccattcgctcaagcaggcttcaaagttttcctcatctccaaatattcctggcgattttacatagtattggacctgtcctcaccaagtccctggtttctttgttccagtattcactcaggacactgatcatcttaagactcaattctgataattgcccaaccatggaggtgtgcaaaatgcagagtgatgagacaactcagccaagtcagaaggagaaaattctctctccatgttttgcaattaaggagatgccacagtagggctgcttcacctctatagtg

SEQ ID NO: 691998 - DNA, 1138 bp, Homo sapiens
cacacacacagggagattaaaagtgattatatgattaaagtttgttatataaaatgatgtaacaaattttaatcatttaataaattttttataaaaaatagctgtcggaaaatggcctttataatcattatctaccacttttaaataaaaaaatgcatgtctaaccatctctgttcttgttaaagcagaatttgacatcaattaatgaagaagtgtgaaataactcaggaagtttagaaaaaatgtatggtatttataatcaagagtagaaaattgttgaatgtaagcaagtcaacaagtaactgtcatagatgaacttatcttaagattctggcttgcatattgttaagcattgtagattttaaactatttaaatactttgccataatcctttcccatctttcaattgcattttaaaatatgtaataattcatctgacatgtgtttcagctttttaaaactgagacattatgaaagaatcttagagaatatttgaaattaactagtaagaataatctttcaagtccctccatatttccactaggaagttgccttttgaacttcgttaccaataaaaaagaagttttctagtattccaactgttataagttttcctactgaattttaaagattaagcaatttcatagaaggatcagtttgaaaggatattcatctttgtgaacaataacaacagaatttttgcagaagaataagaattcatggctaagactaaattgatcatagatttttgcagtcttgagtttaccatcaaacaaaaccacacaagtttcccagtatttaggtattaaaataagattgcaacaaaccaaatacctgaattattagcactatacttcccattcgctcaagcaggcttcaaagttttcctcatctccaaatattcctggcgattttacatagtattggacctgtcctcaccaagtccctggtttctttgttccagtattcactcaggacactgatcawcttaagactcaattctgataattgcccaaccatggaggtgtgcaaaatgcagagtgatgagacaactcagccaagtcagaaggagaaaattctctctccatgttttgcaattaaggagatgccacagtagggctgcttcacctctatagtg

SEQ ID NO: 691999 - DNA, 601 bp, Homo sapiens
tgttggatttcatagagaatctatacacttctgagttcttaagaatgtgtcttatcaataacacctttagatatggcttgctcctttagctggaatatacactgaaaacttcaatacttacaaaaatgtgttttgaatgttatgttttcaaagttggaaagacagtttccctttgattaggatatyatggatccagctcacttatctaatcaaagttcccaggctgtacctagagaattctattaaaaaacaaagacaacatcagctgtcatctacctgcttcataagaatattgtatgaactaatgagataattcctgtaaatcactttagttcctcagagataaatgctcaataaagacaaaataatattattatccagaggctgcctggccctttgtctatacactccttgttagggagatatcagtcgtatacagacatctgctgctgtgaattggtacacacctcaagatgtagtttcaaactttcacgaaatggagtccttcataagttggacaagttgcctctcatttagattatgtatgtcagtactcaacaagggagttctggtctaatgacagaatagaatacaataaaat

SEQ ID NO: 692000 - DNA, 634 bp, Homo sapiens
atgaaatactattcatcctttaaaaagaaggaaattctgccatttgtgacaacgtgggtgaacctagagatattatgctaaatgaaataagccagttacagaaagacaaatactacatgattttacttaaatgcagtatctaaaatagtcaaattaatagaagcaaagactacaaacagtggttgctgaggattgtggggtagggaaaatggggagttgttcaatgggtataaagtatctgttttgctagatgaataagttctaaagatcttctgtataaaacagtggctataattaaccatatggtatagcactccaaaactggagtgagattttgaggtaaatctcatattaagtgttcctaacacacamaaaaaagagaaaaaaacccaagaggacacctggaaactttaagaggtttggatatatctattacctgattatatgatagtatcatgggtatttttatttgtcccaactcatcaaattgtgcacattagatataggcagttttttatatatcatttataccttaataaagttgtttaaaaaagaactaaatagaaaaaaagttttttaaatttttttattattatactttaagttttagggtacatgtgtacaatgtgcaggt

SEQ ID NO: 692001 - DNA, 922 bp, Homo sapiens
aatgtgtgaaaaatgcatgtattatacatacattcattatttttaaagatttgaagaaataccacaaatgttagcagtaatggggatcaaagattagggctatatttttctctttctacatttctttacattccactttttacaaatatgtgcataattttaatggctagaacaataaaagtactcgtttattgcaaagacagccaagtctccccttcccgggatttctstctcttccacaccatgcctgccagcactacgttaacgctaggccctgatcagccttccccttgctccttccggtgccttctgagagctgaaattgtaaaatattaatcagatgttctgcttttagcacactaaaattctgagcagctatccagagagttggattgtgttatcaccggtacatttttctgttttgcctattttataatctgagcagtgtgtacaattcataacttcagcttagctgtgtagtctgttgacaattcccacaataatatcacttagctgctcttgtctttcatcctcacccacctctctcctgtgagctgcacttgtagatatttaaatagtcccctgaatgccttctttacgtatgtccttactatgccactacactattctctccaaactatgactgatttattcatttattcagttattgaacttcaatacattttttattatagagtaccatgtgtaaggcactggaagcacaaagatacaaaaaaagtaaaatctccttgtcttaggtaagtatacaatctggtgggaagtcaaagaaacaagcaaacaatcacaatattctaacactattgtttcagtggagggctgtgtaaacatcagcctgagcactgaagccttccctaatggggagtcaggagaagctttgccactgaagtcagatttcaactga
